United States Patent Application Publication US 2011/0189663 A1 - sequence listing, part 6

SEQ ID NO: 5659 - DNA, 328148 bp, Homo sapiens
  EYA4 gene - 133604206 - 133892353 of chr6; NCBI Entrez Gene ID: 2070; Build 35; sequence includes 20,000 bases upstream of initiation codon and 20,000 bases downstream of termination codon of the gene
cttttgtatttagtattggaactatgttgacttgcattgagtttatgttgactaaaatgttatagtcctcttggtaacacttcactgtttagaatctctacagagtgagtgttctatatgcatgtaatgctcactagctttcttcccttctcagctcctctcctggtgaattgtttttgtttcgttttattttttaagacagggaaggtcttgctctgtcacccagcatggtgcagtggcatagctgtggctcactgaagcctcgatcttctgggctcaggcaatcctttcacctcagcctcctgagtatctgggacttcaggtggacactcctgtccctggcaaatttatttttaatttagtttttgtggagacagggtctcactatgttgttcaggctggtctcaaactcctagcctcaagtgatcctccccgctcagcctcccaaagtgcttggatttcaggtatgagtctccatgcccagcctcctagtaaattgttaataaagaattaattctttattcagacctacaccacacaactagcaaggacagcgagataccattctggattattagaaagagttcaattaaactttatgaaacttggaatgacatcaaatttattttcagctaaatttagctctgagtaaattgtgaaaaaagagaagtttatttttaacccttaccctccagatttccattttatgtcccagaatctctttcttccattgcctgcttgcacttgccttgatccaggccctttaaaggatccattagctactttctagaggcaactacatctacaatagctcttcatttgggcctaatgtgagctgtcctgtgctcaaaaccctttcagattctcttgcatcttcccatctatatcaaaactttcttctgagttccatagtgtcaagaccccactctctgcttttcaaggggattgctaactaatctgatgaactcagcctcatttatgtgatattcagattaatacattttgaaagaagtcttcccttacccctttgtaagaatgattttattgaataataaagtatagtcagaaaaaatgaattagtcatgagtatatgattcaattaaggtgaatacacacaaataaccagtacccaaactaaggaacagaacattaccaacagcccaaaagcccttttctaagcactattgccccaaaagtatgtattattctaacttcccgcagcatattgtccatttttatactttactttaattgaatcatatatataatatatatatttaaagatatatataatatatatatttagatatataatatatatattaatgatatatatatactcttttgtgcttcttttaacattatgcttgtgagattgctttatattgtttcatgtgtttgtgaggcattctcattgtaaatatagcattccattgtgcgaatattccacaatttaatttattcattttattgttaattcgcatttgggtagttttctgtttgaggatattataaacagtgccatgaatagtcttcacatgttttatttgtttgtttattttgttttgtgttttggtgaacttaacattgcatttctagtgaatatatacgtaggagtggaattgtctgttcatagagtacacatattttcagctttagtaaaggtttgcaaaacgttcaaagttttccaaactggttaaccagtatatactccctgtagcagaatgttagtgtgtctgtttttcaaaatcctccccaacacttgttattgtttgccttttcctattagttatttttgtgtatatatagtaatgtctcactataattttaatttgctgattgttattatgctgacggcaatgaaatttagcattgttcatgtgtttcttggctctcaatgtgccttcttttgtgaggtgcctcttgaagacttttgcctattttctatcattgtctttttttggctaatttatagacataattacatttgaaaaaggagctttaatggtgagagcatggtggtaagcaaggtgtataaagctggggaaagatgtctaggcatatggttgtttctatttctaggtactttcctgtgtctcagccttactttgtactttcaggtaacacaggaacacaactcctgtctttagccacatacatcctttggaccaatatcctaccttagaactgacatttaccatcccagttgcacatttatgtttattttttattttaaattgggactgagaaaaatctgattcgaagtcaagattctgctgagttggcatcaaatatcaaaatccaagtggaaaaaaattgcagagaactagaacaagtgagggtagagtggaataaacatctcagccttagttgtcatgtctcttggccacggataccgctatggtaatgttatcctatgtgagtggtcacagtaaccaaaagcacagcctcactgaaaggcatccagaggaatgaattagcccacagcatttggaccagctggagaaattttcccagcagtactcctccaaaaagaaggcaagcagcaatacagagaataacaataatgccaaactatgaatgttgtcagctgtattttccatttgtctaaaacttcttacttagtcatgggcctactataacttcctaggttgaaaatcaacttttaattcaattggtataacgaataggccattatacaaatgcttggaaaggtacttgcaggaatgctgattagtgatcattgcagttcatcctgatttaatataaccccagatttcaggtctttacgcctgtgtattttttacatagtaccatcaattccgcggcaattaattctttttggttttggtttttgtctgttttaatgttcactaatagtgtgagcctaccaccacccaaccacagtaagccatctcccagagttgtttaacatttcatccccagagtctcatggacctgggtttgaatctgtgctctgtttcctacttagcagagtgagttgactaagtgactgaacctatctaacccttagtttcttcacctgtaaaatgggctaaggatagtatctatcttttagagttgtcaggtttaaaagagattaaccatgtaactcaggactaagcatagaataaagttggctaatattgctgcatactttactatatacaaattacaacatacagctttaacacatggcatttatctgtaaactttgctagaattttggtagtattcttcttcatttacttgtactttagtcattgatctttttagaataagaacttaggaaaagtaactttttatctctacattagatttagagaaatcaataaattgatctgtgcatcctaattaataggtgagcagagttaataagaaaactgcctcacacaagttcccaagtggcataaatgtaaatgaaatcctttaagtactcaaagaatcagaggcaacattttaccaaaaatatccaagatgtaaacataagccagcaatggactataaacgcaacagggtgttgactaaatatatgtatttttatccttctatttcccctttttgttcactttcctctcctgggatccttggttctcctgctgatccttcctggtttccatttatcttcaccgtgacacttctcccagccttatccttcccaggccagtcaaacactgtatttccctatctcacatctttattgtatgatatagtcctaacatgtggtccactttgctttcacattggaaagagaaaagttccactgagttagctttaaagattatggaaccacctgtctaaagatatgctcatgtgaataagaaaatcttgatttgattcaaaggaaccaattctgaatggtggggtttggagaatcctttacagaactgcaagtgagaccatctggggaaaattcattttttaatagatcaaatcattcaacctatcaatgactatacagcccgtggcaatcctagtcctgattaaacatatccacttgcacataaatatacgtatacacacacacacacacacacacacacacatgcagcatattttgtgtgagttcattgaaatgctaatactttttcactacctgtaattatgtctgctaacatgattcccatctcaccctccccccatgacttaaaagttgttagggaacaccatctgaaagacagccatattcgcacacccatgataagctggacctgaaaagtaattatcctggattagcacaggccctctctatgctaaattagcagccagatccaggcacacagttgcttcctgaccctcagttacacttcacagaaaacctgaagaaatctgagtagagcagtcctcatgctattggtttaatttacttaccatttatagccctggcctcagttgggaaacagatttatttagtcactaagaaattgatccaacctaggtacatattaggcaacaattaaatgcttattcattggttggcaagcaagcaactttaaaaggggagaagaggaaaattaacactaatgctggagtaggccttagagagaaatcactgtcctggatcccctttttctgcatatccggaaactgaacacaccgagattaaatgacaacaaatggtgacagaagcgaaccttatacccagaattctagtgtagtgctccttctattatgatttctggtccatgtgtcaaaagaaaatactaagggcaaaagacacacttcgatgctaaagctataaaatgtcatcaccaatcattaggaagaactgcatagctcattgatatatatcttaaaatacatgtcactcttctgaccctgtggctggataatgtttataatagcctctactattacacagtttccatttatatatttcatctttgcatctctatttataaaaaaaacccacaaatgtatttgtttcacaggtggcttacaattggatgatgagataaacctaaatataacatagtggcagataaccataaaacagtcatcacccccagattcactttgctctttatgtataccagtaatacaacaacaacaacaaaaagtttggaacaaaagtttctccgtgatccaagtggagaatagaagaagctgtctaatggtattacagagaatgcctagagtgagaaaattgaggcaataaaacatgaagttatttatctggcgttaacacaaggttatttatactaaagtagtagttaaacaagagctggaaaacttgggaacatggtggaagtaactttggatgacacattgaagtcaaccagtttacatattatttcttcttttatgttctttattctgcttttttgtaaagcagcaattcattgtctgatgccaccatattgcacttagtttagcactgttaactttattaaacttagtttagatcttcgtttagcacttagatctgctcactgatttagaatccagggactctgatattacgttactttccattttgattcaagggtgctaaaattctgctataaatcactattcagttaaaaactgatgtatgtaaaccttctagtaggaaacaaaattgaagcattacaatcactgagagaatacagccctgttgtcctcttgcaccctttagagagtaagtgaatcactcctaacccactctcttataaaccagacaattcagaggaccaagaggcattagtcttgcctcctcttgggaggttcacattttccagtgaacacacgagtgatcagtcacaatcaggcacagatggaattcccaagacatgtgctccctgccgtacttaaccagcacaacttttgcccttgtcctaggtatgctaccattcaaaatgactgtatcaaaactgaagatggttagaaatgaaatggaaagagtcaaaacaggctgcttccaaatgaaagcaacccaaagcatggaaattatgggtatgggaaaaatgctttcttggtttatttgattaacactttgccactgagaagaattttcctttgaggttttttattctgtgtagtttttaatgtaattggtttaagtgatactttacttaaatatatcttaaatctgccactaactataaaattttcatgttcagtccaattgacttcaaagttatccaaaatgcttattcccaagtgacacctatcagtatccagctgtgttcttgatggagactgacatctgaaaccaacaattaaagttacccaatgccaggactctttaaagactaaagggctttacagtacctatcacagcagctcataaccaacttgtaccattattgcttctataagtgtgctgggaggattaatttcttgaaacttatttagtgttacagaaatagtaatttgcagagccaaaaggtcattctttgccaaatcagtacattcaaagtagtaaatttcaatgaaaaactaaaagtatcattgaatatttgaatattttgtatgtattctctaatcatcctagcctcttctctcatctatgtgacatcaattaagagttattaaatttaaaacttgaaccgaagtagcataaaagccaattgttttatgaatactgagcccttaataactttcactttgtgcacacacacacacacacacacacacacacacacagagaaagaaccaccccctccctccctcaagaagcactgctattcagattaaggtatatcagagcaattctgttgttccatgatatagaactctcaaaaggtatacaatcatgactgccccaaaacataggagcagtggcttcagggaaacataaggaagtatcaacactatcaagttctaaatttgagattggattaatttacttatgtaacaaacattcacttgtttgttacaaatatttttttttgtacctactatgtaccaggtcctgagctagtgttaaatgactatgggttatggtttctgtcaaaagaattattgttaaaagtgggaagtggatatccttagctatgactgcaactagaatcagcatctaactactttatctaaccctacctccagctccttctacctcctactaattgggcagccccctttccaactcctctttcccttgatatgaaaccataaagataaattaccaggaccacacataattgattagagagatttgaagatacttaataatgaaattgggcaatacaattgttggacataatatatcatctctcattacaaacagttaaggtgctgagtatctggcagatgtccaatatgattcccaattactgaaaagttttttgagaggactctcaaaattgtaatacacttatgaatctcacttccaaattataaacacaaaaatgacataaatagcatataaaatcgctggtaaggtaaataaatgttgaaatacaaactaatgtggagaaagaaacatccatttttatgctattgcttttgctttttatttgttttaggagctaaattctttctgtatcaaagattatattttagataatagaactgaaggttttcttttgacatagatactaactgatatctagctggaaaacagaataggataaatggcacatttaaggtttggtatcaaacagtgtactggaataaagaatagacatataatattttgaatatctaaagggagaagtgttcaattaagtatttaatctttgaggtgatattaagccactctactttgtaagatgccaagtaaacattcggaagaatgttttaaggtgtgtgcatgaacaactctatgcaggtgaatttcaggacgtaaattgaaaggcagacttagcagaaagtaccacaaacaatactttgggatgatgccttctaaattattggttacaaccctggagaaatagctattgtaatgagatgctttcctgaagacattggcctaagtgctggtgaaaccatcgcaaagtattttgctacttcttgacattgtcaagaaatacattagaaacataagagaaatggttgccatagccttgctcagaattatggttcacccgcatctagaatgtgataagagttttggtgaccatacttcatgaaaaatcttaggggatttgggaagatccaaacaaaagacaattgtctttaaggagttttatgtgtattcatttcttaattttatacaacagtgaagctcttcagtttcctcacaagaaagttctggaggccttgtagtaaaagttaatcaagtaataaaatcatgaggaagcatttaagaatattacaatgagggaacagtctttgcaagaaaggaagatttttcaaagtaaagactaactcatatataagaatgggttattaataaaaaactagaatttgggggtcaaattaataggcagagaaggctgttctctttattaggccatctcaaatctcaggttatatagcaattttaaaaacgaggaaattcacagatactcattttcaaaatggtgtgcaatccttcagaatataaaattctcgtaagtactaagttgaatgatcccttatgagttttaacttgaaaatttacttatatgttaccactactttaacagataagctgatgacattaaaataatagttttgacattgaatgatttaagagatctaagtgaaatatggattgaaaaaatagagacacaaaatattatcttttttgtttgatcaagaaaggcaccaaggtacaatctgtagacttcataacaagtagtaaagttaaactaggaattaatctaactagttactcatggtgtacagaccaatgatagctatgaaaagctaactctttcatataagcgtacacttcaaagttacaatgaaatgaaaaagaaactagagcaagtttttatttgttttgaaatacaaccctcaatgaggcattgtttgcacattgaactaaatgtataaacagtgctgttgtgggtttaatttgtgaaatgtgtgtgagccttgatgagctgtgatgtttgctatttggaaatagaaaactacttttaattttacatactcatctcagaattgacccaaacatatagcctgtgtaagagtaaatgagacccagattaagatggcattaaaaagcttatagtaaggagaaacaaagcacagtttattgcagaattggaaactactggttttagcaactgactggatgaacagggccaaggaataaatgcacttatttctacttttagtgactggcacccattaacagataaaggaacttagggagaggagtatcttgtcttggggagggtggagacagacaaccatttctgtttttgttatattgaattgtacatcttcctaggcataaatactcttcatgatttcaggccaggtccaaatgatacctcctacattccttcagctggaagcaaattctctctgctctgaactaaaatagcatgtttgtcaatgtttctctttaggagctcaacactttctccccaatgtaatgacaatttttaaatgttcaattttctgctctagaccaaaagtttctggaagacagggactatgcgtggttcatctttgtacttccttatttcaaataagcatccttgaatgctaagagcagaatgctaaggagtatccacctttaaatggccagagaggatttaagtgaaaagacaaagaaagaatggtcaggacgctggagttgactgaggccagagcagacccacagaagccaaaggagaagaaaattccagcatgaggcttgtcagcaaagaactggtcctcaagtaggagaactgagaaaatgatttgccagggaaagaagagagaaatttgatatcctgaaacccaggatggaaactaggaaataaatgcattgccaccaggtcctcaagttcctctggattggtgtcccgggtggcttccatcctcacagttaaaaacaactttttggcaatagggccaattttggggaaaaaagtattagatgtttatgggtttctttttttataaattcaaaattaaaatagcttccttgactctcatggggacaaataatctatttttgtaatttagactgcctgctgatttgtttttgttttgcttttccttttctctcagaggttttattccaagatatgttagttccaaatagtccaaattcacttgatagcccagatgagggagattataaatgtgaaaattctcaagggatgctcctagtgtaggtagataaagtagccataggtgtcagttgctgttagtccactgtctctaccctgggtggtggtgcatgggctttgctgtgcattatgggtgcactgcatgggtggtatgcaccatcatgggtggtacgatggtggcagatgttgacactccatgagcagacagagcatggcaatacagggactcaaggcagggagttttcatatttggagtgcctggagtcagatggtggatctggcatttgcagaggagttttgcatttcttctgttcttgtagacagagggaggaagaggtctgtaagggacttgtaaacttattcttaggtgtgcggcaactacagggtatataatcagaggaaattttaagctttaaaagtaggtgtagaaggtgaggctttggaaaccaggaaaccgctactccagatgccagcaagtggagccctctagggcaggagctcagactggcccagtggcaacacagtcccccttgggaagactgtccccattctctcactcttggatacctgggtagaccactgcttatctgaacattaatgagaaagaaaaatgctacaccagtataaccactctaatactcagatgaggcagaactgaggagcaataaaacaatggcctccctaaagtttcatctcacatgtgtatatatcactttagaaattaaaaagtctcatttcatcttgaaatagcagctttagggatcatcttctcatttcagatgggtaactatggctcactttaagttaaatcacattagcaagacactgcagctaggatgagttcacttggttcaacacaataataatgagtgcttattatgtccccagccctaggcgaggcactgtaaatagagagaggaattaaaggcagccaaccctaatccttcctatcttagtctgttttgtgctgctataacagaatagctgagacagtgtaatttataaagaaaggaaattcacttcttattcttctagaggttgggaagtccaagagcatggcagcagcattggttggctactgctgagggccttcttgctgtatcataaccctggtggagggcatcacatgacaagagggcaagagtgtgcttgttagctcaggtctctctttctcttcttataaagccaccagccccatcatggggggccctacccttataatcttatctaatcctaattatcttccagagaaccctttgccaatcaacataggaatttggggattaaatttccaacacatgaaatttggggatacatatcaaaccatagtattctgcctctgacccccaaaattcatgtatttctcacacataaaatacattcatttcatccccacagactcaaagtcttaattcattccagcatcaactcaaaagtccaaagtccaaagtctcatctgtgagcttgtgaaatcaagacaaattatctagtttcaagacacaatggtggaacaggcatagggtacacattcctatttgaaaaggaagaaattagccagaagaaagaaataaaaggccccaagcaagtttgaaaacaagcagagcagacattaaatttttaagctgaaaataattcagccttaaatgaattatttgaccccatgtgccacttcctggacacactgaggctgggggtgtgtcctcaatgcatcaggcaaccctactcctgtgactttgctgggctcagcccacatggctgcttttcacagattggagtcacacactgattcctgcagctttctcaggcaagcactgcatgtttgccagtggccacacatttctggagagttgagggtagctccaactctgaccctacacctccactcagcattgccttagtgaggtctctcagtatgctctgcccctgtgacaagcctcttcttgggccccccaggtttttctatacatcctttgacatcaagatggagactactatggccccacagctcttgcattctgcacacctgcagaattagcatcatgtggacactgccaagggttactgcttgcaccctttgaagcagcggtatgagctgcatctgggccagtggtatgagctgcatctgggtagcaggagccctgagctcatcctgagaaaccattctgcccttgtaggcccctgggctctctggcaggaagggcagctttgaagatctctgaaatacatttgggatctttctcccattgtcctgatgaatagcctctggcttccttctagcagtcttaattattttgtttgtttgtttgtttgtttgagatggactctagctctgtcatccaggctggagtgcagtggtgaaatctcggctcactgcaacctccacctcccagtttcaagtgattctcctgcctcagcttcttgagtagctgggattacaggtgcccaccaccatgcctggctaatttttgtattttcagtagagacagggtttcaccatgttgcccaggctggtttcaaactcctgacctcaagtgattttctcgtctcagcctcccaaagtgctgggattacaggcgtgagccactgtgcccagccctctaattgttttttaatattttgaggctgcaaattttccaaatttgtatgttattcttcacctttcataataaattctgtcttcaaaccatctatttgctctgaatctcatcataagtgaccaaaagtcaccacgcagcatcttgaacattttactgcttagaaatttcttctgctcgaaatcctagttcattgcttttaagttccaccttctataatgccccaggacatgaacacaatacagccaatgtcttcactactttatagcaaggatgacctttgctccagttttcaatactttgttcctcggttccatctgagaccgtgtcagaattgcctttattgttcatacttctaggaccattctggtcatgacaacttaagtaatctccaagaagttccagaatttctccagtcttcttttcttctgagccctctccagaatctcctttaatgctccattcataacaacataagctttttatagcctgctcctccaaactctttcagcctctgtccactacctagtttcaaaaacatttccacattttcatgtactcattattagcaatagccccacttctcagtaccaattttctgccttactctgctatgacagaatacctaagactgggtaatttattaagaaaaaatgttatttgtatcactgttctggaggctgggaagtccaagagcatggcacgaatatctggttggcttctgctgagggccttcttactgcctcataacatggcggaggacatccattgacaaagagggcaagagtgtacttgtcaactcaggtttctctttttcctcttatattgccactagttccatcatgggagcccccaccataataaccatatctaatcctaattatctcccaaaggacccatcttcaattaacatatgaatatggaatttaaatttccaatatatgaaacttgagggacacatgcaaaccatagcactttcctttctgcctttttctaatccagtcatctctcttttgtgcatgtaaagctttctgtctcagtggattatgctcaagctcccctctgggccacacaccccaatctttccattttctcttttgaacttataaactgctttggagattatattatgaagctaaaattgcttatcacagatctcaaattataggacacaagcagaccacttcatctctgctaatgtgtaatagtacaaaacaaaacatggaattgtagaatacaaaagagagacaataagcttagaggtatagcaaattgcccaaagggctacatgagttggcagtctctcaaaacaaatgaaataccagagaaggtttctcatcacactaaatgtttgctgccgtattggcatagggttataaactggagtatttagacatccttcacttaagcaactattttatttttcttaaagaaggaccagcaagaaggtcctcaccagatgctggcccttgattttgtatttctcagcccttgtaataaataaattactttataaattaccgagtttcaagtatacttttataagcaacagaaaatggactaagacaggtggagaggatggggagtatgttcagcttgagatgctaccttgaccctttggtaaagataaccaggattctgggaaggacattcatgttcttaagtcacctatttagaggtgaaagaagagattataggatgaatcaaaggagagagcattgtgaagaaagagaaaagaacctgcatctaggtccatttttgagtgtcattaagaaaaaagaggataagggcattggctcatgcctgtaatcccagcactttgggaggccaagatgggaggattgattgagagcagcagtttgagaccagcctgggcagcatagtggaaccctgcctcagcaaaaaaaaaaaaaagaaaaaaacaaaaaaacaggtgtggtggcatgtgcctgtaatcccagctactcaggaggctgagtccaagttaggaacactgataaattgcaacgatctacttgtactgaatatttctgaataaggatattataatatcaatgaaaagtataatgaaagcttttcaatgtgtcttctttccaccacatttaatagtacacttggaaacaatttcttcaatggttttctattttaagcatatattctcagcagccccaacacaccttaaaatgacttttcctgttcacctgattcctttattccaccactttctcaaaaaaactgatcagccagttaacagaagactgctgtcaataataccaaatgcttcctggacataaaagaggctgaagattcaggaatgactaataggagaccattgatgatagcttaaagacagcagtctcagtaaaggaataggagcagaagtaatatttctaggattaagaagagtcacaaagtggatgcactgagggctggtcactttttttgagaaagtggaataaaggaatcaggtgactatatgctaatgaattcaaaggaacaagaaagtaatattgttcatattttgactattattaatattttaaaatgttcattcaaagtacttgggagattgattagtatgccaagaaaaatattgtgtgaagtgaaaatagaaaaagaaattacatgtaagttgttagaatatgaaaatagcatatgttggtaggaattcaaagtgaggcaaaaatataatgcaaccgaagaaaataaattcggactcattctaatatgttaatgagaccacacctggaacaatgcattcaatgtgggatacctctaacaaaaatgaacatctaggaaattggaaatagttcagagacaagcaataagaatgattatgggtttgtaaagactgaactgccacaagattaaaaggccttctatttgtttaacgtggctaacatgacttaaaagtgagcatgatatctgtttataaacatctgagggctgagtgtaagcatggaagaaggagtagagttgcctaatatgctactaaaatgattcaactggagagaattttcaagagaaaatctaaaagtaaatataatgaagctgtctcccagaaaatgtgcatttcctttctttcagaggccctgccaagaatgaggaaatttagcaggtcccctgaagatttgatttcttcactttcacaaactagtagaaacctttttaagcttgatctgtctgcacaaaattactcagaaagtgtgtttatttatagattttagaaaaccggcagcataggactctagattcttgggcaatcatattttatcttcatttattcctgtggtctgtcatcagcagagaggtagattaaaagactgttcaaccttgttcacattaaggttggtctttaaaactccatacttccaaagctcaaatagtttggcttagaatttactaagaaacaactgaattattgtatttttgaaaaattgtgtatatttccagctagagttcatagatataccaaaagttgctcaagagatttactttgggattatttctacaagcatccagttctctgcattctttttcaataaatgtagtgtcttatagcattttttagcctaaaatctgttcttactaaagtgagggcctggtttttcccttaaggttgcttttaaatgaaattaaaacaaaaattatgttttggattatgagctcctagagcgctttgtttaatttgacttatacaaaatctaatgccaagacagtgccatgcacgtttgaaaaataaacaaatagtaaatggtaactgcagaggcatcccattccagaggagttggttaagggaattgctaataagtgaatcttatatttccactgatttaccctataaagtcttatattttttatctccccactcctcccaaaacacatcccttttcagactgagttgaacatgtacaaatattctgagagcctgactcatgtcatgcagggcccactggtgtttttgaatcacttcaagaatctggcagcaggtctctgacttcaatttcccccatgtgtctttctaggccctttgcgtttctcccactgttctactttccctctcttcttcattgtctgtactgtattgcactactgggctaatagatgctagggaagggtaatgagtaaccggtacaatatttcaggaaagtgatttgctttttaattgtgcatttatgaattgtttgcattttaccacaaataagatagtaagtaaaacaataaataatacatgaattttaaaaagacgcctcaacttcagagacttcaagtatattttagacaagaaaagcaataattaaataagcacagaatttaaaaagtaatacctcaaagtaaattggacacaacattttgttccggttatgaaaaggggaggcttgaaaatatctcttggtgagcctgagggacatatggaatgtaattctttaaaccaatgtttctcaaactgtatgtgagataattttaggtggtacatgagaaataacttttatttctacaatataggttcctttgcaagatcatcttctattcatggcgggttttattagttttccatttatggtgactataaaaaatgtcctttatcagataaacttatttaataaaaatagattatttaaagatacatattaagtcaataatataggcgatatggctataattataaaagtgatattcaatgtaaatgctggaaataaggcctcatttaagcaaacaatacatttttgcctttataaccctaaaattctgtttcctatgttaaacttatttcaaatgtgtactgaaaattgacgttttatctgacacctagtggtgtccatgttaatatatgtatatttaagacaactattagaaggtagtaatatgaagtcaaataactaatatattatcctggattttaaaaataatttctgtacatgtattcttatctagatgtacaaaaaactatgcaggagcaaagtgaccttgaaagcaaggtcagtgtaactgaaaaatctgactttagaagggtacaaagaaacatgctaagaaaacccaccctatatttatgttaacaatatgctaaagtatgaatttttattttattcaaatcatacatctcccacctttatttgtaggtgaaactagcacataatgttttatgccaaaatgaaattcaaaatgttgttgccttttgaggacagtattaaattcatcattgtacttaatccttacatgatatttgctatagccacagaacattcttagacactatgattcacaaaacatttaaattgcatatttggcttgtaatatattacatatttaaaagaattactatttttctgaataccattaatactaataatagcatcacagtgactaagagtggacttaaataaaggctggcttgaaactcaggtctgccatttattagcaagcttctaaaaattctgagcccttagttttctcacatgtgaaatggagaaaataaatctgcaaaattaattaaatctgtccattcatatttttctctccagtgtatattaactggcattcctcgttaggccagaatgtgctctcaaccatgctccaaatccgctttgtgccaaccccactgccagaaccctttctaccttgagaaccagaaaaggaaacattatgcctggcaatgcctacaccctccaaaataaatctgcaggaaagaacacccagtaagtgatgagagcagcaacgactgcctttatcattttaaatttacaacaccaccttttctagagcctcttaagcattgtagataattccccactcattaaaaaataaattgtaaccataagtattcagggttgatactgcttttgaattagacagtgctcatatcagttgcataagaccaacctaaagtagaggatgaaatcttttttctgaacctttttcagaacgtaacttagtgaatatattaaaactaaactttctttgaatgggagtaatttctacggattaatctgtaatctcttagaccacacctaaggtaatgtagaggttgttgtatcataggctttgtgattagagaccactggatttgtctttggaaaagtcactcatgattctttgggctttggtttcctcatcttttataccggcttaataatgaccaccgtagagttgtcatggaagttaaatgaactcatgtaccataagtgaccaatacaatgattgacactcagtgatttatcaataaattaaaacatttattatcaatatgacagagaaggtgccgctaaaatagacaataggtttttggaagaggtgattaaatggatgcaaaatttatggattgtttattccgtctacctttgctgtgtcccctggttgtggcatacacacgtgtgggtataaaatcgtaaatcctatgtagtcgcgtagtgcatgcgcagaaggcttagacacgaaatgtcatttcagcaatgtgcctagagaagctctgacgccgccttggaagtaagtcgttgctgcctgacctttgggcgtctgggacggatgcctatacctgcacccagcagcactggaaggggcccaggcccttcgcagcacagcctatccccagaccgcttagtccttcataacatatatctccacggaaaagggtatttcctcccgtcagaaaaagcgccccagtctggtctgggttggtttttatttcacgttgttgcaagtaggcgaagtcccttctgtctcctcccttggggtaagtggaaaggagtccggcagggggcccgcagtggcctgcacaggggaactgggtagcgagagagttccaggcaattccgggggctgccccacagaagcaggtggggatcgacagtggctctccggcccagggaggagagcgcggtcgcgggtccctcccctcagcctggaggctgcagccgctcgagtcggcccgggtgggggcggggtgggggcggcgcggagggcacggagattacggcggcgccacccgggacatccagggccccgaggccctgggcggtccccacgcgagatcgcaaaccatgacaataggcagtcacccgaggtcaaataaaaacggagtgggtcccccgcgcgccgccgccccccgcgtccctggcggcctcccccgaggcccccggcggcctcacgagcccgcagtagccggtggcgacgtcgcccccgccccacctccctgcgcaagtgcgaggctgccggcagcgcggcgcacgctccggccgttcccggcttccgcgcaaaacttccatcctgtccacgtgaagttgtcgctgccttagagagggggaaagagctgcgggaaaagccggggagtgacgactgcggcggctgggcgcgctctctcattttcttttcttctcctttcccccctgtcgcagtccggagttttggctcctctcctttcctcctccccctcggagccggcttctccctccgccccgcttctcccccgcttgtgtacgctatttgttgtggggtggccgaaggggatgtcctgttttcaccagaggcacagcgcgaaggggaaacttcgacactggaaggaacgagaataaatacttaattacggacgcactgaaccgcggctgggacagacacttcgggaacccgaggcggaccgggcgacgaggtgagtgaccccttcttccaacccccgccccagggctcccgggggagcctgagttgagagaacccccaaactttccgggaaagtgcgcgaggctccgccggggacgccgagcgctgggtactgaggacgcgcagctggacggtgcgtgggcgcctgcgtccccggggggcgcttggaggccgggtgccccacgcctgagggcccgggccgctcggaccgcagcggtgctctctgccctagaagacgtccccaagccccaagggtcccttccgagcctgcctgtcccttccggggtcggcgcggagcctgcgcgtaacggagttcatccagcagtccagcgcgcggcttctacctgcaccccgcctccacctggcagaggcgcgagcatcggggtctcccccacatctttcttatgacgtgtattactttctgatgaccccctagatggtccaggcgcgaggatgctgacccagagtccttcggagggtcacaggcgcctgggctttcccggtgccgggtgcgtgtgtactttaaaggctcgcgttctaatctccaggcactgatcgggcttttcaactgcggcgatcccactttaatagtttttatgtggcgtggactgaatgtctcctgcagtttgccagggtcggtgaaattagaggcgccttgtcagagcagtcgcgttcattggctcgagtagcgggtgccatggaaggcttataacttctccaaaggaagggacctggctgggtagagcaggtttttctctccttccaagcctgctgggtctggggaggcagtggaacttgaaatggctcggatttttagcgtggtgaagcgaggtttggaagtagacgtgtgtgtgcttgttttattctgcgccgcacagcaacccgaactttcgtttggtagcacttgaaagagttttctccctttgtttgcgagattctgaacagctcggagcgattagggaatttgcggaccgagtccggtggcagagctggggcgaaagcagagagcgcaatttaatttttgtcatctcttccctgcttgggaggatagtgtttcccttcaccaccacccctctttctccttcctatgaagacaacggatttgcgcctggggtgagagtgtgtgcgggagagtggtgtggagactgtcctctctcaccgcgtctcctgcgcctctccccgccatcccgagcgggcctagagagtcattcatgaatcttaacctgagggcaggggaggaaggtgcaggtccctctgccctttctgccaaggtgcagaatagcgcccgggcgtgtgttttggttccagagcagttccacgtggagcaacttcgtgtgtgtgtgtgtgtgtgtgtgtgtgtgttgtgtacttgatctgtgaggaggtaacaggactctggtgttcaaacccagtgggccgttggccattagtttgctttcctggctgtcattacagacacttccaaaatctgatacctaagagaaccaacaggttaggtttcacattaagggctcatacttaacagttttctttctcccttaccccttttggcttggcaccctgggatcaacgtaattgttggagcgaaatacacctcctggaatatggcattttgttcctcttctcatctgtggccactttgtgaaccctcgggtgtttgtcagtttcagtgcgggctcctgcgggatttaggtgggagtcttaggagcgtttaacaaccgcgggctccccatcagcagcttctgaagtttcacttacacgtaggtgactgacaggattgaaagttgacgatggtttttttgtttgttgcgttgtttttgtttttaaaaccttagggaagggattgtacttgaattcctttcccgggtacggtttggttttaagcagaatcagtgcctttttttttttttttgtcttttaaaatattattggcaagcttaaacctgaagaaccaaaaactagagggggtggggagagaatccccccaaaaaatatttgatacgtgatacggagcgttttaggagactgcattcaaagacatttgtgtatttttaaaaataacattatcccaagaaacaaaaagcagtagtaacaagagacagattgttttgtgtggagcaagactgccagaatctgatttttatggcaacaatatcgaaagcagacataactacacccacatttattgttataaaccgtaaaaatagtttgttccacctgattaaaagttgtaagtcattcaaagttaaacccgtatttaggaatgactgtacaagaatgttaaaacctttgacagctacagctttgaaagcaacataattagatttgttgaaaatgtctcctttctctgattattagtgatatgtacttgtctttcataataagtaaaggtctacaatcaatatggttttcaaaagcctgttttcctttgtaaatttcctgaaaatagtatgtttcaatatttaaagaccattgtaactaccggttggttcacaattataactaaaataagatttactcagttgttttctttttattagtatttgttgaatatttgaaattgaatttctcatttccaaaataaaacgtctcacatatatgtatgtactcacaattaacacttcttttaagtagtaggcttaagttttaaaatttttaaaatcttaagatttgtataaaaaggagtgattgtataaaaaggaataataattattaattgttaagaaaaatagatgctgaatttcagagggtttctagaagctggagaaaaaaattgcatagaagtttcttttttgacgggtgactggcagatgagttacttgtcattttgctataatttatttttttcttttaataaggctctttgggttaaaaaaaaaaaaggaaaaacaagtactccatttctaagagtttcctttttatttatgttgtactttggggtgtaaataaattttacatagccacgggaaatagagtatccaatttcatgttttcagtctctgttgcaagctctaaatgactgatgtcgtgtctaaaaatatatttatatggcttgatatttcattttaacattttatgcactggaattagattttttaggatttttagaaagatagaatgacagaaagacgatgactattgttataaaaagttagaatgttaggaagttcacattctaactttcaaataatcaaacttattttgccccacaaaaactcacagtttttatacagatttcaagaagaggggtgataatctttttcactacttagttaagtgttaagtaatttaagaatgcaagtatgtattatgctttctcattatcatttttttctgttaggtaaatgcaagaacactggacattctgtaaaaacaggcccctctttataaggagtttattcaccatagttctgtattgcagctgctgatcatatttcatggagctgttaaagcacttaaaacctaaaattaggtactgtctggttgtaaatatttcagatcacttatttaagaaataaatagaaaagtgtgctatcaaaagtaggagacgttttgaatcctctcattgaagagctgaacaaacctctatcaaaacaccttcttcttttttcagtgagaatataatcttgacagtttctttttctaaatggatattattcttacatgtactaaatgctaaactcttataacgtgcctccctgtagagtatcttaaactaattatattcagaaatacagttgggggattttattacaatggttactaggtgaaggaaatcaacaccaggggaatggggtggcattgcagtgtacctgcttctctcatgaatttttcctgctaaactaagaaatgacatgctgtttcaggcatttgccctggagatgggtgagatgcaatatgtgtaatgctgcatcttatagttagatgtgttttaatgaaggggacactgcatagtcattaaatcatttttggagccaaacttggcgtcatttagcttgaacttaagtggaagaaaatgaacaagagttacacattcaaaagaagtacaagcaactttgattgcttttaagaggtttgaagactttgtaaacattactgtcactcaatattgcttgtggagctgtacattaatatatgctttggtgatatgtcattttacgcttgaaatttgtcattcttagtgtttctccatccatctttttattagtaaagagatactgaaaatgaacactactattcttactcccctaacccctttcacacctccagaaaaagagatgaaactgattaatttaaaatagaaaccattttgtgttatcaaaaccacatttatatagtgatttgagacagtttcagagagtgcacctctgagtctcactgtaaccttttttgtcattgaaaggtgctaattgatcttagggtactgacacaatagtatagtttgatatttgaaacctttcagagttggtctggcccttttcttaccctgagatttcagtgcatggatgatgaagaaagacaccattctaaaataccagaaattctcatttttttccaatatgaaatgttttaatacagtatgttcatatttttaaagcttttatttacatacagtaagtaaatttattttaacgtacttttggacagtaggagaaagacctatatgttctatcgtgttagaattttttagtttttttttttctgcacaggtagtttatttaggttataatttttaggcaaagtctgattcctattatcacatgaatattttcaaagtgaaattgcgttaaaccaatgtggaatagcttttgtatcaccaaggcatatattaatgtagatgtcaaatatgagagcatattttcttgagtatatttatatcctaaagtgtatttttaaataaaagtggtcactgtagtctttagataattacaatttggctgtcattattactataatattaatcactatcaccatcataacatcatagctagcatttactcaggaatttcgtgcaaaacactgttttaagcatttatatggattagctaattttaatcttcttaactatgccgtaaattaggtacttttgttattcctattttacagataaggaagctgagacccagtcatgcagcacagtggagccaggatcctaactccccagtatgaggccagcacccttatccttaagcgtgtgctgggctcttgcttccatcagtcatataccaccatttttaggtggtacctgaacattttgttttaataatacttatattttatgtaaggataactagatattagaaaaatttgttaaattttgtattaaacctgtaacttcatgggcaatattgtttgagacaagaccaaacaaagtattgaagtcaaagaaaaaaaattaagtatctgaagaaacgtattaagtaacagtgaacaagaatatggcctaaataaccacagtcatgaaggctggacagcaaatgactgaatttggagaaatgctgtattttgtaatgtttcccaattatcaagaacttatgaccagatcttttaaatatttaactaacatgtggaatcttcctttgctcttcaagccttatccaaattggttaaatgttatcaactttgtattttctttgtttttgttttttgttgttttaatgctggttttgaatctcaaatctgcacatttatgttgaaccaactaataaggcttgaagagttaaagagtgcatgatggacttctggaggcaggtttaaattataatggagctgcccatattttggaaatacattcaatttatctggttatcgcatgtgtaaggttttctgtaggtaaatacttttgctgttaataacctgttttacaattttatagtatttttccactgaagcagtggttttcatttttttatttacttatatactcagccacggatcctttcatttaaatggaaactgatgatatgcccagtagagaaatgtgccactgctctaggtgaagcaggatgtaggtagcctgagaatgactcaccaacagtaccctctcacggtggccgccgcctctggagttctctctaagtgtcttcaatgtatggaaactgctgcaaaaaaattcaagtcttctgacaaaaggggttaattcagagtacctgccctaacatgttcatgtggcatcactaaaaaacagactgtcagatacggtaaaatatctcccagtgtgacatatcagcagaaaggtgtgtctactctcccttctataacttgagtatccgtattaaccagtcttcaaattcgatttagcactgagaaaattaaaactgatcaaaatgttccctgtgtgtagttacaggtctgaatgaggcacaaaggacttgtacctgcaaaggttgactttattaattagaacatctttcctcctttaaagactgtaagaagaaacaccagcagtggcctaacttgacatgactttagattttcacgtaaattattgctactatttctgttatcctttccccctttctttttaaaatgaaagggacatttcttgtgaaagactacaattaaatcataaaaatttacattcatgtgccattaagtttaattctactcacaaaagcaacagtacagagtttgaaattctatccctaatcaagtaggtgtaccacataccgggagggctcattatgcacaaggtcatatatacaattcacagacctctgcatatacccaacggagtgatctattcattacatttcacctctgactttgaactccctaatgttaaaagatttgaaaagaaccgaatgttctgattaagagattgaatatttctaacttaatgttttcagtatgttgaaagtgatgatgacttgggggaatcagcagatctctacattacctaattcttttctcttacatttgaatgcaaatgtatattcatgtgcggttatgactcaagtcattcttgctaaatttaatgacgttgtaggtgaatcacattcagatttccttttgcaggttttccagtaatctaaaacaatgcttctagtaggtaacttaagcatgcaaacctcaataaacctgtcaagaacggcaattctactgttttattttgtttttttttttgtttgtttgtttttgcattaactttagttgataagatgatggtactgttatttttcttagttgactcatgaagaattttaatttaggtctagttttttcccttaattgttgactttagtttttaaaggtttcgttcatgaaaatggttagcaaagttgtgggtacttggtaaatgcttgttaaatgctttttccttatcagtgttgctgaagacttgcaaaattagagtgggatggatagatttcttttctactctgcatggctttgaagactttggagcttttattgtattcttatatttttacataccattcccaggaatatttagagagagaatcattgtaaccaaggtcacaggtctaatcctcaggtattcaaattagctttaggtggacaattgtcctatacacacttgttcgtattaatgttgtcataacaaatatagttataatatcttgatgcctctcctgggggcccattctggactgtgttgaagctgtctctaacactctctcacgtccctaagatattcaaccacatttgttcatgatttttatgaggtccctcctggacttaaaattccttaaaaaatttgcctgctgcctatagggcaaattccaaaattctctgcagggaagataacccttcatactgagaaccttgctcaggttgctcttctcatctctcactccccactcacaacaactctcttttccagctgtatggaaaactgcagttctcaaatacaccttggacatttccacttcatttctttgtgcgtggaatgctttttctctggaaaacatcgcccctctccccctgcaaatatcttttctactgctttttcaatacttaaggtgcaaaatgttagctcctctgataagttcctctgacctccagagtctgagttgaacgtttctttcttgttactcccaaagcatccagcttctacatttaacatagcccttgccacattgaaatgtaatagattacattagtctaaatcctgctttaagctgagaatttactggaaggattagctgtatttgtcatttctgtatcgctaatgcacagtgcactgctggacatatagtcagtaggtagttgttatattcccattgaatgaatgagtagaggtactgggaatgagagcagagattgtgacactgaacatcccctccttgagactgggaacagtgagaagggcagtgactattacaaggtgggactacctcaataacaacctcagggagttttggtataaacccagtagaattgcagctgtgaatccaggcttaggttatatgtatgtatacgtgaatgtagaaatgtgtttatttcttaccactgggaagtcagtgatctggtggataagccaaggatcctgaaaatctctggagatacggtaatttcatagtacttgaaatctgagagactcagttcttatagcacagtgagtaagtagaaagaatatgggggctgggcgcggtggctcacacttgtaatcccagcactttgggaggccgaggcggatggatcacctgaagtcaggagttcgagaccagcctgaccaaaatggcaaaaccccgtctctactaaaaatacaaaaattagctgggcgtggtggtgggcgcctgtaatcccagctactcgggaggctgaggcaggagaatcacttgaacccagaaggcagaggttgcagtgagctgagattgcaccattgcactccagcctggacaacagagtgagactccatctcaaaaataaataaataaataaaaaggaagaagaatatggagccaggcacttgggttcagacctcagctctaacattgatgagtttgtaacatcaaacacattactgaaacagattttgcttcagtttctcatgtgtaacagaacatgcctcatggggttctgatgagaattcaatgagtaaatatatgtaaatatatttagagtagtgcttgatatgagtatcagttgttattactatgattgggtatctttcattagattacccccaaatgttccagagatatttagagctgaaggtcttttttggggggctatggattggtgaccataaatggagtgtccagtagtccaagtataaattagatactgtgggtcatcttggcaaatctgaggttgtatttggagccttaagagaagacactataggtgctcaacagttggcattggccatttacgttgtgcagtaatatttcttttagtaaatatttccgcatacagtaatctagattgttttagagctttaatctgtgtggttccttaactactttaagcaattataagcacgttgtataatggtagtactttatagccaatatttaagtttcctcagttgcttttttttcagccgtaaggtaccaattatgagaatttgtataattttcaatagtcagtgggcctgatgaactcaatgtaaactttttaaaaggtagctttacatattgctatgattcttacctttagagagacagtaggaggtaattagtacctctacttacagaatttatcacttggattcagatataatggctatgtggcaggatggggctgaaggaaaaaggaaagttaaaatattaattgtcaaggtctcatttttacagcttgtctggaactgctaccaggtgtatctgtatagttttaaaaatgataacgttgtacctgaattcttcagtatatttaaataagagtttttcaagctctggttattgacattttgggctggataatttattcaggggatactgtcctgtgcctggtaggatgcttagtggcatcgctggatgccagggaccctccctcccctggtaatgatggtgtctccagacattgtcaggtgatctctgggagcaaaattgcctcttcttgagaacccataacctaagcagatcttaatatcatttgatatagtcaaaaaactcccagggctctgcataagaggattgttctatttccagtcaagtgtggagaatcctaataccttcctcccaagtttaaacatgaagtcaaacaattctcattagtctgtgttgatagattaactttgcacagaggggatttacagatacgcttcacacagattgaccatctccagcatattttccttttctggaaataatatatgagtgggagtaacagaatacctgagagagagtatgtaggaagtaaatatttatttgaatcatctatgtgtcttttcttccggttatttgtcagtagatagtttggatttatttttaaataatgaccattgcctttccatttctgtgggtaaatattcagtaataagaaacttttattttatttagtctgtagtgttagaaaaggtaaagttactgataatcacaactgctgaagattaaaatacttagtgagttaaattatttgtttgtaatgagaaattttcaaaagaattatgtgtagctttcagttgtaaccacaagttcaagatcttgagttaataacatttgtacagctagaagaaagtaaaaataaatatattacatgtaaaaactctcttttgtgaattctcagatccaaacttttaagttctcattctatgggtttgatgttgaccaatacattttatctatgaaatgatatataattgatgtaagtaaatttgactgttgtttgggcaccacccttacataatttaagcatatatgaaacacatttcaaaaatcacttgaacaaaatgggaacaataatgttcacataaagtgagagaggataacttttcccatatgagttttgggttgaatttcaaaattattctgaaatatgaaacattaatattataaatatatgattagactaattttcttaagagttctaaacagtagataatttttatcttattagaaattgcaaagatacttgaaattccacacttatgcattgtctaatttagtggttgtactttaattgtattaggtagataatcatggaagcagtcagactaacctggagatttcacatcatttactaattgatgcctaagtaggcagggtagaggtacttgaaaacacacacacacacacacacacacacacacacacacacacacacacactcactctctctctctcacttcctttgatttgtgctttaattttgaaatgtgtgcttaggtggcaaagggctgcaaatacagcatactgtgtttgaccaaaatatttttctgtttcctaggtggagaaggaccctgcatagctccttgttagcagagagataaagtgggtgctgggcaacccaatgacaggtggaggccgttctcggggagtgttgcggagaatttgagacaggggtttaaatcacagatagtggaggagagttctgcttcattcatggacaggaagtccaaagaaggcacagcgaaccacaggtccatccaggcactttatgccagatattgaacgggaagcctagtagccctttagttactggagaacggccaaaaacccagaggttctatttttccaaatgagcacttcctgggttcataaatcaaggaaccccacagagtattcaagtcacatatctcctttctcaggttgattctttgtatagtgggtcctaatgtggtaagacttacttatgaacattttatttcttataatgccgtcagtcacttccttttttctccctggcatattctcaccacccttatcctccatggccccaactcccttaacctacttgcctagtgctcttttgctgcctacctggacaaaataataataataataataatctactcatctttcaaggcttagctcaaatgtcacctcctctgtgaagccttccttaaggctcaggcagaattagttcttttctctgtgtaataccatagcactttttttggactgttaatataacagcagattgtgttggggctcattgtatgtgtctgtcttctagagagactatgaactcacagaggggagagatcatatctttttccctccgtaacctcaacacctggagatgttaatggaaattaagtgactgcactattccatgcatatctttaaagggcattaggtcccaaaccagacatctgcaaaggatgaatcctgttaactttttggaaaactggttctcttttgcttgtggtcatgaaagctggtttattggttattttctactccaacttatttaaagcctcatttgtaccaaagtattactgattttctagtggaaaaacaggtatgtccggcgtacattggtattttcaataaactgacatttaaaagacagatttctcgttgaggtttatggtcttcataattctagttttctccagaaacagaccttgatctctttggttgccttctgctaagatcgatttcatgttattttgaagaatttttaaccctcagaattatagatttcatttgagagaaagcatgttctgtatttgtttgtgtcagtgtttcaaaatgtgaggaccaaaaatcccagatgtatctattaaaaatatacgtggccttttgctgagggaaattacatcttttttttcaggcacaattgaggaagtaaaaaaattttgtttagtttttagtggtttgtttttaggcattttccatacaaagatgagcaagacccttcaaaaaccaccaatttgcttatttaggggggaaagtcttcctatgtccagaaataacattaaattaagattattgtttccaatagtttcaaaaattgtggttttattttcttgtatgagtcattttttagcatagtgcagtacatgattgcactacatcatgacaaagcatatttgctctgtgtttcagtgggtcactttatttatcagcgtcagatgatcagatcagaagagagatctagcctaacccttccattttgcagatgagatgttgtattatgtgaccttaagaccttaagtcatttactcagaacaaaacagaaaaagagaacttcatgctggggacacttcatgctcccaactctacatcttaccactttatttttatttgtttgtttctgatgaggagttgagaatgctggaatcagactacctttgtgtgtatccaggctctgccactcatcagcgatgtgactttggtcatgtaattttctgagtggctgtaagccatagttccagcatgtgtacatggggaataataacagtactcgcctcatggagttgtaaggaataattgaattcatgcaggaaagacatttggttcagtgcctggcccactataaaagctcaggttatagtttgaattgatatcttggaataaaatgctgagtgtatttgatattcagagaaggaaattcatgctgctaaagcaagtttttttttttaatctgttacttaaaaaatacaaataagtcatactttgtataacatattaaaacagagatgatagaggttacttttgagaggaatgaccagagggagcaagagagaggctttggaatgctgattatgtcttttatcttggtttggttgctggtcatgtgaaagtgtttattcaataaaaattcatcagtgatcaacttttgatttatgtattttattttactgtgcatatgttatactttcttaaaaagttttaaaaatacggatatatttaaagtaaaaagtggatttactcattcttattctctgcaaatcaggataagttgttatacttagatgtgcatcttttcaggcatttttttttctatatatgtgtaaatgtaataactatgtgaggatgtaatttattttcattttacatttttaactccaataggatcattgatttccttaaaacttgcttttgatctgctgaatcttgaatatttttccacatcagtacatatagttttgggtgcttctatttaatgtatgcagatatttcataatttcactgttcccctcttggtgtatgtttacattgcttccatatttttactattactaagtatgttgcactgatgatttttatgtctcttcgtacatctgccaaaaatatctgtagataaaactctagatgcaatattaatagataaatatgtatgtgcattttccatagaaaataccaaaatgctttttaaaaagatttatgaatcttgcatctttaaggtaatattctcatctttctcacaaaaaccaggtgcaaaaatttcaacttaattgaaccttgtaattatttgtgctctggttaagaaaaatggttatagtagtaaattccttgaaactcatatagtaatcggaatactccactatgattaggataaataattctattaacgatatatatttaatatatacatataatttatataattagtttctcacttaagaatatttagtattcatttttatgaatgcatattatatttacttatggttcgtaagcccaaatgttaggaagaaataaatcagtaatattatattcactacatttttttttacttagtaccatcaaatatttaccagaattattaggagaaatggttctaactctcatgtgattggtgagaacttatgaggaatgatatattgttattctagtaagagcctactctgtgccaggcacagttctaagcaccttacatatattacgatagctttttaacatagagatgaaaggtatagacattgtataagtaataaatgacattactccattataaatgtgttgataaatattattatacatgtcacaatatcagttgtgtcatatcaatgactaatttataaatctgttacttattataatctgtttaatgtggaaataaaagttaatgcatcaaaatccagaaaattgctactcaaatgctggctaaagtaatctgatagatacagttttaaaatgaagtatattaatcagttgattttgttgttcgatttttatatgtagaaaattctgtctccagaatattcagttcttgtagtttttggttaagattttgattaatcttcaatggttatctagtgcctttaaaaagtagtccaactcagaatagctaatgtattcctcttgcattgaataaatatggctatcaatttttgtggggttttttttcctgcagaatttcctgttattctaagggattcaataggacttacacatataaaactgaaaattatattactatggggaagctgctttgtgcctttcagaaggaactctcttgctaacttaagtactgtatgtgtgtagaatagctaatattttcctcccaagaaatttcatgtatgcagttaaaacactcttaaattgattaaggatttgttatatatttccagaagcactcaagagtacttttatggttataagagtagagtgcattagaatgccagaaaccaatgaatacgctagaggccttcaaaactgtgcccaacattcctgactttaccatataaacatgtggggtagcctggaaaaacaaaacaactctccttcccccaacgtaggtgaggcctgtgatgataacacttcaactggcttgaatattaatttgatacttttctgttagaagtaatttttattacttagcaaatgaaatggagaggtaataaatatgactgatatttatttcttgagtaaagtattattttacatcagattcgaccagttacctttatcctttttggaaaatgtattatacaaactaccacagtattttgcctattaatcagggaagctaaaaaacgttttataaacgttgaatcaaaactctcactgctgtgagggaattaaatttcaagcaatatactccttttatagggtgagaaactgaagtatggagaaattacaaggttttcccaaagctatacactgagtcatggcagacatagaaatctacaattctgtttgcctgattcaatctgaaacttcatgaaacgtaatttatccatttcctgacatgtgctttagaagtatatttccttatttgcttatttatgctctcattcattcattcatgcatgcatttatgcactattgactatttatgcactcattcactcattcatgcattttaaaagaatcggtgtttttgtatgatacagtcttgatttagggactatgaatattctgaatttatatatcttagatatttcttcaaagaaactcattgcatttttttcacgatcatgaaaaagaaattaagacattaagaaaaccaagctggattgtccaagtgtgggccatagcagtgtctatgggcagcacctgaagctaattcaggagtgaatctagtttgttcaagtgcttgaacaagaacttggctgaagccctggaggagatgcctggggcatagagtggggacgaggaaaaaccatagcactcttagagagtactgtaaggactagtatccacatctctaccacctgatgtctttacatttggttcagtcaagagagagggggcaaattattctgcttctcattctgccatcttcctgatttcagttctcacgctttaaattcttttttattgcgatctttttcttactagtttaaccagtattttcccgcgctttcttcaccaaattcgtttctttccatcagcttgcggagttatattttttgatcgaactgctggggttacaagtaatttgaaatgaggaaagtgtctagcaacttccctcagtccagtaccctgtaacagagacttcagagtacgtagtgatgacacctgccctcctccccttctatagagagtttagtgggcaacttttttggcttgttctcttgttcttttcttgcagccccaagacttaggactcagacttggtttctgcttgtatggctctccatctcttcccttggaagagttctttcccgggggctttttaggtccaagagcatttggacccctgggagatgaacttgtagattctacaaagaacatccaagtaccaggcaaaccacatcttcctgtagcttaaacgttagtcttttttcccccttcaattttactgaagaataatttagtctccaacaaacaagcaaacagaaccctagggtctttctcaaaggtgcattcttgctgctttgaagattatcatcattaatttctatttcagctaattggttttcctttacatttttatttgggtataaatgtgatactttggtatacattaatgttgatctatattaatacgtcaatttataattgagtgatttaaaaataatgatgcactatgacctagtttatatctgccttccacttaatgcatttcctaagcaattatgcttttgtggctgactgaattcccttataattccctgttgggaaacaaagatttttttttaaattgaagaagtggtcttgttaaccaggggcaccgtacttaacttgagagaaaaagattaggaatgacaggaatgacagcatactcctaatatctaacagcctgccatacatgtgaaagcaggacacatagcagggaagcataacgttgagttgactcaaaacaccaaatgtatttgatacattattttctgaattcttacaacttcagcccttttaaaggtctttggatttttagaagctataagggcagtttttggtaaaggtggccctacttctaattcagttacagagtcagtggaatgatttttatattcaaatgctacaggggaatttattgagaggaaaaagggtactcaaactttcctggatgcctcaattaaaaatctggatcaataaaatttcctcaagtgtcccaaatttaaggaaagcaaacagcatcttatttaattacattcttaattagtattcactatagacacaattcaaatcagtaacttggcattagatgaatcagatttattgccatattatataactctcatgtttactttgttgtgtttgggacttctccctccccataataaagaatatgactcacaggtgtcacaccttgattcctgagaaattaatgttatagaaaagttgtttggaaagatataattgtgattttgttattgtttttgttgtcattattttcttttatggggatgggcacacacttcttgagatttaccagatttaccttgtagttcataaattatttctttagatgtatctaatttgctgtttagtttgtttcttgtaaaaaaattcagtgaatatatttttaaaaacatttttatggttctcttccaggtttgtgtgtatatttttttcgtgtgtggcttttcaattttatttctgtttcttttgtgtctgttttaagtatacctatctagttttttccacattgctctgtagtttcacattcttagattcctaatttgttgttgtggctactctctactgtgttttgtttctttatgtagcttataattttttttttctttttgagatggagttgtgctctgttgcccaggctggagtgcagtggcacgatcttggcttactgcaatctctgcctcctgggttcaggcgattctcctgcctcagcctcccgaatagctgggatcacaggtgcccaccaccatgcccagctaacttttgtatttttagtagaaaaggggtttcgccatgttagccaggctggcctcaaactcctgacctcaagtgatctgcctgcctgagcctcccaatgtgctgggattacaggcatgagccaccgcacctcgcctgtagtttataacttttggtggatttctctcttagaaccctttgtactctgtggagcaattttgcattcccctggagtctagggatttcaaacctctaggtcagtctttattttattttatttttttgtcttgaggtttccataccacagatgcagtaaacatttagaatttacatcctgcaaggctgaagttttgatttatctcactcaagaaattattttcttttattctcttcccaaaggctccatcataggacaggcttctttgctgaatctgatggtgggccgagtttttctatcccccctccaataaatgtgacaaactttttagactccttcctctgtggattgcctcttgcttttgcttcctgcccatcgccataaaagaagataatgacaacaaaacgataacaacacaaatgtaaacgtaccttttcctcttaacttttccatatcatcaatttctcatgaattaaggtgtgatacctgaaagtcacatttgccttatcagttatattcatatagttcctttgtcttattgatgtatctctcatattatccctcatatccacttctccaggcctttttccaccccatgtcagtctagattctcttggcttctcacttggagcgtcacagcagcctttaagttgccacttaactccacttcttgttcatcttgtttgtcagaaatctgaagtagatgtgttgttgcaatgatatcacatgtgccattctttgttttgggggttttaaggcttttaaggttatcaaaatattgtaataaccaattgtcttaattgtattttgtacttattctcctgcttttgccaacttaaaatgtcttaacatcctgttaatactgaatgctgatgctttcctattcccttttctttcacatgtccgtctataattgtttattgattatatcagtctctcaacactaaaggcaccagtcacaactttgatgttatacagaatgacaactaaaaggtgacaaatgctaatgacttaatcgaggagttgttcatttttacaagcttacctgagttcagagaattggtaaaagactggtgacttttggctactatctaaatataattggttaatgtagctcctggagatcagtggttagtataatactcttagttgagcagggttaaaaataattacatttgtttaagttgcagatactactctactgtacagcaaagaatgttaaaatgttttaattcagtatatgaagagcaaaatataaaaacaggttttcttccactctcactagcaagcaaagtggtctgtatttttgaaatatattttttgtttaatcataacaaaatataatacaaatgttattaaaagccctattttatggatgaagacagtgatatttagagatattaattagcttttccaagatcatacatttatccagtagtaaaagcaagttttcacaagctgatctattttattccagtctttatttggaatcactaaacttacattccctttagcaaaactatcgtttacatttctagggtttcaagagttcaatgctaaacttgggagatctattcttaaattctctcaaagtgcaacacattttcctcaggatgatcataaagtcatcagatgtgtgttaagcaatatatatagtcatatactcttgatcaaaaaagatttccaggttacacagaagagagatttatggctgagaaaaaggcagattgcttctaagaaaggcttcaaatatattctcttctgacaggctacaggagagccagctagatgaaccattacagtgtgtacaaaatgctcagcagaataatttctcagtactggtagggaagagcaataggagtaacacaagagaaggaaagttggtctgcagagtctgccttagtatccgtaggggtgatgaggttgcttgggctaagaattctttcacatgtctccctgggacaattcactcagaattacttctgtgttttctaggctatctaggcaaccatcaccaattagcaaacacagacaaaatagaacaccttgtttggacctgcttgtcaaaaatcaaatgatcataatttataattccaggaagacttgccatcaaatgaacttatgacaaatgacccaaatgattctcacaaagtagagcttgttgtaacttttagcatgagaagtatgaaccccattatcattttttaaacattttgagttaaatggaccgttttgcaaagtccatgttctatctttatagacagctcaaaaatagctcagcatctagtttgtaggttggctccatttaaggagcttgaagtcaggcaaggtgctcattactattcatccagatctgtttcttggacacctcagctgtttttcttttctacggccagggaggagagtcatgtgcatagtccaagaatgtgcatctccatgtctctgaacagttggccatagaattggagctaggtgttctttgtgccattggctttcctctctggcatgcttcccgggtggttggagccagccagtgcctgatccagcttcacagacccagtaatgaaatttggagggcagagtaggtaactaggtacacaagaattgtaaagcaatgcccatctggacagttgatcacaactataacttctcaataatgtaacaggaatataaactgttagacttcctataccattgcaatataaagaagataattgaaggccgtgaagatagctcatgaaatgcaaggaagaattggacaactaagcaacaggaagagcagagaaacagtgagactttgggagtcacaagatctgggtgcttaaattctgccaggactttcttgccatcttcatttttgctcctctttctcggtcagttctcttctgtctttccctacagaccagcttttttccacatggatatgaaacgtttccaagttttatatcctaggggttttgccactgaaggaggactagcctgatattttcccagactcatatcctaaggaagatgaatcattagatccaagtaatttcgtgcaactggagaagacttgcagaccctacctaatgggttaagctggatatgcatctgtgggagggagatatgttttgtgggtataatacacatgcaagcaaaccttaatattgtacaagatacgcttctgaaaatttacttgcagtttgaaaatctggaagccaaacagtagaccaactgttgtgagtgttagaatttagtgtaatggcactttctgtgacccaggcaactctgcataggcagaaagattcttgaaagccccacccaggttggaaagggtctgtgtcagaggtcatgagtgggactcttcaggcacctgtttccccatcccaaggtctgcacatggactggaacaaaagttttggcagctgcaatttttaaatcttttcccaagggtatctagggatttaaagcagtagggaatgtactcccccactttcccttgttttccttttcactgcagcaagaggcaagtatagccctcagccctgcttgtaccctcacaggagactcatgtacaggtcccgggctctggctgcaggacagtgtgaggctgctgacagggcgagagaatggcgagaacaatggaacaggactgagggagaaggaagaggaatcgtccccagaactactacttgggacggtggtcccagggagcaaaaaacacccctggagccccttcaaggggccttttggcagagcggtactaccgctagacactgccatggctgcaggtaggactgattaaagaatttctgatttcttctgaggacagggtaaagctctgaattgtttttagagactgcattcagatctatatttcggaaccatcactctggttgcactgtgaacggtaacgtccagggagcaggactggagggaaggagaccattacgtggctgttgctcctgcccaagcagggaacaatgatggcggaacgcctgtactggcagagaggagagagaggagggatttggcgaacttttggaggtattggtaggacttggtaatatattgaatgtggagagcaaatgggcagggagtcagtgacaaagcctaggtgtttggctttgatgactggctatgcctgtgccggttgtgtacagaatccagaggtttagcgtttccatgtgcagcgtcggtcctcattccgcggcagcctggtgtggagttgagatgtgccccctccactccatgttcacgtttctttagccagagcaaagcatgcctggacaacctaggtttctttctttctttctttcttttctctagagagagagggtctccgctctgtcacctagaagaagtgcagtgtcgtgatcatagctcactgcagccttgaactcctggcctcaagtgatcagaggattaggtgtacttctctacaaacttctcaaacctccttcagcatctcattccttaagggaccttacagtctctcccacctggacggcgccatggtgcctcattccatttctgagaattgtcttaaaactttatatagaaacttgctattatgtatttaaatgagaagaaatgttgaatttgtaattctaattttctaagacaagagtttgtagctcgcttctagcagagttaaagaaaaagatatgatgaatggtctatatattgaaaactgcagaagaaataatctaatatggaatgggtgaggttgctacaggtggtgcaaaaataattgcggtttttgctgttactttcagtggcaaaaaccgcaattgtttttgcacaaacctaataatactgtttgaaattcatattttctggtggaacagtcttgagatagagcgggaactagattattggctcataaaacagcatgcagttactgttattccttaatcttatatctttattatgaggtaatgcttctcttacttgatttggagaatgttctcatctttttctcatatatttgtgaaaactaaatgttaaaggaattaacataacaaccattgctaaattatgatgtaaaataatactgtgtctgcaattagcctaggtagttttacttggttcaataatataaaatcactaggctcataatattttagtaccttagtgtgattggccaagaaaaaaattcacgttaccataaaaagtcaaaccaagtaacaattaatctaaatttcaaggaaatataaagcaaagtattatgttgtaacatggaacattaatgtaaataactccccaacagttcatgaaatagattctgaactggcagttgacaaagaaaggctagttttggcttaattctcttatgctccaatatctttcctgaagtcttatttaatttcacttgcgttagcaacagtactctgagatggtggtgcatctggaaaattatcacttctttcctgacaatcagtatctttaatttaattcttacatatgctttctggaaatattacattcatactttgatgacgtcttaaaaataatttcaatgtaataattatacatgtgtggtgagtaaattgtgttccgtaaaagatacttttaaatcctaatgtctgtatttgggaatgtgacctcatttggaaacagggtctttgcaggtatgatcaagttaaaatgagattttactggattaggatgggtcctaatacaatgactgttgtacttaagaggaaaatttgtacagagacatacacacacacaaaagaatgccatgtaacgttaggcacggagaacatcatgtgacaatgaaggcagagattggagtgatgcatctatgagccaaggatggccagcaacccccagaagctggggagagacaaaggatgcttccctaggatctccagagcaagcataaatctgccagcaccttgatttaggacttctttcctccagaactgtgagaatagatttcagttctaagccacccagtttgtggtactttgttataggagtcctaggaaactaatgcaacatgctatgttgtaaataaacagtagttctaattggtataaataataattttaagtatattttattattaggtcaggtgagtaggaaattgcctggtagactaattatcaatgttgtattttctgaaaagttaaaatattcccattcagtaaataatacttgtctaaaagtttctatctgtattgtcctaaaacaaagcaaaaattaaaatggagtcagttatgtacctgaaaaatgtgaaaaaggaaagaaaaatcttttaggaaagatttttcctaaaatggctatacatttgagaaagaattttaaaacttaaatcatctggctgtttattccatttttttgtttacattatcagatacattatgtatgatttcatacattatgtatgttacattcaatcaatatttattaaatacctaaaatttgctaggccttgagctaggtattgtagataggtaaataagacaaacattcccttcccctaaagagattattttggcatgaaatttaatctgtagaagaagtgaaagaggccatttgcagagtctaccatgaaaattcattttcactatctgctgtagttttacctgatcctgtgaaaccattttagcatcatttggttttactttgtgcttctgtattatattggagaaaataaaatttacttattgcacagacaacataaaattaattaaagtatgtgaaaccaaaaatgtaattgtttatcaaattttttttagtgtttcccattcatcagtatccaaatacattcttagttgtgcatccatgttagcataactaaaatgtggtgttcttattttttcatctaattcacaatcaacaatgttcacttttccactttttttttttgagacagagtctcactctgtcacacccaggctggagtgcagtggcatgatcttggcacactgcaacctccgcctcctgggttcaagcgattctcctgcctcagcctcctgagtaattgggattacaggcgcccgccaccatgcccggctaattttttgtattttagtagagacagggtttcaccatgttggtcaggctggtctcgaactcctgacctcaggtgatccgcccacctcggcctcccaaagtgctgggattacaggcatgaaccaccacgcctggcccctcatcatttttataattacttttttgatcattaaattatattatacaactgaccatgatttgtttaattaatccactgcaaagatgaggctgtttctagttttcattgtcatgaattattctgtagtttatattttacgagtttttttggggaaaggttacttcttaggaaagttaatactgggtaaaagggcttaaacatatttatagcttttaaagtacagagatggattgctttctaaaaatattagaaaatgacattgttactagcaaatggttgaggacaccgtgttcacagtgtttctgatattaagtattatcaatatataaatagtttgggcattgaatatgtatacaataatccaaaaaacatgtacttattgctcagatttatgtatttcagtaactgaaagtgaacgcttttccatatattagtttattatttacattttcttataataaattatgttctcctactctttcctaatcatttagtgggcatttaaacttcgcctcactaatttttatgtcctcagtaagtgtatatatagtcacatttatttactaaagatattttccataatctgttgtatccttttacttttggggctgtttttctttattcagaaatgcaaaggttttgctttgttttgtttatgtaggcaatgaattgtatggtctctttgcaatccaatgcagtatttttgccatttatgtaatccatgtatctatcagagtaagaaggaacatcagattttcctcggaaagagagcacttggctaatttgttatcaaggtaatgaggagaaaatggctctaaaggagaaggccagccacagttcagtctgggagaatagagggattgacatgaggtgggcaggtgtcaagtcttgggcagctctgtgcctgctgaccagtggccagcacttaactatttgcgtgcatcatttccaaggtgaacctgagccagagtggtcttggttacttgggccaggggacagttcacaggaccaaggatcaatgggtcagctaggaaaggataagcaagaaagggattagcaggaatcaggaccaggctgagatacccagatttgaggggaggaaccagtgcatcaggaggagaagagggagagtgggaggaggaaggtgggcgtgtgagctaagaggcaaaaagctgggcttttccatcacggtttcttagcctccacaccccatgctgtcccaacacaaaaacaccaccgtaaatctagaactctctgcctacttatactcctgaattcaaatgtgtactgctggctgggcatggtggctcatgcgtgtaatcccagcactttgagaggctgaggcaggcagatcacctgaggccaggggttcgagagcagcctggccaacatggtgagaccctgtctctactaaaaatgcaaaaattagccaggcgtggtggcacgctcctgtagtcccagctacttgggaggctgagtcacaacagtcacttgaacccacgaggcagaggtcgcagtgagctgagattatgccactgcactacaacctgggcgacagagcaggacttcatctcaaagacacaaaacaaacaaaaaaaccgaatgtgtactgcatcaactttcagtgtgcttgataatccaccatatcctatataccctcccttcccttttcatatgcagtttaaaattgtgcttttcttcgaaatgatgctttcctagttttggagtattttaaatcaatatctcactgaaactgtcacattatatacatgtgttattattattttctgacttttaagaatgaaaaaaacatacctttgatctgtgtctctgttatatatgcataaaacttttgcaatttacattttaaatttctcttgtaatttttaaaacgtcttgtgatctaataaggaaagtaacatgtactttggaaaatattgcaaagcataaaagaaattgaagaaattaagaccatgcctacttggatgcagtagggaatatatgactggatatatgtaaaactgagcaaaacatctactgatattgaatattcaataaactgaattggcatctgtattagggttctctagagggacagaactaataggatatatatatatatgggagtttattaagtattaacttacacttattattaacttaacttacccttaacaatcacagggtcctccaataggctgtctgcaagctgaggagcaaggagagccagtgcgagtcccaaaactgaagcacttggagcctgatgttcaaggacaggaagtatccagcatgggagaaagatataggctgggaggctaggccagtctctctttttcacatttttctacctgctttatattcactggcagcggattagattgtacccaccagattaagggtggatctgccttcttcagcccactgactcaaatgttaatctgttttggcaacaccctcacagacacacccagggtcaatactttgtatccttcaatccaatcaagttgacattcagtattaaccatcacaagtccaccccttgtcaacttgaacccatatacatctcctgagattatacatcatcttcaaataaagacaataataaggtcataattatacctaacataatacagctgtcctttgtataaccggaaatgcaccaatccccaacccaaatactattacataaagttaacaatatttaaatgccgatatgaagtcaataaatcttatgtcacatgataaaggaaaaggaaataaaggtattttcttagtacaagtgtatacatgcacaaacatgtttttaacaaaagaaggaggaaatactcatgacaattacagtccccgtttctgcagtggtctcgtggtcgtagatgctattgatgactaacttcttctactacccattctgtattccctttgccttcagcaagcacctcaacaggtcatgtttttttttccttgtggagtgacccaaaccttcattcctgggggatctgggccatttctagtcctgcctggattgggctgttgtagtttcccattgaccttaatcatagggcgtggtaatactaagagacaccctaatggatctcctgtattccatgcatactcttccttacctccgttgtggagtaatagactgatttcatcttgaaagtctgggtcagtcagtcaccccagccaacaatgtaactcccctcttagcctgttgacttaaaggtaggaggagcccaaagtgtccaggtggcaatgttaacatccagtttaatggaatcgttgttgtctctcctggtggcagtgttcctccctctggaactaagacctctaggccagcagaaggtaatgtcgtgggaacattttgctagtggaaggaaaaattttgctagtgaatcactaggggtgatggtgagtggtgccacttccacttccacccttgattcgtgaacccgtgaatcctggctatgggagagacagtgccatatattggatgctgattcagagcgtacatggctttctagagaactttgccccagccctgcaaagtattgtcacctagttggcattgtaattgtgacttcaaaaggccattccaccattctgtcaatccagctgcttcaggatgatggggtacatggtgagaccagtgaattctgtgagcatgagcccattgtcgcacttctttatccataaagtgagtgcctcggtcagaggcaatgctgtgtggaataccaagacagtggaaaaggcattccgtgagtccgtggatggtagtcttggcagaagcattgcgtgcagaataggcagacccatatccacagtaagtgtctattccagtgaggacaaacctcttccctttctatgatggaagaggtccaatataatcaacctgccaccaggtagctggctgatcaccccgaggaatggtgccacatcgagggctcagtgttgctctctgctgctggcaaattgggcactcagcagtggccgtagccagtttagccttggaggatggaagtccatgttgctgagcccatgtgtaacctccatccctgccaccatggccactttgttcatgggcccattgggcaatgacaggggtggctggggaaagaggctgagtggtgtccacagaatgggtcatcctatccacttgattattgaaatcctcctctgctgaagtaacccatttgtgagcactcatatggaatacaaataccttcctggtttttgatcactcagagaggtctattcacatatcttttccccagatttctttgtcaccagttttccaatcccgcttcttccaaatctctgaccatccagccaaaaaccattggctacagcccatgaatcagtatataatcacacatctgggcatttctccttcatgcaaagtgcacaacgaggtgcactgctcaaagttctgccaactgggaagatttcccttcagcgctgtccttcagagatgtcccagaaaggggctgtagtgctgcagctgtccactttagaggggtgcctccatatcatgcagaaccatttgtgaatcaggccctagtcttctcttcctctgtcaactgatcatagggaactcccgatgagggcatcgatgcagccttggggagagaaggtagggtggcaggagtagaaaccatggacatttgagccacttcctcatgaacttacttgtgccttcaggacctgctcaaacctgatcacatatatgctactttcatttgatgatagaatgctgctctgtacgaccttctttatggccagatgggtcagaaagctcccagttcatgatagccagttaaggttgcatagtgacttgatgactcgtagtcaaaccttcagtttccaccaaagcccagtaatgggccaagagctgtctctcaaaaggaaggtagttatctgtagaagatggttgggccttgctccaaaatcctagaggcctttgctgtcattcacctatgggggcctggcaaaggctccaaacagcatccctatctgctactggcacctcaagcaccattggatctgctggatcatatggcccaagtggcagaacagcttgcacagcagcctggacctgttgcagagccttctcctgttctggaccccaggcagttttatttggtaaagtgaatgattaaaggtcttggggccaaaatgatctcaacctattttcaaactttaaatgggttagaagcctggctcgctggcatagagctaggcgtggaatatgagtccctagtgggccacttttggtaagcagaactggcactgtgggaggagccaaacgctgggttaaggcacccgatgctgatgctcattagacaccccactcttgttaccaaaatctgtattagggttctctatagggacagaactaataggagatatatatatgtatatatatatatatatataaagggaagtttattaaatattaactcacatgttcacaaggtttcacaataggctgcttgcaagctgaggagcaaggagagccagtccgattccccaaactgaagcacttggagtccagtgtttgagggcaggaggcatctagcacgggagaaagatgtaggctgggaagctaggcccgtctctttttttcacacttttctgcctgctttatattcgctggcagctgattagattgtgcctgccagattaagggtggatctgccttcttcagcccactgactcaaaatgttaatctcctttggcaacaccctcacagacatacccaggatcaatactttgtatccttcaatccaatcaagttgacactcagtattaaccaccacagtgtccgattgtttctttagattgtaatactcttttccatttaaattgtattttcagaaatatttaatgtcagtagatatttcttgaaatgtgacttcaatgattatgttcatctatgatgaacaactttttaaatctaaattgtttttattataatcttttaatttttcttttttagaattagaatttgaacactagaaatgtaccattgcaattttaaattacatttcattgtgaatttgaacacagttttatgataattgaacatatttctgtagggcatgtgcctttctgtttgaattgtaagagctctttatatgttaagaacatcagcccattgtgtttggtatttgcacaggtatttctagatttttctgtgccttttaattttcattgtgtgtgtgtgggtgtgtgtgtgtgcgtgtatgtgttttaaaagagagagcaagagagaggattcagggttacttgggtttttggtgtgtcttctattgctactatgataaaatcctctatctggggatttaaaaatatatgcctatttttcttagagtttttcaactttaattcatttgaaaatattttaatgtatggtatggagtaaagatattttttgaatagttaaccagttatctcaccatagtgtattactaattatctttcccatgtttatttgtaatacattctttaacatattgtctttttaaggttggtcatgtattttatatttttaaaaagtgaagagtaattatttttcagaagaataatcatctgataattcaaattttcctgtaagagaaagttgtcatattaaaatgcacacttactttttcaaattattttatgtacttttgaaagtaaatggttaattcaaactcttgattgttaatctgtcaattgcttgatgacatacctccctcagtaaaatagtgtattaactgtttattgcagactgtgtttagtgcagactatggatatttttgttgatctgtagaattcctgactagctgttcacataccccacttttaccatgacactattttcaagatcattaattgcatcagatatggagacaatattagtggattttcttcttgagagaatgctcctacaagttactaattaccatgctatgtcttgatatgtttttgtaaccttacaaatgaatataaagataacatttttcccctttgtttccatcttcttgttttagatagtcatttttacttgaaggaagctgcttctacttgggagtggcaggagaagtgagaaaaccacatggaagactcccaggatttaaatgaacaatcagtaagtcttcattctcagttttgctgaaaaaagttgcgataacactactgaaaatcatacgtaaaagagatatattgtaagaagtaagtttttcattaaatatatttttaaatgatttttgaatttcctttcaaagaccatgaaacagacctttggagatttatgccgtttctgcttaatgatgatgtcacattttgatgtcttctttgattttctacttggaaaactagtggtggaaagactaaggcattgaaatcatgatgcatgttttagacagtctaaacaattttatatacgtcctttattattttatttcagatatgctggatattgttgaatatcagaagtataaaaggagaaagtatattattagcatgcttgttagtcattttaaggaggaaagaaaccatagttctcaagcgcttttagtattttactagattcattgcaggaccaagaatgcaccagcttgatggcaatccttttaagattctgatttcccaagggaaaggctctttgcaacctttcctcctagcttgttagtggtgtctctgtgacagtagttctttagcgtgtggaactagaggcagtgggagggcttccctcacacccccacgccttcacactactggaagctgtcgtttgagctgttttgcatacggacaactcatgatgttacaagtaacaagacgtgtgcttactgagagtgtgttctgcagtctgatgctgttccttttttttttttttgatgctgttctttattagcttatgtgatcatgacttgatcttacagtcaaatgtttctccatcaggcaactgaggagaagatacttatatctaataatgtggttctagaaaaggtatatgtgatgagtttaattttaagagggatgtatattctggtgccatttgaagttgatttgatttgctttctagtggatattttatttaaaagaaatgatagccatgcctttaatttggatagacatgaccatagtctaatttcaatatatattatattatgatttatttcacatggcatcataggaaaaatgtaacaaaaaattataaagtgaaaaaactatgaaatttgtcaaatggtagagatatattcctctagaattgtgtgacttctttagtaaggtaaacagaaatggctatgggaaggcaagggctttcaaacttttaaaaatgctggttattgactgtaaatattcacagcatggactctagcaaaatggaggttagtcatcatgactgttggaatcagaagtctgtctgtgtgactatggtggacttgaatagttagtagtaaatgttgacaacatcttagtggtgatgcttcattaaaagagtgctgttgatctgaactttgttctgatacaccgagggtcacatacaagtgtgtgtgtatatgcaaatgtttgtatgtatgtgtgcgtatatgttagagtgaccaacgtttttttgttgccagagactgaggattttctagggacatagaactttcagtgctaaagcacacaaagtttgggggaaaaccaggatggttgattctgttaattactatagggtgtgtatatactcaagaaagaattttgttttcaatgcagttgagaatatatttttatgtttaacactaaagtgatgtgttactaaagatgcgtcatatcaccgttcacaaaatgaagcacagaacttgtaaatcagatatggtgtccttctagtgatattttaaggtcatggagctcactatttctttttaaagtatgtttttaaaagtttccagtgatgctagtgagcagtcaggtttgagaacaagaaatctagggagacctgcctaccctctcagcttgaacccatttgctgaatttaaatttcaaacatgtagaccaatgtattcatctcataaatgtgcaaagagatgcttagaactgttaaatgacttgcccatgttggcatagctgataagaggcagagttaggacttcacacggttcttctgactccaagtccaaagctctctccataacatcgacgtgcctcattgcctttgggttatgcatattgtggcatttatagaaatgtcaaaaaaaaaaaaaaaaagaaaagaaaaagaatcagcccctttacatggaaataatttctctttgaatgaaatctttatatgattctaaattttgtggagtatattaatgtctcaaaatattttgaaaaatgatagcatttattaagatatagaacaagtaggggtggaattaaaataaagttcatagttagatgaaagtgaatttactcatatcattgctattttagttcaagagggattctttgggtgtagacatagcagtaggagtcatttgtggcacatgcacactgcatctagcattttccatatacttgctccaattcttaccatgtattccttcattgcaatttttaaggccactattttacagatgaaactgtgacctagagagtgtcaaggtcaaacagctgttaagtagtagagatcagaattaaaccaacttctctctggccccaaaacttttaatggattttgcatgatacaacataataggtagttaagggcatgagctataaatcagacttccctgtcacttaaatgctttaaaacctttgggaaattacttaaactcttcctcctctatggagtggaaggataataaaaagatgtcttatgaagtgcttgcatatgcctcacttagagtaaatattcaataaatgttagctgctatcacaaatacctgagatattcagatgctctttaatgagtattcattcattctagcatatccagctactgaccagacatcccttctgggagttcacaggtccacacactcagcaaatgaagaataaattcaccagctctccttccctctcccagcttttcttcctttgtcctttatgccagtattactcatctcagtgaatggcatcatcagctactgaatgggttatggcagaaaagaggtagtaatcctccttttcttcatcccgcatctcaaagctttgtccactcttaatgtttaatgtcattcaaagctattctttttgctcgagctcccttagtttagttgagatctttattttatctcttgactttcttgttttactttaagttgcttctagagttgtcttcctaaaatacaaccctgatcacatcactaccttcctttttatccttcacaagccctttcttgccttcaagggagaggctcaagtgtgtcatcaagcatacagagcttaatgcttatgtatttcttcagtttttttttttctggtttctgtcagtttctgaatctcccaggttctctgaggtctctatgcatttgcaagtgctttaatatcttcccagaagggtctctttcccaccaccaggataacctgtaattcttgaagactcagtttaggtttccatccctctgagcagccctctcagactacctcctttcttctcacccaatcagccctaccggtcagggccctctgcagtgtgctgccataaccctttggcatttacctctagcccagcacttaccctacaggactgaaaccctatctgtttacttgcctatctcaccactacattataaactacttaagagtaatggtggatctcgttcatctcgtactcttacttcttagcacgattcttgccagtgttcagtaaatgttttcttcaaaagcctttatatacttttagtgaggtatgttaatgagtagcctgacaaattttagaaagccaaaatgttattctcagagtagattactgactcatgaatttatattcgactcacttaaaaaattgcatagaaggtctaacatgaatttaactgcatatgaccaaaataaagttcagtccttcatttttcctctagtatatctggctcctatttggcattctggcttagaggatgtagagaattttaagagataagcaactaaaaagaatatttaactgtcataaatttatctgcagttctattttagagcttcataattctttagaattggtttaagttatagccagttacagcttattacagtttttaatgaaatgttcttgataatagaaatggctgtgaatgtaggttatacctagcaatagctcccttcatactgtgaaatatattgtatttttgtattcaagcagagaatgagcaatatttattatttttatagcttctataatatctttatagattgaggtgttttataatcctattttggtggtccgggatattacttcagattttttctcatccaaaacattcatatcaacatgagatggagtctggcctaaattaatgatcaagccagcaggtttgaaaagaaatatattttattaatgttaagtattgtatgttataaagtaaaacattcgtgaatattaagtaaaactaagtaaaatgaataagttacagcaggattgctttccctaaatgttatgcattacgggcctgaacattcatatgtatttccacattgttactaaatcaattcacttatattgttggtggcatgattttattagtgacatctaaattaactcacattcattggattatgttacatattgtatgattcattaatacttctggaaattcatttctgtgtccatttttaaatataatacatttatatttcaaagctattctatttgtatttatgaaacatattcatagacatgtttcagtaatacttttggaaatttgtttctacatgcatttgtagatatgaattgtatttatttgccttcaccaaccatgctaatttaataatgtctattaaaattctagagctagtttagtaaattaatttatttttatctctctcttgtttttccttagagtactcatgactttgattagtcctcagatctttgttcctagagatcctacagtattatctttgattatagccactagcccatctttaaaacgtgtactcctctctgtatcagatttttaactattgtatagaattgaatttgccattaaacttatcatctagacatagaacttcagaaccaccaatttatgacagtgtttaaacagtatgctagaatataattattttgattaatttttgtttaaatcatttttctatttttataatgtgacattatcaaaatcctaaaattctattattctgttgctttattcttgggtactctaaacccattcgaccagaaggcatacttgtactgaatatcttaaatatattttacttagatctaaacaatgttggattattctttttcaggatccaattctgtatcgaagaacttgacctttaaactagttaaaagaatcttgtttacaacatgtaatttttatactatccaactgaataacatacttcagagttctgtggaattctgttcaaagcccagtttcagaattactgttaactccaaattgccaattacagcttgactttgcagttatgtagtagagtacctaaactgaagttacaaagtagatgcgttcagtataatttaatgtttcataatcattaaggcttactcttcctttttaagcatttttaaaataatagtttttcttttttctttttttttgtttgagatggagtcttgctctgttgagtacggtggtacaatctcggctcactgcaacctccgactcccgggttcaagtgattctcctgcctcagcctcctgagtagctgggactacaggcatgtgccacggcgcccagataattttttgtatttttagtagagatggagtttcaccctgttagccaggatggtctcaatctcctgacctcatgatctgcctcgttggcctcccaaagtgctgggattacaggtgtgagccaccgcgcccggccaatagtagttttattgagatgtcattctcatacaatacagctcacccacttaaaatgtacaattcagtgatttctagggtattcatagagttgtacaattattaccacagtcaattttagaggatttttaatcagttgagaaagagatcccatgcccattagcacactccccattcccccgatgagcacccctcagccctagacaagcaccaatccacttcctatctctatggatttgcctattctggacctttcatataaattgagtcatacaatatgagaacttttgtggcttgctttttatacgtgacataatgtttgcaaggttcatctatgttgtagcatgaatcagtacttagttcctttttatggccaaataatattccattgtatggagacacttctatttatactctttaaatagaaagaatataaatttgcccctatgttataaggttacttctttttttacaattatgttttaagagtcatttctgtattctagataaaagtccttcaccagatctacacttttcaaaggatatctcccattttgtgggttgtcttttcactcttgatagtgtcctttgatgcacagaagttttaaatttgagtccagtttatctatttttttcttttgtcacttgcgcttttagtgttgtgtataagaaatctttgcctaatccagggtcacaaagatttactcctatgatttcatttctctatgatttctcatatgtaagcgagaacatgtgatatttgactttctatatctgagttgcttcagttaagataatggccttcacaaatacttactcctatgatttcttatatgaattttacagttttctatagttttagctcttacatttaggtctttagttcattttgagttaaattttattgaggaagatttttttttaaacttcaacttagtttagatttcaggggtacgtgtgcaggtttttgtcatgggtatattgtgtgacactgaggtttggggtatgattgatgccagcacctaggtagtgagaataatacccaactggtagttgttcagcccttgttcctcttcctccctgccacttccggtagttcccactgtctattgtttctgtctctatgtccatgtttcctcactgcttagctctcacatctaagtgagaacatgtggtatttgttttttttttcctgtgttgattcacttaggatgatggcctccagctgcatccatatggctgcaaaggagatgatttcattttttttatggctgtatagtatcccatggtgtatataaaccacattttctttatccattccattgttgtgggcacctaagttggttccttgtctttgctattgtgaataatgtctttctgatagaatggtttcttttcctttgggtctataaccagtagtaggattgctgggtcaaatggtagttctgtttaaagttctttgagaaatctccaacctgcttcatagtggctgaactaatttacattcccaccagcagtatataagtgtttcctttttttctgcagccttgccaacatctgttatgttttgacttgttaataatagccattctgactggtgtgagatggtatttcattgtggttctgatttgcacttctctgatcattagtgatgttaagcatttgttcatgtttgttggccgcttgtatgtcctcttttgagaaatgtctgttcatatccttttcctacttctaagtattttttaaactctgaatttttatatttttgtgtgagtttatgaagattcagcacaagatttcattaattattatcttctatgaacttctaaaattataatttgatttgttaaaattttttctcaaatcttagaatatatatgacacatatgtgtgtgtatatatatatatgtatatatggagagcctcatattatacagaatatggagtgtgattctatgtcatttgccaagatctggagactaaatattacgttttcttctgtcaactgtgatcagctggtaacagctgtttgtgttaagaaggaacctatggctacatccgagctcattggaaaagtaatgttatcaatttggtgtgatttgccatggacttggtaaggaagaagggtagcaccaagcctcataactgctaattctggtctggtgagttgtcaagatccctgggcagttggtttggatagtatagatataaataagagctatgatatctttgggtaccaaaagtcttgtgtctgaacttacaatttacatattgttatctaataattctatcttataaattaaaatgaaaataattcaggctgggtgcagtggctcactcctgtaatcccagcactttgggaggctgaggcgggtggatcacctgaggtcaggagttcgagaccagcctggccaacatggtgaaaccctgtatctactaaaaatacaaaaattagccgggcatggtgatgcatgcctgtagtcccagctacttagaaggctgaggcatgagaattgcttgaacccgggaagcggaggttgcagtgagccgagattgtgccactgtgctccaccctgagcgacagagcaagattctgtctcaataataataataataatataaaaaataaaatgaaaataatttttatgatagaaatataatctctttcatggtttaatactcttgagaaatagaaaacattaataaatataatgcaatttctgctataaggtatttaacaaatggaaaaattcactgatgaaaaaagttaatgttcatcgatagaggtaccatgccaagtgctttatgctactcatctcactaaatctcataacggccctttgtggaggctctgtcataacctcagtctgaagaagagtacactgaagcagagtttaggtatcttattcagggttgtgccagcttggaagctatgctgatggaatatgaactcacatagtctttattccagaatccatactgtttttttaaatatgtaagtttaaggggtacaagtgtggttttgttacgtggatatattgcatggtgatgaagtctgggctttcagtgtaaccatcatttgaatagtgtatattgtaaccattaagtaatttctcatccctcactccctcccacctgcccacccttctccagtggtctccaaaggtctccagtgactattattcctctctgtttccatatgtacatattatttagctcccatttataagtgaaaatatgtgatattggactttctgtgtctgagttgtttcacttaagataatggccttcagttccatccatgctactgctaaagacacgatttcatgttaaacacgtgaactcacctgcttccatcaacttacatgattttcagacccttcggtcaacttggtgtcatagagtatgtattaaaactcagcttgatcttagattatttatatgaagatcaaacaattttaaatattatggatttgagtgagaaatttaaattattccaccgtgattacagattaattgtacaatcttcattaatcacatatctcggctcactgcaacctctgcctcctgagttaagtgattctcctgtctcagccccccgagtagagtaactgggactacaggtgcacactaccacaacaggataatttttgtatttttagtggagatggggttttgcaacattggctaggctggttttgaactcctggcctcatgtgatccacctgccttgacctcccaaagtgctgggattacaggcatgagccaccgcacctgaccctattagtaaatattttaacaggcagtcataagatagcagaatgtatggaaattaaatgatagttcagcaaattcaattaagtaagcatttcaagacttcttgctatcctctagaaactttgctatactagggattaaaagatgaatataataattccttttctccccctaaattttagtttagcataagattatatgatactgtgtaagttctattcttagttcttttaaaacgagacttggatagctagtactaattcattcagtgaatatttgtggagcactgctatatttgaagcatggttttcattgttggaaatacttggtggacaaaatggacgcatattactgttcttgtggaacttatattcttgtggagggggagacaaacagtaaacaaatatagtatgtcagatagtaataagtgcaaggagaaaaaccaaataaagcagggaggaggataggaagtgcttgcgggcagggtaggtaggtgaagggacagctgtggttttttgtttttttttttgtttgtttgttttttgagatggagtctcactctgtcccccaagctggagtgcagtggcgcgagctcggctcactgcaagctccacctcccgggttcacgccattctcctgcctcagcctcccgagtagctgggactacaggcacccgccaccacgcccggctaattttttgtatttttagtagagacggggtttcaccatgttagcggggatggtctcaatctcctgaccttgtgatctgcctgcctcggcctcccaagctgcggtttttggagagtagttagggaggcctcactgagaagatgttgtgcaaagactcaagagaggcgaggaagtgagccatgtggatatctggggaaagtgggttttaattagagggaacagcaaccgtgaggtggtagcatgcagggtaggttcaaggaatagaaaggatgtcagcgttggtggtagtgatgggcagaacaaggcagaaataaggctgcaaaggtaatcagcatgggcatgtgagggtggaggaatacatattgtgtagaggtttccagaccattgtaaagcttaaactttttctcttagtgacatgtaaagcaattggaggcttttgagcttaggtattgtgtgatgtgactaaagtttttaaataacccactctggcttttattttgaaaatagactatgatgacaagagcagagactggctattttaactatccagatgaaaaatcaacaaagtagcattggaggtagtaagtcgttgcattggggttaatctaagatgacttgctaatgtatgggttatggattatgatagaaagaaaggtgtcagacataacttcaaggtctttgtgcagagaaatgggaaggatggagttggcattgactgagataggatgactggggaagaacaggttggggttgcagatcaggaggtcagttttagacatggtggcagagacattgctgtgttttcaccaaccctctttcatacccctcttttctggtgcatctcagtttccttacagttcagcagggccatataactagtgctggcctgtgaaatgtaaggagaagtgataatgttgatcattttgagaatgaggcagtgagaagccccagaatgattctttggtctctgtgttctcctagggtgatgaaggaggaggaggcctcagggaaacaatggggatccccagttatgaagaacgctggattgctagtgcactgcatggggggcacattctgaggggagtgttaaccaactaagctaattaaacgcatgtgaaattttactttctcttaggcatatgcatcagatgtaaccattgggaactcagggaaatgagttgaacttgaaatataaatttgggaggcttcaagatatcaatggtatttcaaaacattatatttgttgaaatctccaaaagaataagtctagctagggacaaattaaaaggactaagccctgggcaccccaggttagagagcaaggagatgctagtttacatagatagctgcttgatcctaatacccataagcaatgagttatgtcatagactgtatgtggccacattcagtgaattttcctccgaggtgcttctttccaaatttccaaaaacacatatccaggtcactgattactggattcacctctatcatagcagaaagagcaccatacagctatgaataggtattgagacagtattcacttatttgagatttccatcaaagtaaccaaaatcatgaaatatttagaagaaaattcagtcaacaaatagttttcattttttcattgctttgtttgtagatgtgatgtttctaggcacttcaggttaggaaagaattaatctaattagagttttttaacctcagcattgttgacattttgggccacaaaattctttgtagtgttggggaggggtgctgtcctgtacattgtgttatttagcagcatctctggtatctacccactagatgtcagtagcaccccccttcctttgttgtgacaataaaaaatgtcttgagacattgccaaatgtcttctctgtgtgtgtcggggggaccacagatctacattacatctgtttccaatgagtgttttatttatatacttactgcctgcaaaacatttgagaaagtttacctgaacatttaatataatatatactatgctatgatatattattgagggaactgcaatgaaaagccaaagacataatatagaatttaagcaagaaagcaaaataatattgcaaaggtaacagtactatgctatcagcatggaaaatgtgttcaataaaagacaagaaaggaattatagatagactaggttacaccttcaatgggtcttgaaaggcagaatgaatttgtatggacagaagagaacctatcctggcctggggaatatcaggcataaaagctcagaggtaccaaatataaggtgttaaggcctgcctaggactgtggctaggttagaattactgaatcagaagctctgtgggcatgaggttgtgaggcagtgggaaatctggctgagaagcactgagactagactgaaaaggactttgaagccaagctgagatgttttcgtgttcttgggtggccaccatgatgctcattactgcacaaaagacagagatgtataagataacagtcctgtatttctggactttctaacctggacataatggaaaattacatataatttttcggcaagagattaatatatttaaaatgatgttttaggaaaattaaccagatggtagggagattactgaaggtgggaaattgagagtacgagagatggcttaggggatcttgaaggagtttgcacatgaactccgaaaggcttaaaccaagtggccgggcacggtggctcatgcctgtaatcccagcactttgggaggccgaggtgggcggatcacctgaggtcaggtgaccagcctggccaacatggtgaaaccccatctctactaaaaatacgaaaattagccgggtgtgggggcacacacctgtaatcccagctactcgggaggctgaagtagaagaatcgctggaacccaggagtcggaggtggcagtgagccaagatcatgccactgcactgcactccagcctgggcgacagagtgagactccatttcaataaaaaaaaggcttaagtcagggattggcaatttttttgaaatgtgaaaacagctgtagacattaagtaaatgaatgggcatggttgtgttccagtaaaattttatttacaaaagcatgtggcaggtggtgggccatactttgacaacccctggcctaaacttatgacatgatggtggaaagaaagacatcgagtaaagaatcaataaaaggaacttgaaaataaagctttgctgaacttggtaactaaaccaaatagagttagtaggaggaagggcaaggggtggacttggaggaggaaaaagattatcctggagtttcaagcctagaagatgtcattaatagagtttaggagcaggtatcaatgacttaaggaaagagaaagatgtgtttgaattgaggacttttgagaacatgttaaactagcaattggtgaaggcctgctgggccatgggggagaagtctggaacttctccatgctcatgtgtggaacagaacagtattttccttgaggtgatgcttttaaggggagatggtatctgaggaagggcagaaggatgaagataaacataggagaccagcatgtttatgaagtgcaaggaggaagatgaactgtaagaaactgagaaaagatagggaaatgagaaccagtaggataatagtgtcttcagagccatggccaagctaactctcaggaggaattggtcattactgtctgacgttccaagaggtcaagcagaatggcactgagaaagagattgtttcatttcttgaccagaaggttactggtggcccttcaaaaggaagtcccaagagagttgtggtaagaaaaggcatcccagagattcaatttagagaagataatgaggaattaagagaaagtttgtaagtttaaagaagagacacagaacagcaattgaatggagcaccttcttccaagaggaggcttgcttgtgtttgatgacagattttgagaaggattcagtggagaatagacttcaagttgttgcagaagggatgatgaggttaatggagaacagaaagaaggtgaactagctggagaggagtgatacactctgactctggaaatttaagagaacgtggatatcctggaattttccaaagtgctcttccttaatgcattctttttacaggaggcaaatacctttgtccaggcaagatcaggaagtagatggaagcagggttagaattaagggcttaagtagtataaagaagatttgcagtagccattgttataaaaaaatagtaggtgatctcctagaactcaatacttggattattgagacatactcagttttcttttagcaaaatatctctcattgactaggacttaaggctatactgctagcattgaaaatttattttattttgtattgaaacaattaagaagataaaggggaaaaataaacacttctaagattaatgaatatgcctctcgttatctttggaagaaactatgtggcctgttttccttggatattagcatctccaacaaatagaagagcctatgttcataaatatgattgggtcaaatttgacaatagagtcagactaaagttagctgacattgactttaaaagtacttgcctcaaagtacttgaaattcggtggcttcatattttcttggattagggattgatttctctgctcagacttcttcagaatacaaataactttgtaagggctaatctgttaaaaagtttgtgttagctctcttggcaagagctaggatagcagggtagaaggagaactgcgaaaacaaacaaacaaaggagagttaaaaatgaaagggcaaacactccctacttactttgctttgctttcattattttgcctaaactgttgtggttgacacacgtggacagtagattataactagattctgagccccagatgcccacagctaacacttatgtaatgctcattgtgtgccatgggctaagtgctataaatgaatgtatatataatataaatgcattaactcatttaattctcatgacgatttgatgaggtgagctctatctcccagtttctagatgagggattgcccaacttgtgggtaggggagcagaatcttaccccgggaagtgtggcttgagagttggcaattgtaactgctggacagatttgttagaaaaataccttatttatttttcagtcctccaccctgacttgtgccttcatcaaaaaagtttgaaatgttttcagttcatacataagaagaaaaaaatttgatatgggtttattttcccctattaacattttctttgatttacagtctgttgtatcagacatgatgtgaaaggggtagacaacaacctagactatatttatttttcaatctgctaatgtgaagaaaaaaggggaggagttaggtgagatttggagtctgtaatggtttttctacaccagggtttttagggagattctaaatagagcacactctcatttgtttcaattaaatgccttgcccacttaatctccttttcgtattgccatgcttgatacagagggctccaggactagtttactaggtggtaggacctttagagattatgctgtccaaatcctttacgttagtttaacagatgcaaaaatggagactgaaagggtttaagcagagtgagaacattaacaacaacactttgttttgaaatgaggttttttgattcgttccaaccttcacacaaatttgaaagcatacttttgtgtaagtttcttaatatttggaaattaacatcagccccagcctccctgaaaactgtggtgagttattactatatataaagattaatgaaataattgcttttgagtttctactacaattggtggatcagggtcatctaaaaaaactcaagcaaaggtgtgaaaactttattttgcatgtttgtttttctcctagttattatttactgctcaatcagcattaacagaagaaaaataatttggctgctaagttactgtagtataggatttcaaaggaccttattagagagagatgtaatttcatcccctgggccttttatgtaacagagtgcatatttgggttacttcattttgacccggaattaaacaatagacttaagttgtattcaggaagttaaaatatttattcaacaaagatttaaaagcattttacagttatttccaaattcctagggatatctttatagctttattttcttattttagctaactcttgtctgaatagctccttcatcaaagaattttctgtttatttcataaatcttataagatgtatgtatttgataactactgcatataatcagtgttttttaaataaacatctttggcaaattgatataaacatgattttatatattgcttaactacatatataggccatagtttcgttatggtgctcagtaatgaaaaatatggagtagatgttacaagtggtaataaagctaatattaaagaaagtaaggctgaagattcctaagttcaaaataaaaaggctttgcagcttcagttttaggagcgttttcataaaatgaaagaggcaaatagtgccaaggtgctaccaactccagcttcctagcaatgcaaggattcttcctttagccacttataaaagtggtcacctcagctcactctctgtaggactgactgcttcccctttcttctgtgatttgcatagtattatccacattgattcatgtttggggtgattgtttccatcctcactgtgagattatgaacttcttattttctttccatgaaataaagttttcattggctgggatcccagctagactgatttttttttccttttttcgtttgtttgcttaatattttagattttgaaagtccttcaaaattaaagtacttgcatactatcctagggcaataatttgtgactgaaaatctttgtgaaaaatcctaagaggtatttaaaagtttatgttaagtaagttgttatcagtggttaagaggcctttccagagtgcttgtccactggacatttatatggaacttactgtaatagcatctgcttaatttttggatgatgcagacacattccgttgcacaaaattactctgcaaaagtaagtcaggaatcactcatgataatttcaggttatgcatacttattttagaatgttgaatcaatttgctaatcttcaaaggagtaaattttacaccaattgcgtctggtttaataggcttaatattttcataatgccagagtaatttttcttcttagttttattcttgcataattgttggaattatatgtacattgttttaattcttgagcccttaatatcaaatagcttgagcattaagggaattaattgaaggccttaggatatgggtgtttattacatgaacatggattgaatgttgatgttgggattttaaacgggaagttgctttgctgttagattccatcacattgaatgtatcaacatttatacaaggaaattgggaagaaatgtactctcagtccctggttgctctttgtttgtgaaaagtaacaaatttaggagttgatctaaaaggaaaatttttgtgttaatgtttttaaaacattaaagcatctttaaacaatatttttgtctcagatgtctagatgcatatttatacccccagaaatttgaataagtctgtttaaatatttttgtccttttcctgaatgtcaaccctttggcagagtgtttatatgttaaagcttgaagagcaagtagagatcacacagtccaactctgtcatttcatagatgtaattagagtaaactaaggatcagtctgagtataatgaagtataaaaaagaacttgacactcactgtcacacaacacagttgatagaaatttgttggtcattcgttggccactggtcatcttccccccaggggtctctggcttgcaatgtattcccgtggtctctttctctgatcccctcttggatctcctcctcttccttaggtgttttgaatttctcttctttgtcttcagcatcctcaattcctcctacttcattttgcagaaatttagctgtctttgttatgccctcaccatccaatgtatgcccagataactgtgcctttttcatccaaagatccactaaaagatgacagtgtttttattttttatgagacacatcacctgcagaatgatttttttttctattacagttgacacatagagatgcattttaattcacatgtagacaaacatttgatgaattcctttttttatatatatacttgggaaataggtaaattttctgctatcaataatctctcagaaacacttgatgactgaatactatagttaaaaatcatgaatgagaataagaaaggcaacatagtattttaggagggacattatcccactcattgaattaccatataacctgtcatagcaccttaactgctctgaacctctttcctcgtctataaccttcatcctggcctgcactggagtcagagttaaactgtgccttgtaaaacataaagttctttataaatataacagttagagcctgggcgcatgcctgtaatcccagcattttgggaggctgaggccaggggatttcttgagcccaggggttcgacaccagcctgggcaacatggtgaaaccccatctctacaaaaacatacaaaaattagacaggcatggtggcatgcacctgtagtaccagctacttgggaggctgaggttggaggatcacctgagccctggaagtggaggctttggaagtggaggctgtggtgagttgtgatcaagccactgcactccatcctcggagacaggaatgttttatatatataaatatagatattattttacatatatatattacatatatatataaaattcctgtgctccctagggtgattttatatatatatatatatatatatatatatatatatatataattctattctatatataacattctactgtagatatatattttaaaaaactgttagatattatgatattatgagttgcgacagtgatgatgatcatcatctcaactaggcaggtctctttttccctggcaaactattcacaggtaggctactcacaggcttatcctcctaagtagtgtgtttatatgtactcgaaataactacataggacacaatgtatatgctttagtccactgaggaaatataaagaaaaaggatattcttggtctcttgctctttctgttttttttttgttttgtttttgttttttttgtttttttttttaagagacagtcttacttcattgcccaggctggagtgcaatggctgttcacagacgcagttataactcctgggttcaggtggtcgtcccgcctcagcctccttagtagctggtgtgtgtcaccactctgctcagtctcttgccctttgtgttgtcattcaacatcgaaatacatttcttcttctttttttaattttattttgaaatggagtcttgctctgtcacccaagctggagtgcagtggtgcgatctcgattcactgcaacctcctcgtcctgagctcaagtgattctcctgcctcagcctccagagtacctgggactacaggcatgaaccaccatgcgtggctaatttttgttattttattttatttttttagtagagatggggtttcaccacgttggccagacttgtctcaagctcctaacctcaagtaatccacctgcctcggcctcccaaagtgctgggattacaggtgcaagccaccacagccggccaatttcttcttattgaaacgtagatgtcaacgttgcatttgttagatatttcttaactttctctcttatttgagtatctaacatattgtatttcttttgctctagtgtaatatagctaaattgctagactctgaattaatatcaataaacatttatatcacacaagatagtgttatactaaatatatttaaatgttttaaatggtttcaaagttaatattttgagtaatatgctatggatggaaagcttattcatgaccagtataagttatacaaaattaatgtttcaaaggatgtctgaatttcaaaaggactcttcaaatgatcagctccataattatatttttcatctaattttatgttcaagtgctcccctagagtggtgataagtgaaatcatcgattaatgctaggactctaagctgacctagaaaaactacatttgaagctgtattcaaagaatttcatttagccttactaggacaactgtcattcttatgtaacattttaaagttttgcattgagattgggcttgaaataaatgcctgcatttgctcagagactgttaaggagggagatagagtaggaagttgtctccagaaataaaatgataatgaaacctattgtttatcgagtacctactaattataaaccacagtgattatatatgacataatttttcatagatactaaatatatgtatgtatatttgcaatttttatccttgcaaaaatgacaagtataattggggtatttacattctctttttaaagacaggacaataaaatctagtaaggttaggattttgcccaaactcatatagaaattagcaaacatgagatccaaatccaggtctgtcagaccgcagggtctttgtttactctgctatatcatatttattattcattgatggatgtattaaacaaagattaattcagcccttcccattgccaggaactgttatagatgctgaaaatactgcagtgaaaaaagacaccaagttcttgctttcaaataatttatattctagtgaaggaaatagaatatacaaatatgtctagtggcattaagtgctacagagaaaagagcaaagcagtgtaacaggatcgaaagtgatggtacaagaggtatttgtactgtattgctgtggaggtcggtgatcagggaaggctccttctgtaaaactgacatttgagcacaggcctgaaggaagtaaaagagtgagcttatgggaatacatgaggaaacagcctacaagcaaaaggaggagctcatgcagtgctcctcaagtggggacttggtggcatgatcatggaacagaaatgaggctagtgtatctgaagcagagtgagtgttggggagagagtagagcacaaggtccaagaggtggtgtggtgtcaaaacctgtagaccttggtcaggacgttggcttttactctgagggagacgtcaagtcactggaaggctttgggcaaatgtctgacatagtgtgccttgtgttttagatggagaatagactgtaggacaatggggaaggatccaggagaccagttgggaggctgttgcagtagttcaggcatgagatgatggtggtggcttgagttgggttgtacttgtggaagtaatgaggagtggtagaattctggatctatttcagaggtagagccaaccagataagctgatggtggatgtggggtctgaggaaaaggaagggtcagtaatgactgtcagtttttgaccctaagtattatgatgagaagcttttcgggagggaagatgggaaaaaaaagagttcagtttttgtatgatgtggggtaggttttttttctcctctatatggcaaacgattcccagcacatttcttagcctttctcctttttcattcatcatctatttttttatttatcatctatcaggtgtccatttatgtccatgaaaataggtttaccaatcgtcttgttcaaagcttccatcttactgatctttatcacttgacctgtaaaatattttgttgttgtcattgaatctatcaactagcaagacaggtgtgttaaatttcccactgtgatggtggatttatcagtttatcttacaattctattgttgttatatacataattgaaattatgatactggatgcatgcactaattcttgcattaattctttctggtgaattcatgcattaattcttcctggtgaattaaattttcctcaatatgtaatgctctttatcaaatactctttgttttaaggtcctttttgttttttatgaatgtgtctacacacatgatttctttagatagcatttgtgtttctgtttttgagctcctattgtcttgaactttatttgtgggaatccctggggtctgaattcagattcacttttgtcagacacttggaaaccctatcatctggggttagtttaaagtttgatttaggacttgtttggcttcacagatagcatgaattttgatcccaaattgaatattgcgggcttgtggttaggaattgtcaggaacagtgttttcttcttttcctcctccctctgagccaaggtcaaaacaggcttgtatccccatcattgccctttgcaagatggggcttttctggtttatcactgagggtgcagcccttcagggaatccactgtgatgtgaccatcccacttttaatatctgaagttggactcctggttttgccttactaacacccaagtttgagttcagggcaaacacagcctgtgcttgctaatcctacagaattttcacgtcttttcctttttgttctctgagatattccttactttcctgccatccccaccaggcattaaaagatgcttcatttttgtataatatttttcatctgttgtaccaacaaaggtttctctgaacatctgattcacagtagttcttgctgacatgcaacgttgtaaacataggagagtttgaagccaaacctagcactgtggtatctgttcaccagctatgtggggtggatattttcaggttgcatgaagatcctgttcttcacaaccattcactcagtggttttagcctccactaatgattgttgcctgaattacttattacaccgaggctacaatatggtgattttcaaattctattatttcttttacatttattagttgcctttttttctgtaaagaaaagagtttttccccagcatctctttacttttttcttgtcttgtgttctcatggatcattttttaatttgacgtgttatacttctttactatgataattattttgatactcaaattgtcttgaattttagggtggaagcccctgaagccaactcctgtgcccttttgctgtgcttcactaaagtctttgagtctatctttgctttttggcagaataagatgtcccaggctggctttatactttgtctgctccagatctggaagcagccaatttttctgacgaatccggcttcttttgatgagaagcgacattcagaaaccaaaattggagttctggatgtacctgttcctacaagtgtcattgtatttgggcccttttagtggaaagaacaagaaaatctgtgtgtgtgtgtatgtatatgtgtgtgtgtttaaatcataagtctgtattggtattctcaactgagagtttattttctctgaaaaagtagtgtcagcaattatagcatagaggtaaacaatcccagtttttcgatgtacttttggctgtttgaccttggacaatttacttaatttcactgtctttcttagtttccgcatctccaaaatcagaataataaaagtacctcaagcatagttgtgagaaataagtgtgtggatttatataaagtgctcacagcagttcctggctcagaggatatacttttaaattatttgctaaaaatatgaggtcggaccgtgtgaaactgccactatttgactgtctttaacctacagaaataatttcatgcggttcatcctgataaatgtgaacaccttcattgaccgaatgccttttaggggcagcaccctttgctttaaggtccattttgtttgtatccacagctctgctgtggataaagataagtaaaagagtctctgccttgaagaagctgagagattaataatagagctataaataaagtttcctagcactgtagtgctttctgcctgtggtgggggaatgaagcaggactcttcttaggttaccacaagcgacttgggggaaggagacaaaatctggcagtctgctgaacagggcggaattttagattgaagaccctagaattaaggtgggaactccaatgggatgtcctcagggagtcacttaggaaaatgatgaaccacgtgtgtgcaataatgtgtgcaatttgacacacagttttaatgcagacaaaaatctttaataatcatgaagctatttccataatatgaagaaatttaatatatgttaaaattctatgtatttctttgttgttttccttttttagaattttctgtgtgtctttcttatgtgccggaaacccaacctcagagcagtattttcaccattgagatggtgccattaaacacttaaaatcggctgggcctgtgatcccaggactttgggaggccgaggtgggtggatcacgaggtcaggagatcgagaccatcctagctaacacggtgaaaccccgtctctactaaaaatacacaaaaattagccaggtgtagtggcgggcgcctgtggtcccagctactcgggaggctgaggcaggagaatggcgtgaacccgggaggcggagcttgtagtgatccgagatcgcgccactgcactccagcctgggcaacagagtgagactctgtctcaaaaaaataaaataaaataaaataaaataaaataaaataaaataaaataaaataaaaacacttaaaatcaagctaatgtgattatccttcacaatagcactgcgattagaagtttatatgatgatcatgttaagatgaacatggggattggggtgctaactttatatatatacacacacacttatatacatatacatatgtatatataaagatctctatctatctatctatctatctatctatctatatatatatatatcttttgactaccccacaacccaactactaatagcctactgttgaccagaaatcttactgataacataaactgttcgttaacacattttttggtgttacgtatattatgtactgtatgtaagctaaagaaaagaaaatattaagaaaatcataaggaagagcaagtagatttactgttcattcagtgaaaatgtattattgtaaaggtcttcatcttcataatcttcacgttgaataggctgaggaggaggagaaagaggaggggttggtcttgctgtctcggggatggcagagatgaaagaaaatccacaagtgagtggacccacacaatttaaactcatgttgttcaagggtccactgtagtttattccatgattctgtcatcatctactgttaaatattaatgtaatgagagtaacataaaattaacacaactatgtggctgaagatacctgatcttccttcagaagttagtttcttttactggccagtatttagtctctgtattaatcacaaatatttgtacaaaatgtattgttgttgttattattattattattattagagatggagtcttgccctgtcaccaggctggagtgcagtggcacaatctcagctcactgcaacctctgcctcctgggttcaagcaactcccctgcctcagcctcccgagttggtgggactacaggcgtgtgctaccatgcctggctaatttttcgtattttagtagagacagggtttcaccattttgggcaggcaaaatgtattataactttgtttcttgtaggcatgttgcattcttatactggctgtaattattttcagaagtgctttaattgatgatagtgtcagaatggaggaatattatgagactcttctcatgaagtgtcttttataacttttaatgagcgcaatagttagatggttaccacagctggtctgcttccctactgtattctatgtgtccagttattttcccagtccttatgaaattaaaagcaaagtttttgcaaagtactaagaaacatcttgctaaaggccaactctagccaggccttgacttttcgtatcatgtgtttcatattttacacactttgactgtaatgagactggcatatccatgtgagtcacgctgatgaacaggatgtgtgtttgtatttacgttctgtatgagggttttttggaatatgtgaattattataatcataagagtatattaaaccatcttgataagaaattttaaacatgtaaactattcattcaaaaaaacatttacagagaatttccttaaggaaaacctgatgaatggatgtttatcttttaaacattatatgattgtattaataacacatgatgaaaattctatccactgttatctttggctggtgagtttttcctttgtgtacattctgaatttccaggtttttcccttgatgcaccagtatgacttttatgattatcaagattttagtggattcccggatgccttttatttggtgaagaaaacaatgttctaatacaaagtgaatgaaaatagctgcacatatgatattaatagccagcatttatcaaggaattactgcacattaagcatgtgttaagtattctacatgtgttacttaatttaatattcacacaattgtataaagaagatgctatttttatttctattttatagggaaattggaacttggtgctgtttaataacatgtacaatatgagagctagtaagtatcggaactgggatttggacctaccttcagaactcaagctcttatctactgtgtcacacttgatttattctgatggttttcattgatgctttcatttatgtgacatgtttttgccagtttgcattttgaaggaggaagcgctgggcttcaggagcagaaggatgaatgtgacatagcccatgctctgaaggagcttgcagtctacttgattagacggtcatggagctgtgggcacatctgcctgggacgaagagagaggaagtatcaggttgacttcttggagagtgatatttaggcttagctggtatagaaagggagaagggtattccagatattcggggaagtgaggacagaatttgcaaagcagcagtttttgcaaatgactcagaaaccagattttgaaaagccttggatgcctagtgaaggagttctgggttacgcagtgtgaacactggggaaccattaaaagaatgtaagcaataatagggtgggatttccttatctgttttattttttgctctttttttttaaataaataaataaaccaaagatttctctagcaatggtgtagaagttctgttttagagtggagagtttccagttaggaagatcatattgaaggctgtctgtcaggagtccaagatcaaagtccttaggggataggaagagatgaaaaggtttaagtgcctgggatttcaatctaatactaaagttgtacaaaaattcataacacttttggcagtatattcattaataatcgtttctcaattgaatgtgtttggaacttattcagccagaagctttgatactctagaaacaaaattgtttatagcaaacaatccgttatacttgtgtttttagcctagctcttagcttctgcaatgaagttgagacttttaagaaaatatatacacagtacacacaaacacacacatgcttacacaacaacttactatttatcagcttacactaagtctcaaattggtataagttttaaaagttaagatcttaaatcttcatgaacagatgatagtgttattataatgtgacaataataaatttatttttattaaatgaaaatctttttgaaaagttcgtagaattttaaatgtttgctgtagtcaagaaatattatattagcaatatcaaccacagataaaagttttatattatttgcctaatccaggggtttgcagatttttttctttaacaagacagaaagtaaatatttcaggcttcacgggccatgcagtctcagttgcagctgcttaactctgctattgaaggatgaaaacatccacagccaatatgttaatgaatgaatgttactgtgttctaataaaactttatttccaaacgcaaatgacaggatggatttggtatatgggcagttatttgctctatagttttgtttgtttacttgttcttgattcttaattttataatgatgcaggcttacactgaacaatactgtatttggttctagtagatgcttcttttaaccatattggtattcagtgtattgtcggtgatgcttttccccttagtgacatacagtaattttatatttggtaggactagatacattaatttatttgttttggcctttatgtcttcttgtcatttggatttcatggtgacttgactgtggtttgttctttgtaattatttcagatattcacttaactagagaggttgttctgtctatcagaaggctgattggaggcatgtgctggagctagaccagtgttttgcagccagtggtatgaacctggagagaccaaagtttatagcctctctctccactgcctccaagatagtgactgtgactgggctcctttctttccttcgtttctgccttcctctatttctggggttagttgtagatattttgaatactgatacacagtaaaattttagtttagaaacacaaaattttgggggttcatttaattgatggaaaagagaatatttcactttatcctttaatacttggtttaggaataatatttgttctctgtaataaaaatcacaaatgtgacaatataacagtttctcctactttaaactcacttgattcatgccatctttccttattgcctcagcctgaagtggtatctcatgtgccatggttccgttagtactttgttcatatcactcctatgaaatttctgtggcactaaatttaatatgagattattagctcctggctggaggtgaaggtggaggtggagtggtgggtacaggggtcagacagggaagacttgcctcctttatcttcagccgttcctggagtctaatgcagtgcttcacatgcagaaggttcagatcagtatgtgatgatggaatgaatggatagatattccacttgaaggaacaagggtgatgagtatgatattattgctagcagtaatttccttcatataccttaaacacataaaacttcctagtgggtttttgtggccatcatttagctcacccttaactaagcatcaatcctgtcctaagtattattttagattctggggatacatactcaattacttaattatctagtggggaagacaaacattaacatattattttaataaaatgtggcaggtgcaactctgggagctgtgccggattctctggagtctagaggagggcaccccactctgtttcaggaagatggacagtcttttctgtctcttgcattcccagccaaatcctgaaatatgcatataggcaagctagggaaataacaggaagaagagcagaagaaaatttagactgaagggctggctttaacagaggtgggtgagacaatgaggtacagataaggattctcaagctgtgttgttggaggataagtctggagaaatacactggggtcagcttctggagggttatgtgtatcatggtaaggagacttgaactttatcttgagaggaagtagagcatacagtggtcaagtggccattgtagagttttacccttgcctctacattttctgaatgtcagacaccttctctgtttttctcacataaaatggggatacaaatgatctatctttcagggtttgtgtattcattcaacagtgaatttatgaatgcataccatgttccaggactctaggccttgggaatacagcactaaacgtgagataaatccttattccaaagagcttatatttctgagtgtggtggtgagatagataagaaataatatcagtgaaatatacagtctgttaaatggtgggtggaggataaagaatctgggactaggttaggagcgaggaagagggaaggctgcaattttaaataacattgtctggaaagaattatttgagatgacaattgaatgaagacctgaggacatggaggcccaattaattgagggtatttgagagaagagcgttttggagggaagagcaaatgcaaagaccccaaatttaatgcctgacatgtttgagaaatgcaaagagtcatgaaagttggggcagtgggagttatagtaagagatggggtcaggctagtagtgggggccagagtttgtaggtctttattggtcattattaggatttggagtgagataaagccactggagagttttgggcaagtaataacataatatgtttcataaggacaccttggctgctgttttgagaatagcctagctagggcaagggcacgaggaagaccggttacaaggccagtttttaggaatggagtggtgagaagtggtgcttgtaaggaattaaataacttgtaaatcacttcatatttaccgtgtgcctgccaaatggtaaggaattaataaatgtcagctagcgtttgactgttaaagcttctatctatgctcagcaaacagggtttaattcttttttaatctttgagtttcacttgtaagaataggaactttgctggctaagataataattgctatcatttagccaagagcattcatggtgagttagcattgtacagcctccttagcatgttttctcctaatcttctcactaacccaaggtggtagctctccttacaccaagatctatgctacatgtggtaccactggggaagttgaaggtattcaggaccacagaattggtaactggaaaccaggtctgtctttttcaactatgtccattagattgcatctgatattcaaaatttcaagtagattctatcaaagaataaaatatgtaaggaaagaagcatatgaaggacatgtctgttatatttctgccattattggtaactcttaagtaataatgattatctatgtgcttaatagatgtcattgtgtgtgtgtatttgttcttctaaatggtatgtttgatatgatcacagacgacattgtgccaaatgtaaccacttttcctggcggttttaatggtgttgcaagagtctgtgatgcttctggttccttttctgtccgatgtagacaatgcattcatattgcatgatgattagtacaaagtacaaacaaggagactagagaaaagagaggctaaatgaccaaagatacttaccgcggtaagtggcagagttcatttgagaattcaacagattggctccagagtccgtgttcttgctgagtagatcaccccaagggaaaactataggcatgtggtattagaagggaccttatagacagagctcttcattttgcatgtgaaaaactggggttctgataggtagaatctgtagccagtaactggtagagccagtactgtaatctgtgcctctcacttccattacctggcacagccttaatttgatcagctgtttttccagatgaaaagtgtattctccaagggaagaaacaaatactttctttattctcttaaagtttgtgagtggctgaatgttttaatgtgacgatttattaaaaactgaatctttaatttgaaaatcagatttgtatctttcagttgttttatatttaattatattgaaaaatcagcaaatttagattctctcatttgtttcatgttcatttatgatagctaacacttttaagaacctgatattgtagccatatttaaatagttatttctacaaatcaaatataaggaataaaatatgtcttatttataactcacataaatttaaatcatagaagaattgaacttgacagagatcctcagtaagaactttaaaaaaaataagtatcacatgtatttaatccatacttcccagtcattgcaacaaagcagggtatgatttatgtagaaggaaaacatttttttgttatttttgtagtggggcatttattgcacacacagtaagtgttataaccaaaacaaatatacaattgggacactgtgtttaaattatcttctgtcatgtactatataaacccacaatagtttgaaatgtatttaagccaccatctgggacaaagcaaaagctgttccaggatccagcacatgatgaatgtgaggcgagtttcattaggagcctcctagcacgtttctgcatcctgaatcgtttcttccacggtttgaaagaattccaacatccgtcttagctccctgaggttttgagtgtttttaatagatcatgaaattttttgtggcctcctaaagaactaaatcagtgaagttaaacattattgcatttagatttccttttaatctggagagataaaattcaagtttgtatcttttaaaagcttcagcagaaatgccccatctgttgggaaaaattcttactgggttttgacagtttgaaaggaataatttctcttttaaagatgactcaccttaattgagaacctattgccatgataacaggtagctatttaatcaagtacccattaagtgctatgggctggaggcagttcaagccttaatactaatctggcattctaatccagatttgactggctgtaaagtttatgtgagtgtttttctttcaggaaactgtttgttgccttatccctatataatgacaatagtacaagtagtgatagttactgaggccttaccatgtacaggcatggttctaagcactttctaaaaattatctcacttattcataagaacagtcttaagaagtagatacatttataattcccattttacccgtgaggaaattgaagatttgaaaggctgtagaacctgctggaggttacatggctagtgatatggtttgattgtgtcatgacccaaatcttatcttgaattgcagctccctcccataatccccgtgtgttgtgggagggacctgataggaggtgattgaatcatgggggtgggtttttcctgtgctgttctcatgatagaggataagtctcatgagatctgatggtttttataaagggcagttcccctgcacacgttctcttgcctgctgccatgtaagatgtgcctttgctcctcctttgccttccaccatgattgtgaggcctccccagccatgtggaactgtgagtcagttaaacttctttttctttatagattccccagtctcaggtgtttcttcatatttcttcattagtccatgaaaatggactaatacagctagtgagttctagccttctaatttaactttcatggcaatgcaggcattattcctgtttttacagatgatatagctaggatcagagaggttaaataactcacccaaatcacatatgtaataaatagaaaaaggagctgaatccatgacttctaattccaaattcagtaattaaaaaaaacttcaacttttattttagatttggggtacatgtgtaagtttgtgacatgggtatattgtttgatgcttaggtttggggtttgattgatccactcactcaggtagtaggcatagtactgtataattactttttcaatcattctctctccctccttcccctttctaatggctcccagtgtctgttgttaccatctttgtgtccatgagtacccagtgtgtagctcccacttgtaagtgacagtatttggttttactacttatgagatgcggtatttggttttctgttactgtgttaatttgcttaggattatggcctccagccgcatccatgttgctgcaaaggacatgattttgtcttttttatatctgcattgtatctcatggtatatgtgtaccacatttttttatccaaattcaataatttttaaaactaaaacatgttccttcattttcagcaattatatgtatttttatgcatagaaacttaaatacaactatgtaaaatattttaaatatgtttaatatataacttaaaaatttttcagagaggtatttttttgaattttttttatctaaattgaatcagagaggaagcaaggttgtgactgtggatatgacttttcataactaccaaactttctgtaggtggactagaatattcactttttaaaacaaaatatagcaaaaaatataacaaacacagaaaagcacttgaaatattgtgtttgaagagatttgtgtataattttgctatgctattgtccaatatgatacagtttcctttagtagttactttaaatatattttttattattaaaacaatataatattcttttataggttatgaaaaaaatccctaaatggtgaaattaaagatattgaagttgaggtttaatgcagaactgcacttgttttcagggaacaaatgtcaatatattaaagagtttaagtagtgtctgataatggttatatggtgatccagaagtacagtaatgattctcttaaaatattccattttaacttattaggcagttatggcttcttatatatgctataagcaaatgtggtggaaacatattttgttttcataaaaaatttctgttttaaagccttctagacattttcaaacaaatctttgttctctattctgattaaggcagtactattccaaaatatttaggagtggttttcattaatttgctattaatgttaccattctggcttctttcctcaataggagactaataaaaccatgtgccgcagtaagataatgtactaacatgccaacatgcctccttatttgaaaccagatctctttttctggtttgaaagttgtggatcttaaagttctctggcacaaggaaggcaagtgaggttagctatggagagaagattgcacaattaaaccccattgtaatgtacggtctgtctggcctagagcttcatcttattcttgtgattatgaaacagtattctgtcctgacgaagaaggtagtggggaaaagtttctgggatttgtaggagagtagaaaagaaagatatttgggaaggatatttttaaaaaagaagggtatctctatgatttgctgacaattaacaagtcttaaacagacaatcttctcttaatatgaggttttatgtgatgttgtgagggagcctggtattcacaccagtggcctcagttatcacacagcagcgaaagtgaggaggtcaattttacttatttggcaatttaacgtgaaagcactgggttgtgttttgataattcctgccatataggatggtcaataatttctacttgcaaaaggaaaggaagcctttttcttagcaaaatattggttggtgaacaggaggagatcttagtgccttgttatttcgcatctgtgtatttgtcatcttattctgacttgaaaactacttcactatctatatgattattttggattctgagtagttactcatttatctcccaccaatatgttattgcaacatgtgtcatctgttaccctccccacatcagctaatcatttgacatataattttaatataatatgctaggatacagatttagtttgaagtttaatatttttcttctagctttggtgagtgaattattaattgccattgtaaagaaaaatgtatcatataactgacatgagaaatgatcgtcaaatatttggtaatagttttttgaggacttacgaacttgaatatggcactaagatttggttaacagtatttccattgatttcaagacttcagtgactaaaagatatttggaggagtcttggggaaaactaaattgtgaaaaacgctgaaaagaaatttgtagcattgcagactgtagcagagttatatgatttagatgccttgtgtttagccaaatcaaaaatccaaaaatggatttctgaatactaaagtattaggataatttaacaacatgcctaccgttaatttcctaggaaacaacttcgtgtgttatgttttgaactttcctttgtattagatttctagaaggacttatattattcttgtttagtttccattttttagaatgtttcttttgatgatcctgtaactctcataagagctcagacttttcccctatacctatatttgaagttgtcttttgtctctctagtatttcaagcctaaacctaggtttcactattttcttcttgcttattccccacatacattctcttagtattaccattacccaggcttgtccattttatccctcagtctgttccaagcctgttcacacctttcctgttctactgccttcacatctgctactgccggcttgtgataatccctctctggaccatggtagttgcttctggcagtgtcccttccttcccctctttcctgtggcatctcttctttatacaatggaagtagtaatttttaaaatttaatttaatttttatttgtttatttatttatttttagacagggtctcatgctgttgcccaggctggattgcagtgatgcgatcacggctcactgcagcctctacctcccagacccaagcaatcctcccacctcagcctcccaagtagctgtgactacgggtgtatgccagcatgcctggctaattttttgtggagatgggagtctcccagtgttgcccaggctggtctcaaaaacctgggctcaagcactcctcttggttcagcctcccaaaatgctgagattacaggtctgagccactgcacccggcttaaattttagattagataacatctacctcacctccaaagcccttcagtagctagctccctgttggactctaaaaatcccaactccttagtgtggcctgcaaagcctgcatggtctgcttctcctggattgtaagctccacgaggacattcattatcattcaggaatgttcattaaaacacttgtgtccaacaccggcactgtgctgagtactgggacatagtaataaattaataaataagaatgagagaagaaaaagaaatggaaaacaggaacacctgtggactctagtcatggaacttcatctactggtagaatagatattatccacgtaattgcagaaagatctgttaaaagtacaacactgataaatgctgtgaagaataggttcatgattttatgaaagcaggtaacagtgaagtcttactgagatagtcatgactgaggtgatgagtgggagtacaggaggttggggtgtttgtgtgagtggggagaggagagaatatgcagggagggggttttctagaggaaaaatctgcatgttcaaagcctgtaggggcaggagcagactgtggctagaaggcaggagcattggcggttacctgctgttaaggatttctaataagctgaatgtggggaggggtgaggaaaagggaggaattagtaggcttttggttaagcacttgggtggatcttggcaaacattaacatttggagaggttcaagtcttggtggtacttgtgtgtgtgtgagagagaggcgcgtgcacacacacacacacacacacacacacagagataaagcaagagaatatgagatctaccttaggcaaatcacttaaccttttgaattgcagattcctatctcatttgaaaaacacacctaaaaatgcctaactcattatggtgaacgtcaaatggaattgtaaaaatacgttataaactgtgagttggtattggtatacatgtagatgattgtagttaactatttctcagatatttccttgtattcctcaatattggtttgcagccattcaagctggactatcattttgatattcttcctcaccatatagctttgctcaagactccaccctcaacaacaaagtaaatgttttaactggagctctaactctttaatagcttctttgcttccatcctctttttctgcttctaagaaatttaacttctcttcttagtttttttcttaccacccttctcattttttttttccattccttccatcttgggctatatttcactttcagaataggactttcttccatttccctgtagcactgagcctaagactatgcccttttatgtttcctttgcctttccttgttggggagaggggtttaggattaagtgtaggtgtatccacatctcctaagatcttttaagattatattttattttcattttcttcttagtaagcaggttctcttatttaaaacctctccccaaactcatgtcgataacattttattacttttttaaagatagaagttacatattggacttataaggtatgggagtgccagggtgtgggagagcttgctttgttaactttttggtttacaatgaaggagatgctcccttttattttggatagaaggacattgttcctcctcctgtggagtaggaaagtttgctccaagccaagcatgcctccttcctgaggactgaggaatagctatctgcctgtgtctattcttcacattgcctggagaaagttagaatagaggtggagattgagtatctagccacatgaagtgattcttactgtcattcatatttaacatttattgcctttattttggggaaaaatcatttagatggaagactcctctctttttaattttatctcccattccagctgatctacagtatattttctaggagaaaatagatttagatactaattaggataatttaatgaaatataaaatctgtgcgaggttagttgttgctattccaataggaaaatgaaactggattcagttatcttattgctaaaatatgctaaccaagattcagctattcagataactttagagctgtaaaatatattttataactctgttttcattctttcattaataaatacctgcagtaattccctggcttattttccttacacagttgttagagtaggactttgttttctgtcagtttcattcatttcattattgtatttaagctgactatagagaaatcatgttagcaaatgtatatgaattatttctccctttccatgaggatctttctgatgtcttattttttttctgagagaggctgtgcattgactttggttagaaatggtctgtcttttcaaaataacttctatgtaattaaaaatggctgaactctaatatgaagctgttatcttgaaagctatttctatatttaaaaaatcttattttaagttgtagaaagcttgtatgttttatgttagtatctgagtaaagctatcaatggaggtacatatgtggttaaagtgatgaaaatataactatggttaaatcattcatctgttgcaaattacttatgacttctgatacagattaaatgaaatgctaggaaaaaaatatagatgagaaaaatataagtagcaccgtatgtgccaatgtgtgactgtatgcttgtatatgttatacacaaaagttgttaacttctgcaaaactttgaccattttcagtttacattgttaattttcatttatttgatttagaaagaccatttaaatatgttcttaaacctagtgacaaaatgtgtggaaaaataatgagaaacatctcacagttaaatatttttgtttttagattagtcatgaatgtcttctttcctgtagtgtgaatggcagaaagttaactattcatggtgtaatttgtgtgaaaacatctatacttgcatatttatttttattattctattttatagaaagcattaattctccaacatggtaataaaacatgtttttccttcaggtacactggtgtaacttcccttctgcatgaaaatatttcagtttatcaaatcatacttttcaactaaaatttggttaacatagaaatgttacaaccataaaaataaagcgctagtattaaaaaaggttaattttgattttgatttttactgtctttattatctttaactgttaaaacatgtttagctcctaaaatatttaatagggtaatttaaattactgcatagcaccctccttttagtagctggtggtaggaactccaaaccaatggaaatttctagctgaaattggaatccatgaagaaccaaactcaggagccaccttgttttccttcctcatctaatatggatgtttaatttggggtggtgactgacttttcaatacaactttaagagaacattctatataaactgttgcgtctccccagctaccctcagagaaaaccacatgtctaagctgaggggaaattcacccgcatggaacggagccagtctcttggagaagaacatggttgatggaacccctgaacaataaagatctgtgattactgaagcggctcagaatttcatttttgaggccactaaatcactcttggcctgcacagctgtgtagtcaggggaggctgcagatattattcagggcagcaaccacagagtctgttttttatagaatattttcccagtgcttttggaaactcatcaagtgttaaaactcagtattttctgggaaagttgaagatttttctctccttttatggcaatttcaacctcaaggtgaaatatttctttaattatgtgtaaactttattttttaaatgagaaaattacattaaaattacaattttgtgggacattattaagcaagaggggaaaaatctaccgttatgtgaggttgggttgtcagatatttttaaattcagaaaatttgctgagaattctccttccaaaatggtaaaagaaaatgagtgcaagaaacgcgccactgatagaaaagtgggaagatactgaagcaatgttgggaacagaaatgatcagggtgactgaagcagagtcatagagccttgaaatagaagtaaaaatgtaaaccacggagacaaacaggaagcttgtggaagtgaatgatggtgagaaatgtgttctacagtaagatcatgaggtatatggattcttattttacattcattttaaaagcatttttccaactgctaagatttatattattggaaagatgttttgcatcttctaatagaaattcattttggaatagagtggcagccacagtgtgggaacttcagaaaagggggtgatgtaaaatcaacaggaacagagtgttttttgaagtgtcagcagcaaggtctggctaatgggagcaggctgtgacactaggcagcatgtactccagaaagcacttctgctttcccgtagggcatcccgcagaccctggctgggctcagcaccaccttctcattgatgtccctgtgtaggtgggtatacgatacgtatgctggtcaagaggctgtccctaattctcacttcagtaagctgaaaactccctaattctcttaaaagcctgaaaactttacgtttttctcagcaaatagttgatattagtgaaggcctatttagagatttctttgatattataaagtgtgctgatgatcatagaaaaaaaaataagctgcatttatttgttccctaaattcttaaatacaatcctcccaccgtgcataattacagtccccaaggtaaaaatctgacagttgtacttacataatagttacataatcagctacttaaataggttttagctattagctaaaataaataaatcctagagcagatttttctgggtagtgaagttgtctttttgtagctgttgagtactggagttctttttagataacctgatagtttagaaaattaatactgaagcaattaattgaaattgacttcaacctaccaattccacgactgtcgttttcttctttagttactttccattaattgactacgctacccctctttggccctgctgtacttgtacatggctatttattcatactgtgttttgcctctcattcatgccacaccaacagatgcataaagtgtccatctctctattttcctctgaaaacacgattttgatgcatctggcatggccttctttttccttgtgcatattagttgaaggtacgtgtgagctggagctagggctctcaccacttcctaactgccttgtgttggccgagaggtgctctggagccttccctgggtcctagtggcttactaggacctagtagtttcttcctttggcctgcatagaagcctagcttagcatagaagccttccttcggcctgcatagaagcaaagctttactcattttggaccattgaggcctcatgtgaattctttgtccattttggatcaaaaaaggaaatgacaaagagagacagaaatagaggttagagagacaagagtctacaccagatggtgttctcaccttcaaacagctgctcaaaactgtacagctccatatgttctcttggcttatcaaaaagtcagaaggctctgagacattaagaaagagatacttgtgggcagctcatttcaatagctcgtagcacaaacctgtaattaccacaggacaggtgtgtgcagatcttcatgatgctttgaagaatctcaagttcatttgagaacattgtcataatgacccatataaataaacagccaaagattaatttagctgccaggtaagcagtgaccaaattgagttttcagtaacaaacccagtcatcatttctcctgggtaagcactggaaccaacatacttatgattttattatgaattatttgtgtatgtaattaataataatgtatttctgctctctttgcttttatataggaactactcaactttaacacaattctaagttaatatttattcttgttatatcattatttggaaaatgtgcttagattaataagtgtaaaaataatcataaaataatacatctcaatgttctggagtaaaattgttattaagtgtatgaaataaaaaacaagttatgtcttctcttcatcgtgtcctttctattcccaaggtaataatcacctaatagttgggtatctgaatttctatatgatcattctcaatctcactctcaatcatctccccttttgtccatccatccagccccccgttcatctatccatccctagattcaccagttcccccatcctcccatgcccgcatccaggcatccacagattcacccatccctccatcccccggtgccccatccacccacccatccacccattccctcatccatccatccatcctccttccgttgatccatctacccacccatccatccaccctcttatacaagtgcagcctttatctcataatgaaacttgctttttaaatgtagttttgaagataaataatacatatttgtagaagtcacctgtaattgtttattgacctacaattcatggaaatgatgtcctagtgctttatttcttagcatgtagttatttagttgggactttttatttttgctgaagcatggcaatttgtgagcaatttaagtctctgccttgtggtaggggttggacccttctatgggtgtgactcttcttttttattgacttcgctgatgatagaacttaggggaaaattatgagaggaattaccacaagtgtagaatcggaattttaaatctgaaaaggcttggagattgttcagaatttgatgtaaacatttttctggcagtgaatgaactgttaaaactgtgatttgccggtggaggtaaacaaaaaccaaagactttttctttgcttgtcctaatttcagatcctagttcgcttggtgcctgtgtcttcatcttcgtatctattctgtcttcccatctgataaaacttgaggttggtttattctgtttccagatgctctttttattctgctacccagaaccctcttggttgaaaaagtaattttaagccattcttttttttttttttaatcatccagagtctcctgagctaatttagttccttcggcagctttgactgcccttttaaacatccagcatacctgagtgggttctgtgcctctatagatgttgctgacacatatcactcgtatttatttttgcctggtactctcatttgtatgtaagtgtgttcctaatgttgagtttccttgcaagtcctgaactgtgttttctactttcttcttccacttcctttgtactattcatggtttttacgcacgcactatattaatgcgatgatctgagcataaagtacgatttttctaaagctcatatgaatctgtggagttgtgtccaagcagtgaatctggttataggaggccacatttacagcatttctgcttaacagcctgtccagcaggcagctccgtgctgtctagtaagtcctcattctgatttgtatggtgtagatccatctgtgcagaataaaatttcatcccttctttccctctcccacctcttctatcagattttagacctcataaaacctctcttcactgctataagagaagagggaagaattcaaccccagggctttgctccaagctttgaggatattcacatggtgatagcttttaaaagatagagaatttcagaacaaggcataagccggaagttgtgactctgcatgcagaattagcagttagaatttagaggtacataagtatctgtaattgccaggaaactagatgagtaaaaatcttccctatggattgcgcctttttttcttacttcatagctctgtcagtttttactttgtgtattttgaggtcatgccacttatgcatacaagttcataattattacatcttggtggacttctctttgcttattggatagtgtccctttttttttttaccagtcttaatgattatttttaattaaacttttttatatcaacattgctgtatcagctttcttttggctagtattactttgatattctttctaaccccatgttctcgcttaaaaaaattgttttgcgtgattttgttttaagggtgtctcttctatgcagaatatgttttacttctgatttttttcttttcttttcttcttttttttttttgagatattgcttcactctgtcactcaggctggagcacagtggtacaatcagagctcactgcagcctcaatttcccagctcaagcgatcctcccatctcagccccccagagtagctgggactatcggtgtgtgccaccatgcctagctaatttttttgtatttttagtagagacagagttttgtagcccagctggtcttgaactcctgggctcaagcaatccacccacctcagccttccaaagtgttaggattacaggtgtgagccaccatgcccagcctacttcataattttaaaaatagctctgataatttctgtatttgaatagggagtttgttatttacatttattgtatttgtgtgtttgtatgtattcatattctattgagttttcgatgaccattccttttttttttttttgctcctttttttcccaacttcttgctttctattggattgttagggatttctgtttttcactttatttctctctgcttatttgaaagctatacagcatggttttctttctttagggatcactcttccactttactttttaaagatggataaattttatacatttaaaaaatttaatctgtatttatatcttcttcctgagtggaccttagcatgttataaatgctcactgaataattctcattgttaattagagtttggttttatttttttaaatgcaatgtacttacttattttagagtaaacagttaattaaatctatattttacttgtttttttttctcttttatcctgttgcattctcatggattcatttttctttttttgttattataaattcagggggtacatgtgaaggtttattatatagacatattgtgtaatgatgaggtctgggcttccagcatacccatcacccaaacagtgaacattgaacctaataggcaatttttcaatctttaccctcctttaaccctcccctctttttggatttcccatgtctattaatttcatctttatgttcatgtgtacccattgtttaggtcccacgtaaaagtaaaaacatgccgtatttgattttcggggttatttcacttaggataatgacctccagctccatctgtgttgctgcaggagacatgatttcactctcttttatggcctcctagtatcctgaactcatttttctacatactgaggtgtatcctcaagtaattgattcaacaatggtctaagggtgggtggctttcttttaattttagttttgaataatactttagctggacataacagtctagattacaaattgttttcttctcggcacttcaaagatgttatcctattgtcttccgcctaggacacaataaacaaaaatatttttgaatgaatgacacgttgttgctaataagaatctgctgtcagtctgtcggttggtcctttgttagtaatctgttttgtctccctagtagcttttgctacttacttaactttgtttatagtctattatgttgtatctaggtattgattcagctttatttgtcctgaatcctatgtaggacaaataaattcttgatgtcaagaattctaactttattaaaattctcaacttttatatctccaaatagggttgccttgtctttatgtgcagtccccttttctgcaatttttattagatagatgatggagcctctcagttgttctgtgctgtctgctcatttcagcagctttaaatttcctttctcatgttttaaatttataatgcttttatctcatgttctttttacatttctgccagttgttgtttgcagaagttttacttttgagggaggaagacaaggaactttcccccttactacctatttgaaaatcctaaacaaacttccataaaaataatttcatgtggagaaaaattcatgtttaaattggtcgatcttgttcactgtatttcttgggattagaatgtatttctgtgtgttttggaattttggtgtgctggcttgtatttgagttggaagattccagcaaaagtcttttctttcccccacagcatcttttcacattagatgaaattgagtatgagatgggaaaatgagcaccacacgagttcagtttcatggagtcatcctaggtgtgtcctctctactgtttgagctcccttaggctcatggtctcaggagccagattcttgcctgctctggacgtagaggcccgagggcccatggtctctcctctcttaccactttcccatttcctgcctaaagatgtttgccatatttaaaagatatcagttacagccctatgactttgtatattttcagattgtgtttatcattgctatggattttgagccagagggcttatgtcagtgatcaaatgtgtcatcttgtttggaagcaatttgactggaagttgaggctagacttggggaataactgctgagaaaaaatttaaaagggtaagcattgattattgatcaagtgactatatcatttaatattcacacccagatacctttgagagtgacagaagacattattagtagtgatataggattataagtgtaagccagagctattataggaatgtagaattgtgtagtcgttgtgctataaaaggactatcctctttaaatttttagaaaggaatatttatgattcaatatcacagttatttttattgatgtctgtatgctacctagagttacaagacagctttttctataagaaacacatgattattgtataaatataaaggccaagagtctttgaaaacatggagtatggagctgagaaagaaatgtgtgtatgagtaaatctgaaactgatgttagtcatgaagtttttcagcaatatgtaccattccctctttaaaatatttatagtattacatctcatagtagctgggcctaattttccaaaaaacagccagaggaagaatgtcagcagtaggagttaattttgaggtaaagttgatgggcacattgtatcataagactatgtcttaactactataacctactataattcctaataaatcttgtaaataagcatatatgagaaatttatagtgtttatgtcttgcaaatacagaatgaaccaatatatagaatttgaattacctctagtaaaagtaaaggttcatgttatgcaaacacatttcagactttctatgagttgcaaaacttacatgtgtaccacacctgcctacatgttttgtcactggtgagatgtgacaaaatgatctctacttaccctatctttgaaagcccatgattttagtgattgtttctaaatataaatattatcagcttctcaagacaaaattcattttattctctatatctatgtctatatcagtataaaatccgtgtgtgtgtgtgtgtgtgtgtttgtgtgtgtgtgtgaggatcaaaaactcatgatgaataacaggctttaaatttttttattcgttagcatatttccccaagccaacataattcttgtttttctctttttagaataagctcttgccatcatgttggtcagatagaagaagagccatctcatcttttgtttgttagagggtttcaattatttaataagagcaagtaattaagacattaagaattaaagtggctccaagaagagctctgagactcagaactgcagagtgttgcctaggtttctaagtttggatttcaacagaagtgtgaaaagtttctgctgctgcttccttcaaaaatttttaataagatgtagtattttgacatattaatctgaattgagactgaaaaattgcgtaaactttggttaatcagatcgattgtcaaatccagctatattgctgtttcattttctactaaaatttgaattattcatatcaccaaatagctcagcaaaaatgtttagtttttgcatatatgtaataaaaatagttgataatgaggttctaggggaagcaaggattttgggtgtgtgtacatatgtgtgagagaatgagagaaggaataggaatgtatcaggatagaatgcttctaaaacctcattttccagtaacaggtttgatatactactgtggtcaaaaataataaagaaactataatagctatttctgtattgttataaatgctgaagagtcctgctctcagattacaagatacgcctcaaggaagaagtagtacaaacacaaggttcttaatataggtccataagaagtggcatgatgtaatatctggatatctgggtggtcactcttatttctcacacaataagaatgaactttttgggattaaaactcactctccattaaatttttagaatttccatctccatgtgaagaagtttgagtattattgatttcttcttctttggaaaatcagcccttcagcttttcaaagacaacttgaaaattggacaccaattcatatataatgcatatatattctccactgctgtccaaacagtcattttgtagcttcatagtagaaaatatagttaaaattcttaaatgagggaaagcacatgaattattatatagtgcatctctttatatgaccaaaaattatgctgtattctagcaatctggttatatttttgaatagtatccataattacaatatttatttacaattccatttaagctcctgtaattttgacggaaatggaagaaatttagaatcttggaagatcttaaacttctggttttgttggttgtttgttttctggggttacttttggccaggaggcagagagaagtgttatatagtacttgattcagcaacattctattttcaagtatttattattttaaaagtttttttatgtattatgtacaatatataactgcaattcctattttggttttatgaattattttttctatttttataaagtaaatctataaagttattctattatgtgtctgaaatattgagaaagaggatccttgtaaaagtggaaagataggagaccaataccaggttgtttctctgatccaggctggttctcagcatagctcaggaccctcagtaaatgcctgttgagtggaaggttgcatgaacttcatcgagtatggattcttaaaaataataataaattaaaagaaagcttttcattgggaaattggtatttcaaaaaatcagattaataaatccagtcttttctttcaagttttgttagtttttcttgaaaatttatggagtatatttcagaagctattttttttttttttttttttttttgagacagagtctcgccctgtcccccagactggagtgcagtggcacaatctcggttcactgcaagctccacctcctgggttcacaccattttcctgtctcagcttcctgagtagctgggactacagtcgcccaccaccacgcctggctaattttgtgtatttttagtaaagacggggtttcaccgtgttagccaggatggtctcaatctcctgaccttgtgatccgcccgcttttacttgagccactgtgcccagcctcaaaaactattttgatagaggtggtgtaatcttctaaagccagctggcacatttataggatgccaggctagcccatcagatgaagtgtccattgtggcagccacagatccacatcagatgggaagagtgtgatcagtgctgcatgcatgtttaatcaggtaacaatgggagctgtacaggaagaggattattattccaagaagaaaggacctatatcatcttgtggaaggtaaacgtatccattgggagggaaaaataatatatacatagggagagagaactgaaatatcatcttattggtgtaaaccattttgttagtatcagcattattattgttgatattcacatctgtatgatccatctgatcaggatgggttagctgtcaagtcatcaagattgactttatgacatttttattatctgtcctttcaaaccttatggttctaaattttcactgtttgcatgcactttcatgtataaatctgcatctggaaagactgatatttctctaaggcaggggtcagcagatgttttttgtaaggggcaaggtagtaaatgttttggaccatagagccatggctgcagttacccagctctactgttgcaatgaaaaagcagccatccacgagatgcaaatgaaaggtgtagctgttagctttctgttggctcagctgcacaaataggagcatgaaacaggctgtagtttgccagccactccttgccacatcctcctctgtcattagctacccgtcttggggttcgttctgctgtatgctgtatctacaggttcctgtttgttcctgtttggtggtctgcctctttgcttcttatgcctcactgaccttcttgtaggagaagcttgtggggacttccatacatctttcaagttcagatttgggaagatgtgtgtcacctctgcccttctttcctgttcctcacatatggaggcagtgatgcctttcacccttctggccagagcagcctggttccagagccagccttgaccagagcttgacccatgctgggggaacttagctctggaagctggcagggtgtgggatgagtgactggtgccaggtaggtctggggagatagatagatagtttgataatcccaaatcccaaaactgaaatgctccaaaatctgaaactctttgagcatcaatatgactgtcaaaataaatgctctttggagcatttcagattttggatttgggatgctcaactggtataatgcaaatattccaaaatctgaaaaaaattggaaatctgaaacacttctggtcccaagccttttggataagggacaacctgtatatacagaaagagaactgaaataatgtgtctttttggtgtgtgttattggtgtggaccaatttattagttatcagcgttactattgttgacacccacatctgggcaaggctgtgtaactggcaaactggaccctccaccctctcgggttcacaggcctttcttcctctgcagggagtgggaccttgccggcttgcctggacacagggaccgattgttccccagagtcctggattcccttcctcatcccttcaccgtgactgaagtgctgctcttaatgggcagattgccatcaactgactctgttctttaagtaccggtgacgtcgtcatcttccatgtgctgcccaattacatgattccatctcttggccgttactaggctctcagaactggcctgacccaaacctctttgcactttcttgccaccttccatccctcctgcccctgtgccttgacctctcgctgacccttgttcctgagggctcttgccttcactgtcagaccagcatgagttttgccaaaatacagattcttttcagtggagtggtatataatttgatttttttgtttaaactcctacattttatagtcattggtagttaaattacaaataaatcttacactaaaatttattttattttatttttatttttttgagacagagtctcgctttttcacccaggctagagtgcagtggcatagtcttagctcactgcgacctctccctcccaggttcaagcagtcctcctgtgtcaccctcccgagtagctgagattacaggtgcccgccgccacgccagtctaattttttgagtagagacggggtttcagcatgttgtctaggctggtctcaaactcctgtcttcaagtgatctgtctgccttgacatcccaaagtgctgggattacaggtgtgagccacagcacctggtctttaaaatatttttttaaggaaccttatcatcagtgctcaaagatagtcaaaataaattaaagccatataaaaggaccagtagggcctcaaattggtcatggaacatagggagcaatttgaaattaacaaaataaaactaatgctaactggattgtttttccccgagtaacaaagacatattaggaggatttctgctcctaaattgtcttttaccatcctagagtcaaaatgcttgatccaattcagtaaatggaattgtacaagggattagtgatgctttaccttttatatcagaaaaattctcagaagtacacgtaagtggaatttattcttttattataaaatcagtctatagagactccttcctatgtttacggatgagagagaggaaatgatagatgcttaaaagattaggtaggaagccactgtgattgtccagatgatagcctgggcaggatagtataagcgaaatggaaaaaattcttagagactatagagtcgtcagtgtcactttcatatgggccaagttgataaacttttaataaagctcaggattatttacataaccagtgtaattctctgggataaaggtctgaataagttagagtctttgggaaagcaatcttagagcagaggctaagagcagtaccaagaagtcagactacctgatgttaaagcctagttctatacctaagtatgggaagattatttaacctttctgtgcttagttttctcatctttaaaatagttcagtgaagaatcaacaatatcatgcagttgattatgtgaggattaaatgaaacaatacaaataagacacttagaacacttaaaatatgttatcactattattattgttattatttggagtcacatacacatggttttaaatcactcctccaccatttgctagctgtgtggctgtcagaaaattaaataaactctctaagtacccttctctttattgtgggggttgattgcataggatggctttagggatttgttcagatcaatgtaagtaatcttctaacacgtagactatgctcaataaatggcagcactaattttcattttctaaagagaaaaatacttggtttaaataacctgattgattttaggtagagaataaaatatatgtagaagtgaaatctatctactatatgtcatttcttcaaaattaatttaagatttccttccactggcaaatatatttaaatgtactgactaattaaattcagtttagtattttgtatggatagacaaatagatacaaacaaacaaacaaaaaaaccagacaaatgtatatataaagggttgtctctccaaacccaatattgataaatttttaaatcttgaagatggatcattttgatgaaaacacaggtttgcagaagatactaggttgttatgggtaaatgtctggcttataaaaatggtactggatattcatgcaaaagctcccatctgatattaagttaaacaaatcgaaattaaattcatttcaacaaatagagggccacctgagtgcaaagaaattttcccactcagtgtgtttctgtgtatcttttttaatttgtctaaatctttttaaaacttttaagcagaagcctctgttagggtaatatgatccttcactttaaatctgaagttaaatttccttttatttgctccaactgtacatttctctggtgtcaacaacaattaattctagtaaaatatgatttgatgattcttaggtctgtttttatatcatccaaactttttaaagttgttaaatttttctgaacttattttttccaatgtgtattttcccagcataaattggatccacgttaatagtcttattatgtgctagcaaatccatgcccagtctagagtgcaatactcccagtccgttgagtaactactatgccatttttacaaatgctatagaggaataaagaagaaatgataatgtgtaacctctcatgaaagagatgaaattctggacggagaatttgaaatcaaatgacaatttttgttgcatagttttgttttgtttttgcagttttggtaaacctttgataccatgagtgtttactacgagtgaacaagtcacaagcctcagttaatacaaaaatctcagaaatagtcattattggttgaataattaacctagattatttctgtgagaaatgtggatgcccatgaatgatgttacattgcatatgtcttctagtaaaactgtttctagttcataccaataaaatgaaatataatggtgcttggtgtttctcaaaaggcctcatatttccccataaataacctgggtctaacatacttgacatctgctgttgtagtagtgtacaatatatactcacatataaattggcatggtacaaatcacataagaactaataagaattatttatagacgtgaatggtgacgtgatgtcaaataattctgaagtggtgtgtttgggatcaattctaaaggagaaggaacatgatttgtcagaaaaggaactcagattgcataggaatgaacaagagttgtctaagaaagatgattgaattgggtcagagccaggaacttgaccatttaatgaaacaatgtacagtgaggcaggagagcaggagagaaaaaagaaaaggaatggaaggtctcaagagagttgaaaagggtatctataagaacttactaattgtagcagctgactaaaagtggaacgagcttcctagcaaagttgtgatatccactgatagagataataaagtcaagagcgtctccttataggatgttgtttacggaattcatacattgggtagaagacaaactagatgctttctaagatatgttccacctctgaaatgctgtgattctcctatttgtattgctaattagccaatgaatatagtgtgtgaaagatatgacagcacaattgattgctctgtaattataaattaccccctctgctaattacaatgaagttttttgaagattttttaaatgaagcagtacacttctttatgggaagatcatgtcacattttctaactgattttgtaaatcccatttaaaaaatctcctctactattagaaatgacaaatatcaaaactacaattttatactgagatttatatatatatatatatatacacacacacacacacacacacacatacttttttgggggggataagaagcattaaaataaattaagtagaataattaaaagctgtatgtttagctggtaatttttggagtggcacagattttgttatacactgtggtattcaaaaaagcccagatttgtcccaagtaaataaagaaatgtcttttaaatgttttcacctctaaaagtctggtttggtggttttaatattttcttatgttgctatatcaggatatgtatcttgtgcaaagtgtggcgagaacagtatgtttacatcagtgaagtatgtggtaactagaagagcctaaaaattgtgatttatgttggctgttggcaatttttttttaaaagtacattgactttgtgagaatttttatgtaaataaacaaattctggttttcatttctaatgctatttgattattttgtataaccaaacgggtttttttttttttttttttttgcaccagaaccagaagtagtgtaatgattaatatatcccgcctcatacttattttaaagttgaaattttaggtttttaattcaaagaccccattgtattcttatcctataaaatgaatgggctctgtgcattaaaatttttaccaaatagatatggttttatgaaatgacaaaatgactaaaggatggctcaaaatctctaatggacttttaaaaatttgtgaaatatcagaaatcttgggaatgtatgactttggagaaggataatgcatagtagtgatcagtatcatttattatcagcagaatggcagaacccaataaataattcactttcttaaggacctactgatgcctagtgaatccctgtgtcatcatcagcattatttaaaagatggcacagaaggaaacatctgggagccaattcatcatttaattaaattatcctgtaatgaaatcttctgtaatgagattaattttaattattaatcaggagttgacatgggcacaaggcatcattaataataaatgaaaggctttgtctgttccatttctaagaaaggacctagtttactgcaacggtgctttttatacagccatgctgagtcctcacaatgtggccatccaagaagatggcttgatttttatttcagaacctagagagaggataattgaccaataccttcagatttggattccaaattgttgaagcaatttttgattttaaaaatatttcaaggatgtcaagaatagaaaatgctttttcagagtaatttgggggtaaattcctaattcagggacaaaaatgtcgccttttagaggccaaaaataggtaatgcagtcacattttggtatcagctataggtatgttattgtgctcttgtgtggatggtctgtcagttcctgacctcaccccagatctgccccagtggggtcactgcctccgaccagggttatatgggtaataaggagacggcaaatcagtggacttacttataattcagtgggaactcaacagtttcccggaagtactagctctctgcgtggtcaccaaacagaagccttcctggagactctggccatgtcgcccaattcttgtggcttctcctttcccttagttgcctgaatggaagatggccataaagaggaggcttgagtcttgttctttgaagccaaggaaatcagggttagggccaaagtaacaggaaagcagacagagggtctttaagaacaaaacaaaacataacctgtttgtttcatcacccttaattaaagttcttctttggatttctaattttatctgaactaaactctgaaatctttaacaaggcttctcccactccttcagctttatttcagaacacccctgctgtgcctccttttcccagtttctgtcacccctgtgccttctcctcggcctgcatattcattgtgctatactctctgtgatattattttggcaattggaaagtgccaagacttcttccactttgaggctttctttttttttgagaccagtcttgctctgtcgccagtgttgccaggctggagtgcagtggctttatctcagctaactgctacctccgcctcccgggttcaagctattcccctgcctcagcctcctgagtagctgggactacaggcatgtgccaccacgcccagctaaatttttttttttttttttttttttttgtattttagcagagacggggtttcaccatgttggccaggatggtctcaatctcctgacctcgtgatccgcccgcgttggcctcgcagagtgctgggattacaggcatgaaccaccgcgcccagcctgaggctttcttatttgcagttgtttagtcagttcagtttctgctgctttctcttggatcttttccagatgtgctcctaggcatcctttaggccctagcttagatgtcacttccactgagaagccttcccagattcccagtctaatttcttccagtttgttatattctctcatgacatccattgattctttcaatattgtgctaaattattttagacctaccatgtgccaaggcttttgctttccttcctataacttatcaaaatatataattatatagtcatcctctgtgattattgatttatctctcccactagactgtaagccttgagaaggcaaggatcatgctgaaaccttggcaccatgcctggtacatagtattccttaatgaatacttgataagtgaatgaaaacaacagagatgagaacgtaacaatttaatctgtcagacacttgaaggagcccccttaagaggcaatgcattttccatgcatggaaatgtttaaaaagagactagacaactctgtgttagatttgcctccagagagaggactgacacatgagaaaggaaattgaaatagatgaccataacagtttactctaattctgtgtggtggtggttccaacagctaggaaataatcaatcaatagttgcctattaattgactaagacattatatctacttggtgacagtctctcaatatttgctttcttgaagaaattgaatattttttctaatttattctttaagcatttattcagagtactgtgaaaactgagacaactggttcaatattttagccacagcaatgtctaacaccaaagaatccctgggattctttttttccttttattttataccaattatgttagcaagaacacttaatatattataatagtgatgaatgtatagaaaagggaaaataagtaacatgatcattgtagtgagtaatatctgattaggttgtactgtaaattttgaatgttactactatgtaaagacaaactttttttcagatagctaagctaatcttgccttctgaaaaaaggtttttttagggtaaggaactttactggtgggctctatgtatactaaggaaatctttcttttaattggtaaaattccactgattggtaaaattccactgctctcagctatgtttcaatcttgaccacttagtgtaattaaaaagacagagcagaacaacattgagcctccttatagttctccagcccagtttgccattcagtccgtgaaaatgagtcagtcttggggaggatatttcccacatggcttaataactttaaacttacaagacaacagaaattcgaattagcagatgcatatgctaaaagaaaaacatcttttttaaaaaatccgattttaaagactaaattgtctgtgatgtgcctcaaaggcacatagggacagaattcgtgtaactcctcacattcttgtgcctgagagaagagagtcaaaccactagtgttttggaaccagagatttaaaacagcctagtccagaatggaacttttctttcaatgtgatttgttcatttgcaggttagtggtaatagtaagactgtcacagtaggatttttttgttgttgttcttgagggatatctggaaattgtattagtaattgtgattagcaggctctacctgaatgtattttcctgctaccatgtgtctagttggcatgtgtcaccagggctgaacattttagcacaaactcgaagttgtattgtgtttcagtagttttcctacatgagtctgcatttgccaatctacctatttgatctctcttagcaaggaaaaaaagaaccctagtgacctgcaccaaattctttataaaatagactattgaaaataagcctaatgaaagcttattttattaaggctgtattatgtactctgaagatcttggtaagtattagtataaatattagaaataatacctatataaagaatattttatgatccagttgtctttggttgaaaatttgcttttactgctgaaatttaaaaatcaagccagctacatatagctacaaatagctacatatagctctagctaataaataatactctttagctagttttaggaatgagaagtcatcaaagtgctaattgaccatttgatatagcttttgctatggtacaatgtgtttgttaggtgagagaattcttattccacaaaagaaaggataattatatttagctatggctgatgacctggaagaggcctttttgcatttccttttttcaagatagtttattgatctggatcactaaaagaaaattaaacatctgaaaaacaaaaaactggaagaactgcagtagtggttcagcaatgcacctgtgtatacctagggctttgcttctcctttttggctaattacagaaggactcaacaataagtgctcaagactttgattgctagtttatacatctttatatacactttcattctatctttaaattgtcctaaacataagtgaaaataattagtaacattattcattgggttcatttaatttgttcaacggatatttattgaggatcctactaaatgccaggcactgttcctgatgaacaaatgacagactctgttcttgccctcatgttgcttgcaatcaagttgttaaaagagggataaagcaaataaccatgcaaataagtatacaatccaactgtcttaagtgctgcagagttaggtaagtagttaaatggtttctctgaggaagggattgattgaagactaaaactaataaataggaattaagtaggaagaggttcttggagaggacattctaggtgggggaaataatgtgcacactctgtagcgggagggagcatggtgcattgtgaatggaaccccgaaaacaaagtgaagcatttgggtgcagtaaagctgtgcgggtaagtaggggccaggacatcaagcacttgtaggccacatttagggtcttttttgtctttgtccctagagcaataggaaagctttaacaagttagagagacagtgagtgagcattgcttttagcaaaggtgactttggctgtacttgtagaccataggttagaggcattaataaaggataaaacataatgattgtgatttattataacacaaatggaagaaattaaaattcatgaatccaaaatgatgcttgaggattgggtagggtagaggaaagctctgctttacagaaaaatgccaactattataaatagaaagaatgatggggtgtcaccatttttgcagttcccaataggataactgatcagggtgtcattaacagatgctaaaattgttagaggaatgtttttggggaataatatagtcctgtggtgccaaaatcctgctctaaagactgtttactaataagagaggaaaaaatgtgactttacagtgataatatatcagagtcaccactttaatcaagggattagatttaacttcacaattagtggtacagcctggtatcacagattgtgtgatgtgatagaatatggagtacctaaccttacaaaggaagtgtttctacaaaagaagaaaaaagtcaaacctgaccacaatcaagcctctaaacagaactctgcgtctgtagagaatgtaagaaatggaggatgaattaaattataccataaggtgagacattctataagaatcctagagtggatatttcagacaagattaaagacatgcaacagccaacaaccaaacaaacaattgtattttggttttagaaagctatcaaagaccttcttagtacaattggagatattagaggattttatggtattgttaatttttataggtttgataggagatcatgtatgtttactggtgaaatctgacatatgcaacttatttccaaacgatttaaaagcaatgatacatataaggtacagataagatacatatggaaacatgttaagaactgtggaattttggaggacaatatctaagtgttcattgtactaatctttcaatttttttgcatctatgaaaatttttacaataaaaagttggagagagagagtagatggcaggctgggtagttacttgcttcaccctatgcatctggccgaaaacagtttctggtccttggctaactacagctgttgggtaaatctttcaccaactcagaaagtcaccccaacatctaaaatcccaatctgcgaaattctccaggttctgaatacatgctgtgctgacatcggcagcgtaaatgtgtgttgtgtggtctgagtctcagtttgtggatacctccagcgggaacctggggcttaaagttgaatagtgtctgtagcagagagagtctttgtgcttgatttaaactacacagaatggatggctgtggaacaccagtgaggaggctatgcggtagacctgatagcagaaaatgtgatagcttcataccaggatgctaggatgagagagagaagcacaagatatgagaaatgaataaattttaggtggtaaaaaatgactggacttcatattatattgttaataggggaataagacagagagggatttaatgcatgactcgctggttttttatttgtataaatggaagaatgttggtgtcagacacagaggtcagaagtctgaaagtgggcaagtttgggaagaaagatccaagatttggtattagacatcatgggttttgcaatcaaaatggaaatgtgtcatttgtatatattgggtagttaaacacagcttaaatggaaaaacagaccttcagaaagtactgtagtacattaattttgcacaaagtagcactaatttgatacacatctctaattgctctcacttaaagcagtttcaagacaaataataaactctttttaattgcaacgttgtaaaaaacacttttctatgctgtttattctctaggaaactatgctatataaaaatattatataagctattccttttccagaatttgttcagatatccacaaactgagactcagaccacacacatttacgctgccgatgtcagcacagcatgtattcagaacctggagaatttcgcagattggggttttagatgttggggtgactttctgagttggtgaaagatttacccaacagctgtagttagccaaggaccagaaactctgttttcggccagatgcatagggtgaagcaagtaactacccagcctgccatctactctctctctccaactttttattgtaaaaagaacattcattctttgtaggagttagaaaaagctaaaaacttactttagagcttactttgtgggcttaccatctagtcattagcttaaaaattaccaaaatatttctaccgcaagtaatagatacccattttagaaacattgaaaatttttaatgagtaaatagaaaaaaaggtcactcaatttaatgagtaaatagaaaaaaaggtcactacatcaattggcatttgatgtagatagtttgtactcattttaaacttaaaatctgtttgtgccttacatgtagtgaatgaaataattactttttgtactatgtgtattttactatagttcttcaatgagaggtaactagatggtttatgtcacttcacttgaatgtgtatttatattccaggatggctctgtcaggaagttttctacttatttatagtgataacaattcatacaaattaagccttttatttttacctctaggagttagatatcataatcattcagcctctattaaatctatagtcacagaaaaatgatataaaaccatgaatcctgctacaacactttggatgtgttgtacttttacccactgtcacaaataatttaaaataatttctaaggaaacatcatggcagccccagttggtggtgcttagtgtttaactacagcatgatgactacagaagaggtaacaattttagttcttgctaaaactaaacaatattacatggatgcacatacacataatacaattcagaaaattatcaccaattgcttcttttttttttttgtcttctcagaaatgggcagatggattatgtactaaaaatataaacccttaagaatcaggtttatcctgtaaagaaggtggtgtctctgggcatcacttggctcttttgtaaattgattgtcacttcatttttatcgttatcagtaaaccttattaggtgctgaaatcagtgctcggggtgcagggtcaggtaaggaaagcatgtgctgtgtatcaggagacctggccacaaacttgtcatatgtctctacataagttattattgatgaaatcattgtttggtgagagtttggatagcctgtatagggaactagctaagtagttgggaaaaggaactgaagcaggacaaggtaataaagtgcatcaagatagaccccaggcccatttggttagcatctctgaaggagacaagttcaaataccaagctcaaagagctggtagaatgagtggagctgtatattcaaagtacctaagcagttgctatgaataccagtgtgaggttcactgtttgcctttaaagaccagcaagtgtgtaatggttgcagttaggtcagactgtatggatagaggtagtacagagccattagtggaagaatattaaatttgtttgtttttagaattggggaaatatgataacatgtgtctgtaaagcagaggttgtccctggagaggagaaggaaatatgcaagagaaatggggggaataagttatacttgcttattggaaaaattaggctctgaaaggatgaccatggattcttggctgcctaatgaaacacgacagccagaaagggcctgtggtaagtggtcagggcagaatgctcaatagaattgtgatttttgaggtgataagaagagaaaacattgtatttagagagggactattaagagttctaacttggttgaactcttggttgattaataacaagttaggacaagtccaggtaggtgtttataggtagccaaagtggataaaaactgggaggacgctgactttgaggcagcgaaggactgtgcttacaaggcagaaatgcttagtaacatgatgtcaaatcatcagggacggtggccaaggatggattacagaggtgcataaagtagttgctaaaaacaacaagtaggtttggaagagtgctcctgggcttgatagaatttagcaaccagtaggggtagaggttagtactaatataagtggtgaaaagacttaaaagagaaggggaagttacgtcacactatcagaagtaatcatatccattacaggggttaaaacgaaattgtctctaatgttaagactatatataggcttaatgtgttaaaacatgggcaaaagtcattccatgctttttctgtgtactagagggactgtaggtatagacacagaaaaaccatttaaaagtgaagcaacggatggtataatcctgtgtcctgttctttgccaaattgattttggactatccctctgaatgcaagaatggttcttctgctgcctttgcctcttttcacatctacataaagtagtgcttacatttgtttggagtcaaaaaataataaataaatgaacaaaatatatggcatgtcagatgatgataagtgctacaagaaagacgcagctgaaaaggaggtgagagagaattaaattagggtaggtgagccccattgataaggtggtgtttatacagagacttcatagacatgagaaaaggaagtgtatgtgtatctgggaagtgagcattccagggaaggatgtgcactggccccaaggcagaactgtgcttgagaacagaaaagaagccaagaggcggcagaggagggaaagtgaggagagggactcgaagctgaggtcagagggagtggtgaagtttttgatatcaagccctgtgggccaataaagaccttgccttttgctgtgagtcatatggaaagccactggaggataagatcagaagagtggactgctgatctaacttttcgaaagagtccctctggctgctgtgtgaagaaaggaatcatatccaggctgctcagcctgtgccactgagcagcctgaaattagaaggggtgggaaggagcagttaaagtatggatgtattctgaagatttagccaacacggcttgctaatggactggattttaaatagaagttatttatcatggagcgcaaaacttagaaaatgctaaggtctagcttctatgtttatacttgctatggcatagaccctggacatgaaccctgggtttgaagacccagaacatgcattttaagagaagatcttccaaccatccaaggaagattctgcaaattgaggaactgagtaaacacagcaaacagttgcctaggctacctgagggaatagttcacaggttaaagtagaaagaatagttgctttgatcaaaatgtggcatgagaataaatcctggcttttccacttacctttaaaatttaaattaccatataggttaaattcattcacctgtccatcaaatcatttatccattccactgacatttagtggatacctaccatgttccaaacactttgtaggtacgcaggaataaagcatgaacaaaacagatgaaaataatctgtgaactattctgagagatgtggataaaacattaacagtggagccctttatgaaatccactataacattaaattttaaattccagctggatttagctttatggacttccaaataagaatagcctaataaattctagtttaaaggtgtaacattgaacagaatttagaaaattcttttctaatgttgaaacaaaggacttttgcaatagttgcattaaaaaaaaaacattgactcacaaatgaatagctagtggagggcaggatttctagataagcaggacaaacaatctccactgtttctcaccaactatggagctaatggggacggtggctttaagccaactaccacttaaggggaaaaaaaaacttaccattcaacaagtgaaatagttagtgtggaatggatagcatctttgaaatttgattttcagcagtctccccaagtgactgaatacattttttcaaactatttacttttgtatcatgtcttctcatggtcaaattcaggatgaattttatgacaggatttggtctaatgctgctgaattgtctcataaatatcttgacaagtcatttgaaacatgctgggcctctaaagaggctgactgacatgaaagcactaacttggaatcatcagggcttaagggtaacttatggaccctaaggcagagccccaaatcaagatcataaaattacagacagtgagttgaaattgagaccagtctagattggtaccagcttctttgggtttcttcggtagcagggtggagtcaggtggctggtgccatggaagcattttggatctggtacctactggctacaattcattgttagattcaaggatgtgtccaggctttgggaagcccttctggggactggaaagggagggtccagtacccagaagggcttcccaaagcctgggcacatattcagagtccagccaagtgggctgaatttcaggacaattttctgggtccatccaagggaaggaagcacagattcagatcggaaggtgtagcaagggacaggaaagcctgttttatagtgagctctgagctttggtcattcattaccaggattacctgataacatggtatattgctgccatccagtttaaggtacacactgccatatatatatatatatatatatatatatataattctttatatttctctgggcttaactgaacttagcttaaggcacatgaatttatcattcatacaataattatttagcatttttatatctgggcctggctaggattaacaggtattgacaaagaggatttgagatttctgaaatctttatttagcataacctaaatcaacaactaggattgatagaaattaaaaagcactgatttattttaaaagtgaaaatttctttatattttgatgcaatattttaaaaatatggtacagatttgattcctaggtatttactaatagttctgcattttgaacaccattatctatattaggcatattgaccttcatgatttttgtacaattaatttttgcttaatttattttctaatttatagagacgtgaacagttgccataaccatgaacatttacagatcaatggctattggagttatttaatttatacatggctcagaaggtggcaaccatttctttcaaatgttatatggacagttctagaatgtatgcagatatcctggggaaatggaggggtgggtttctttacagaaaagaatgacctgagatcaacctaacaaaagcttggttgtgaagaaatctatcagaacaaaattgtacatatgaaaagatataattcttgcatgtgactcctcaactgtatttaccaggatgaccctgtgacctttcttttactttagattgattgttgatttatttcttactcatttgttcacacttttactctgtccccaccctgtgccatccttgagctcaatgctttctcttgctccactttggcttggcacagaccttgatctgatgcttgaactcagcttcacctgctatcctggatcactgttgttgtttttcattcctcggtgcttcccgagttccctagcagatagcctccccctagctcaacaataccaccaccaccaccagcacccccgccaccaccccccccacccaccccaccacccttgaccctctccatacacactctggtagactgtttttcggcgtccttaccttgataagcttaacaaagactaataataacaaataacacaccacattactatttacaaagtgtttacatattcattttcctgtttgagatagtggttcctgtttcaaaatagaaaaggaagagtgagatatgggttaaaggaggactatgtttttcataaatatttacacatatttacatatgtaaaagtccacataagtgtttataaatatgtttcagtgataggatggaaggtcaaatatatatggactcttatgatatatacaaagttttatttgtttatcagaaaaatactgctctgcaaatcttctaatttgatagccatttatcaataaattgtattcattattgaggaaatcattactttggtgatgtttgtcatatctgatttaaaagcaacctcttactcttgagaagcgagaacaggagagtgttcattcagtatgagtgaagatggagacagcaacccagagcatttataggagaaaggctggacatgttttaaacactggataaatgcaaggcacggttatatgccaagtcgcattggactggaagagatcgggagacccaagcctttgtctacatgacttgtctgacttatctcacatcttccatttctacatttaaaataggtgaactagatgtaggaccctgttatttcaaatatatgtgacaagagatatctatgcccctttccttttgaaaatatttctggtgtctcttgatatttgaaaaataaaattttacgaatttaagagtccaaaactaaatttcactgttatgagaattttgcttttgcttgtcaccataataacttgttatttattttaatcttatctggttggtcaaaacttcaggtcagctttacgatatatttgatatggtccatttatacttggaactgatccattgtaggtaataaaccaattaaggcagaaaactacccttagacaaagttggtatttttaaatgagctggcatttgaaatgattattttgatgttaatattatatatattttatacattatgcatttagagattatatttatgaaacatttcaatataacattgcatccaaatttgcatatagtatacataacccaaattatggattttgatacatattcttttaatcataccaaagttgcatcttttcatttactcattccatcttcagttgtttataacaatgtgaatggtatgaaattatgtgtttatataataattactccatatatcaatatcatcagaactgagaaacttattagcttatcttctagaaatgccattaatgccttgagattttcttctctctacttaatagggttaaatagatgccttccattttagaaaggaacagtcttattatttcttatttctgagaaaggactagatactccttgagatgtctgtaataaggtaaaattgttaactttcaacatgctgttttcctaactttgtgtatgtatgggacccatgatcttatctagccttttgaaatgaatcactggaattaagaaatttaaaagaaaaaaaatactgtgtaaaactatgctatgaaagaaaaattattaaatatgctcttttcatatagtttgctaattaaatactgcagctgttatgtggagggaaagttgcagatatgatgagatattgagtttgtcatttctgaagagttacatttggctaatctgtcttaacaaactagaattttccatacttttatgaggagtatgcgtagtaagtatgatgtatatatctttgcatagacatatgtacacaaacaagatttactaaaatattttaaattaaaaatgtaaatctaagacctgcatcctcaacctttaatttccaaagaaatataaattttgctgattatcaatctcattcaccttttctttgtaaataaaccagaaaacagcatatttagagagtacattcaacagcattactatttcatcacctgtttcagtaataaagtgacagaatgcacctttaaaataatactttggttgtatcttaaaaattaaaattgagagtaatgataattaaattgttaatctgtctgttaacttagtcaactataagaaaactgattttttagaaaggggtaaagtaataaaaatagtctattcattagattctcccttaattttaaaggaaaagtctcttataatacattttgaggcatattttcctattttcttctgcacactgctatgcagtgcttaagagaaggtaaggacatcttttagagaaactgagtatttctagttcagagttatttgaatgctggttacttggagtggaagacttgatcgtgggcagactagcaattaaagatcatgaaagtctacactccaggaggcgatagacacttgacttgctcactcctttctcagtcaaatgccctccctatatgccatctgtgggctgtgtcaggcttagggatcctgaaggaaaactacttttggagaaataaatgactgcttgatatgattgaagtgattggtttatacgttagtctttttgagttatgtcatctgtatgttccagaagtattaaagtttgctttccttcttttaaattctagatctaaataaatttaattttggtcagatttggggctaaaatttgatatagtcattcagttttttttccccaagggataattacataatctttcttgacgtggacttagaatgtacagtttcacaggcttgaaagactagtagtcagacgaagtcgtattctgatgaacaaaccttcttaagcatgttctgcaatgtccagatagaattaataccaatccaaattcatttttctcagaaagtttattatctttaaaaatcttatcattagcaaccttgggatctcaaaattatagtcttagaacattctacaagtcttttatttgtgcagttccttaattactactatttctacaaaataactgctaatatttattgagtgcctcctgtgtcacttcatactaagtcctcctcgtaatttatttccttctgtcttcctatcactttcatctggcaggtatgctcattttcctgttctcgggcaataatttgccccaggtggcttacctggtgagtagcagaatgaggatttcatgtcctgttgcctggctgtaggctttgagtcttaaccacacaccgtaaggcacccagagtgtgaactttccatatgatgcagaccagctttctgtttctgcaattctgcattttatggaaatggaagcattgttttaaggatgatgtgtgaccaaattacattttaaaaatctttggtaatactgacattgtaaagatgaagatccagtccctgctctgtggagctccaggtttctggagagagagtttatcagataattgcgttgtgttatttcaacggtcaaaaaagaacatggcaattctgtcatggggagggctttggagaagaccagatgcctgagatcaagggagagcaaaatacttcatttttgtgtaacattctcccgtgcaactttgttccacatttcatgatatccttttcatatctaaattcacatggacttctgattgtgctgtgtattccaaaccatgcatttccccacagtttcattgtgtttgctttcatatgcttttccatttctctttactactatgtaaaacatgtattttactttattaggttcttgaggaagggtaattatcctttttaaatttttttttcaaaatatataactgcatttaactcttctttttctgacttctgagatttaaaatgtgttaattatacacttaaaatggagatttacagtggtaatgtacatttaaaatggtgattattcatgcctccctgtgtcctccccttttgttttgtagctgtacttaataggaaatacggaaaagggcaagaggattgcccagatttaacacagtgtctagtaacaattattgctaacccctattatgcattattctatgccaaacactgttgccagcatttttcatggattattttatttactcactttaactttatgcatagataactgttgttatgcctattttagagatgataaaaccaaggcacagagtggttaaataacttgtcccaaaatcatgtacctagttagtggcagagtgaaaacatgaactgaagaagtctgattctagatactgcatgtttcaaacttaattggggcttctcagcttggaggcaaatctgtaatttatgaaccggtcattcataaatattcagtaagcatttcctggctcacattagagaattatttttccgtatgatatggtggtgtttaaatgttataaaggggagcatattggataggtcaaagagtaggtcagaagttaggtgtacgcttattgaaatctgggttctgccataattagttgtgtgactttttaaaaatcagttccttccatccttcaagctctcagcttcttcgtttgggtgatgattaagtatcactccttcaacagtgagtaatgcaaagttttctacccattcttgcttaaacataaattttgaagccttcagacccatgtggtgggcactgttccatctccattacaaatcttcctcctcatctcttcaagtagtttttttttttttttttttttttttttttggagacagagtctcgctctgttgcccaggctggagtgcagtggtgcagtctcagctcactgcaacctccacctcccgggttcaagcagtcctcttgcttcagcctcctgagtagctggcatgcgccaccatgcccggctaatttttttgtattgttagcagagacggggtttcaccatatcggccaggctggtctcaaactcctaaccttgtgaatcacctgcctcggcctcccaaagtgctgggattacaggcatgagccaccgtacccagcctcaagtttttaatgttggatactcctttggtgatctcatccagtctctgatctttaaataccattttttatagggaagattcacacttttatctccaacctagacctcttccctgatctgtagacatctaatccattggcaatcctgttggctctacccttaaaatataaccagaatttaataaatttctacatctttattgctaccaacctagctcagaggttcatctccatctcggtgattgcagtagccttctaacttgtctccttatggtatattctctgcacaacacccaaagtaagccattaaaagattaagtcagagcctgttgttcctctgctcaaacctggcttccaatctcactcaaagtcacaatctttacagtggcctttgaggctctacacaaacaggcccttagttgcacctttgacattgtctgttatctgtctcctcctcagttaattcaccctagccaaaatagcaggatgtggtctttgaatgtgccagacgtatgcacctgcctcagggcttttgcacttactttcctctatgtctaaaacgttcatctcttaagtgtttgtataactcactccctcagccccttcgggtgttttccaaaatatcttttgaataaagctttccctgactacccattttataatagcattcattcctcaactgctggacactccttacttgctttactttgcccaatagtaatgaacattctctaggtagcataataaattttagtttttttgttttgttactcttttctgtctccatcaattagtatataagtgttatgagggtatagattttgtagatttttatttcagtgttgtatacttaaccacctaggacagtccttgacacatattatgcacttaataaacatttgttgaattcatgtatgaataaatgaatgaaagaatggcatttgagttttattaggaacttttatcttcttttgaaaatgatggcaagttagttttggtctcttattctgatagctggggcctatgagtgaatgtatgctgaaacaaaatgcctcatgatccaggccagaaatgtaagtgtatgaaatgctttgagtgcaaataatataggaatgtgggggctgtaataaaccacagggttaacccctaatcagtgggctacatctcattgctatcataggcaaacagtgccttgccatttgacttagaagaagcagctgcaaatccagatttttatgagagctccagcaattcataaatatcgatttccaattcaaaattttgtgtgggtaaaataaaacatcttctagcaagattcaacttgtggactgccaatttgagagctctagtaaaagaagtataaacttcagacatctatctattttagcaaactttacctggtttaaaatgtcgtcagaaaagtttgtaaaataacttgagtagaaaatgtaggacatgaaataccaatcaaatcaagaatgtttgatgaagaataattcctagaatctttttgcagtgtttctggctccctttgccatttctcttgtttgctcttcattctgataagggcctgatctttgatgttgacagtctaattgaaccaaaaaatgaacaaataaaatttattgagttcccattatgtgccatgcagtgttctaggtgccagggttacaagaatgaagacaaaagtacaccttgatatgaaacttccatcctacttggaggggagagaaaggtgacagataatgttcaaattaactcgtgaaaaagataattttacatagacctaagtgcaataagtacataaacaaaatgttctgatagagaatgctggggttaggtgttggctagtttatactaagtggttgatgagggtatgtttgaaatggggacttttgagcacagaccagttggcaagaaaggcaaccgttcaaatatgtgggcagagcttctagacaatggggatatgagatgaagaaaccataaagctgaaaggaacttattgtgcatggagaacagcaaactggacagaggggctggagtgcagtgagggagagagctgaggtgggtgaagttagggaagttggcccctgtggctctattctttgtcgtttgctctctgtatctttttcgtacttcagtttgctacatcttcacatttgctgatcttttccacttcagtgtcaaatgtgctattaatccagtccaaagaatttatttttattttaaatgttctatattttagctttagaaattgcatttcattccatttctatacatttcatttctttttttgttatattcatgtcttcactagattcttgaatatatttatgataatatcaattatcaattcatatcaatttcttcagattatattatctctgttatttctgggcctatttctaatgactgatttttcttctgcttacattttctttgcatgacaagtaacattttaggagatgctggatatttggctgttgactgtctgggttttattgtcttttttatggagtgttaaacctgtttgagaaggctgttaagtaacttccgaatcagcttaaattttagaggcttgtttttaaatggtattatagtgaggctgctgaagcccttaatctagtgttagttttgtcttaccattaaggtgtgaactttcaggatctcagttgaatgtgtccggtatttagtgaggcctctgtactctggctggataaaatacaaatgtcttctagctccctgtaaactgcatattgttaagattacagcttattaattggccctttcttttgcacagtcttgttgtgtttcaacctatgtatatgcagttcagtctttagcaactatatagtgagtccccatgcagatttctggagctctctgtctacttagctgtgttatccccagtaccctgccctgcagacaccagacaccttaaccttccagaactctatctgactgcttaactgaggataccccctcccgcatcacagtccagaaagctactgtagacagacagttgtgataatagtgctgaccttctttgtttcccttctttcctggattacagtcctccactgcctttgtctaacatctaaaatcaaccatttcacttatttctctggatttctaaatgtttcattacaggaagggtgttgggtacaagttctttaacatggtcatgaatgatgttgagaaagattcttttcccataacattttattatggaaattttcaaatgtgtacagaggtagagaaaggaacctaatgaacccttatgcccaccatccatctttaacaattagctacatggtgccaaatttgttcacctataccttcttcccagcctcttacccatctagatcataagaaagaatttagaagaatttaaaatggcaaaacttcatgctgtgttaaagaaaaaaaaaaaaacaggagaagatagtatttattgaatctcttctttatttatttggtacttattcttgaactatagatctcaatctgttttattatcacagaaaccttacaacttaatctttttgaatgctgccaaatctattttaaataaagctttgatttgcatttttatttttgttgcccaaagctttacaaatagtctgatagtttcaacagtttgtataccttatgcatcatcttgtgtatacaatgtgattcatatcacatacaatgtgatttggttgcaactgataaaacacagtaacgtcacaattcattggctaccatagatttgaccagtaatatcttgttcaaaaggaagtttgtgttgactgttttttgttatgaggaggagcttaaaaggtaaacaatgaaacaacatggaaaatgttttaaaacaatataatacttaatattaagtgaaagaaactacacaacactttcatctacatttcataaatggttaagaatgtcatatacgtacatataaaattggtataacaggtaatttgaatcttaaaagaaatctagaaaaaaattaagttagtgatttttctaacagatatgtgagaatatattttttcttttaaaaatttatttgacactatttcatcagtaaatacaagttagaaagcattaaaaagaaaataattggaatctattgttaatggacatatccagctgacttaacttactaatgcatgatgataatgaggccagaattgtagctggattgaaaggagaatgacagaaacacagtcaaagccaagcttaataaaaggaagaatcatgcaagacagaatgaaagttggaaaatcagtcgcctgtagcaaaaccaacaaagttaataccactaacaaagcttcacatgtcttagctcaaaatatcatcagtgacaattgtgaagagttgatcatcttgtcccaacactaatgatatttcaggcatgtatctacaagttcaaatgatagtaagttcatagcttattatacttgaaaacaagcatatattacaataaaatatcactgtgggtagtaatttctttactttggaataaatttcacatgtaaaaaccatgtctgtaagttgtgctgagaatgtttattctcccacaatgaagataactttcctgaacaatgtatcatgatagttattgcattatcctctatgtctacttgacccataagtttctcaattatctattattcaagattctatttttaacatcttgccagagaacagcattggcatgtgagtatgcctgtgcttccatgctgtgtatgtgtatgtgtgttataaaatgatggttcgttagttctgttaggtgacaaatgttgagatgagtgaagactgtccacttttccttccaaattttgcttctaggtaagaatgaaagaaatgtcaaaccaaattctggcttacatatagatattttttgaacatttcttggcaagcaaacacacataaaaagtaactctatatttgttctgtaggatcaaggacactttagctcttatgtccttttagatgttttgaccattacctggtatgaaaactccagttgagataaacgtgaaaattccaagaccggattctctcaccttatgtctagcatcaggcaattagaatcttctgtagttcatgactaggcataggaatacttaaaaagacttagccaaacacatcctcttgaaagtgaaagctgcaggcttatctaatttttacacttgatttacgtaagggtggagagtattgctaaaatattttagtgatctacttatcttgagtagttttaacttctattaaaatgagatgtgcgagttcatttctgccattcacagtgctactcaagaggctactgttttcgtcagtgaaaacccatttctgacattaaatattctaattttcaaaaagttgtttgttgatggaaattcagataaccagaagacttttagtactcatgtgagggaaggtgggctttatgatgagaatgctacctttctgttgtcacatttttgaatagaatgctcatagcacctacagtgtagcttattctaagtaaaccatgcataattactggatgtgctatagtatttttagaaaattgcagacataataactgcattaatgtttgtggtattaagaacaaggttatatatgctctagaaatccttatttacagcttctgtgacaaaatgtcactgaaattcttgagtaagtcttatataactatgaattccagagaggtggaagttgttatctttaactaccaggagtgaacatactaccagtaataatagttactgttattattattattattggacatcatggcagtgatggtgacattgttgaaaagtcatagcaataataattgtcctattagtaataatagaggaagaagataaagactagctactgtttcccgaatgtttactctgtgctatacgtttaaggttcacatgtcatttattcaccagaataactcaggtattgttattttatcttaatttttcggatgaagaatttcacacaactggtatgcagcagaaagggaaaacaaattctttgctctctgattctaaatatgtactaatttccattgccgtatattgcttctttttctgtaaaaccttttataagaatttccgtgaaaattttaaaatacatttttgttaggacttctggaacaagaatattttatagagaaagaaaggaagagttctttagtttattaaaaattgtgccagggaaaaagataaaaatgtggaaaactttatttctgtttatgaaggcattcagcttctgtttaaccaggtccattgaaaacagattgaaatgtagtgttttgttgttgttgttgttttttcacatgaaagtttgtgggaaatcttaaaaacagagtctttctatacaaccttgattttccccagaacttctcatgaagactgctgccacagcttttagacagtagaataataaatctaccttttgggtacatagatatcctagtaaagattcagataaatggttttgaaaaatagtttctttttcctttctttttttctaacttttattttaagttcaggggtacaagtgcagggtttgttacataggtaaacttgtgtcatggaggtttgttgtacagattatttcatcacccatctcttaagcctagtacccattagttatttttcctgatcctctccctcctgccaccctccacccttccaagaggccccagtgcctgtcgttccccactatgtgtttgtgcattctcttccacccagcaatcccattactggatgtatacccaaagaaatataaatcattctgttataaaaacacatgaacaggtagtttattgcagcactattcacaatagcaaagacatggaattagcctaaatgcccatcaataatagactggatcaagaaaatgtggtacctatacaccatagacaactatgcagtcatgaaaaagaacaagataatgtcctttacagggacatggatggagctagaggccactatccttagaaaaatagttctctaatgattgcagtttcctggggatgaaccatactcttaagcttacttgggatggcttgtcctcattgattgctatataagtaccttctataagatctctaaagagatttgtattgttatttatattcaaagattaagcttcttgtgttgaaaaatcatttttatgttatgtatgtcaagaattcaggatcttgaatgtaaaaatcaataaaaataagagggcatgcttttattagaaatataattctcaaaatttcaaaattgttgtattacatagttgcatattgttgtagtcatctcaggctgccgttacaaaataccatagactgggtagcttaggcaatacaaatgcatttctcacaggtctggagattgggaagctcaagatcaaggtgccagcatgatcaatttctggtgagggctttcttcctgtcttgggggttaggggtggggagagagagagaaagagagaaagagagaaagagagagagagagagagagagaaaagagtgtgctcctgcttgctatctggtgcctcttgttataaaggcattaatcccatcgtgatgaccctgctcctcatgacgtcatataagcctaattatctatcaaaggcccatctccaaataatctcacattggaagttagggcttcaacatgtgaactttggggcaatgcagacattcagcccataacgaacatcatcagtttagtatcaccaacattaaagtcaagagttatactacttatttatagtttttcactcaaatggagtaacccatgtgcattattaaaattggtgtattttacttatatgaatacatattttgatgtttctgatgatgatgtagtcatgttagggaacttcgtgcttgactagaattccatggtacttttcctaaatatttttgttttatttctgaggttattatttattatttataactattgttatgaaagttatgcagaagatagaagttgaatgctgctgaagtgatcgtagtgtctactcagttacagatttagaaatgcgagccattattatgaagcaagccttataataagatataaggaccaaagagtatagtgaatgtgaaagagttatgagcataagattgctaaagattagtttactatctattagcatttgaagtgtcaaagcattattcagtgtgtgtgtgtgtgtgtgtgtgtgtgtgtgtgtgtgtgtgtgtgtatatatatattttatttttattttttttgagacggattctcactctgttgcccaggctggaatgcaatggcatgatctcggctcactgcaccctgtgcctcccaggttcaagtgattctttttggctaatctgagtctttttgaactgagattgtcctattttaagagtttattttccattataaaagagcagaaaaggccaggcgcggtggctcacgcctgtaatcccagcactttgggaggccgaggcgggcggatcacgaggtcaggagatcgagaccatcctggctaaaacagtgaaaccccgtctctactaaaaatacaaaaaattagccgggcttcgtggcgggcgcctgtagtcccagctacttgggaggctgaggcaggagaatggcgtgaacccgggaggcggagcttgcagtgagccgagatcccgccactgcactccagcctgggcgacagagcgagactccgtctcaaaaaaaaaaaaaaaaaaaaaaaagagcagaaaaaactaactagtctctttatttatgcataaactctaccagttttatttcctagcaaagaaaaggggggacctttgtattattctcacaaaatgtattttgcagaaatatctgaatgttgttgaagtagcaaaatgaactgtagagaggtgaattgttttgatctaattaaattatggtacctaatctaattgtaagataatttttgaactgaagaaattattcagaaaaattccccaaatatccttccattctcacactatacatttcagaatttcacataaatccaaacacttccatttccaggtcaggtcaaaaaatctaaactgtttggtttgtagcagttttcacagacacaggagcccattatccagaaacagctgtcttactaatacttatttctcttaggaggcactccacacaagcagggactcgctggtgttgtgtttgttctgtattaatggttaagggaaggtaaaggggtctttctgatagtttttcctgtggcacagattttgcgctgtggtaatgcttgttgtcattttgggaaaaatagtttttttatatataatacttatgtaatcattttgatacagttctataaaattatatataatatgaaatatatatttgagaaaaataattatctatattatctatatctgtttaggccctgtttatctaaagtattgctaagtcttgctacggtataatattttcctttatggtttgaattaaagcaaatgttaaaggaaaacaaaccctgaagcgaacctcccgatagcttcatagctgctgtttacttactgttaattttattgaagtttatgcttcaacagagcaaaacacagtggtctgaaactagtttaatagaaacccaagtttttttagtgagccctctggacagagctttgtctttaaggtaggggtaatctagtgtattggagggtcctggacttgtatcagaggacttgagtttgaatcttgactgttgagtatcattgttgtgaccttgaggaagttgctaaatatttgaattttcaattattttcctcagtgaaagtgagacaagaatgatctcacaggctcaaatgagaaaattaataagttaattttaaaaactccctttttgttggaaatgcatctataaagtcatacttctagatagaattcacagtgaaaaggaatcatcgaatgtagttgggattttcagatattctaggttttacccatttaaagcaccaaacatttttttctagttgaactattttgattgagcatttttctaaacattattttacatgtatctgctttgtaaaatgcacgggtattattgccttacatttgtatattcattcattaagtctttaacaaatatttgttgagtgctattctgctccaggcactgtgctaagccttgtacataaactgatggaaaaatggacatacagagtgtatgaactagtaggaagacacgcactcaagaggtaaaacaaacacacataaatgatacacacattgtgataactgctaagaagaaaaacaagagggcactatgagaagaaacagaggggaaaaactactgtaggttgagtggtcaggaaagctctctctgagaaagtgaaattgaagctgagatctgaaggatgagagccagccgccttacagaatgtgggggagaggattccaggtactggaaacgaggaaaagaggcctcgtaagaaaaaaaaggccctttttgttttcaagaaactgacagaaattcagtgtgactagaacacaggaaacatggagaagactggtctgacaaaagatacagaatcctgtatagtttataaaacatatttatagcttaaaaccagttgagatgcagaagactttttttgtttccatgtatagacactgagggttaagggggctgacttgcccaaggtcaccctgctgggaggggaggatgaaagctccagcctcctttgacccctagtcctaggctctttgtgctgtgaaaatttcctagctgaacagtttcatacttttctgatgtctgaggccattattatgtaatcagtcactgaaatgaaaccctaatgggctgttgaggtgtgaaaggcccattgccctgtaagatcttctgaattcttatgtctgaatcatagtttttctgtctgctgttgggttgctctcatttgatttcagcaattcccttatctgtttttgaggagctgcagacatagaaaccaacatgtttagtttattaggcacgtgtaaagtaatagccaatggcttctgtgtgagagcccattggattgttgtaatatttgttgtctcagtaggacaggcagtcatgtttgactattcctaattgtaaaattgattttactttgaaaatatttgccaaaaaataaatcatgtttaaatgagggagatatttacataaagttgttgatgtctgaggagccactcttatcccattctcttaagagtttcaaatcaattgtgaataatcacaggagttagacaaagatgacagtaccaggtttattgttaataaagccagactggacagctgtccatgaacctaaggcctaaatcatgcttccccttctttacccaagctgaacttaacaaatgcaatcagacctctgtctccagaaccagaagacagagaaagaacgctatgtacatctggaaggcaggctgcatctgaagaaggtagcccaggaagggttaatgaaacctgccctgtgaccttttcttctgttactcatcagaaaggaaagaagtaatacctgatactcacaagaaagtttttattttataaaatggaataaaaatatgagaaaagagagaaaatggtttcttctacattaaggtaaaagcaaaccattatgatttaattagacaacatttacaagtaaaggtattatgtcttgtgaacatacatacttagtatcaaataggataatttcagtgttacggcttagtaggctaggagtcagagacgacttttacttactttattatttaggagaagccgtagaagaacagtgagctccagtttcgtcatctgtcataacgagtgctataaatacatgctctgtctgagagaaacagatgctactgtgactatgaaagggtggtaggaaaagagaatgacatctgagtacctactgtatgccaaccaatgtgttagatgcttttcaggatatcttgtgttatcaccataatcaaacaagtgttattttcatttttcaaagaaattgagtgtcagattctacaacaaccattttttgagcatttatgataagccagtctctgtgaatacagtggtgaacagggataccacaagaaagtggcatttcaacacaggtatggagagtgaggggagctgggcacatagagggagggttgcctggtcgtgttcctctctaaccagctttcctctacaccttcctcagatggtcttcctggtgtctatttagtcagaaaccgggatggcattctcgatgctcctctttctcttatcccatacacccataggtacaaaggtcctgaaatagcatagagattgggatgtttatggaatagagagaacatcatttcttgtatgctttgagagttagaattgtgtcttaagtgcatagggaagacacagaagcgctttagactggaatattgtgaacctactcttggaagaaggcagttctccatgggtctctcacatttctgtatgtgttatgagtaatacctgatactccagagttcatccagactagattgggtcactggcctacttatcacaatgggtggatctgaagctgactgttagattgtcaaaaacatctccatgtccattgtcgttgtcacagactcccttttcaaggatgtttgtgaacaactttagaagaaagtcatagtacctccctccatagcaaaagcaggcatgcttactgtccagaatgataataaagataatgtctttctttggaaccaagggcaggcttgtttactgcccattataaaaaatatttgatgtccctacattcagggtcgtttgctgcaatacaatcaattgcatgtacaggtgtcatgtcaccttgagggaactggggatcagagaactgtcacaagaaaatgctgatacctgggcttcctttattggaagtaataagtctcattattgtgagtaataagtctctgaccgagaagtcttgtgtatcctgccagcatctgtgaaattgtggcaggctaacttattagcttgtgaataagataaaactcaaaccgttcgtagttgttggcagttttagggatgaggatggggtcctgatagagacataagtttctggaagagaaagaatgaagacctcctgggccaattgatgagatttgagaggaatccatggacatcattagtgaacatgttgatcaacttgtttggtcagttagggaataaatgaccctccattttattatctgttgatgaggaagaattggagagatgattgtaatccaagtacctggaaataggtttaaagtcagctgtttgaaaggtgccctgcatgttactagccctgttccaggcatggagatgtttttgacaatctaacagtcagcttcagatccacccattgtgacaagtaggccagtgacccaatctagtctggaggaaggttctgaccctctttgtaacaacagttataatttcatgctctggcatacaaggaaggaaatttgtaaccactataggtagaaaccaagcaaatagctataaccttgggtggttcccttagaagatgaaggtgtggggtatgtaatacttgttcagaaagtattaaccctcaaggttcttttagttgcaccattttacagcttatcccctcctgtagactatcacaccaaccttagattcactaggagacttagaatttcttagagtggggccaggctgctataagggagctttggttaccttgggggagatttccttgaaagagaaaagctcccataggaagccatggatgaggtattgactagtctttgggccgttattgtcctagaatgggtttgtaatgctgatgaagattacctattggaaaatgagaaactgacctaatgaaatctagacaaattcttaccgtcacccctgttgcctcgcaaaactctcataattcttttggtgaagcagtgatagaacatgagatgttataataatggggcagtaaatgccctcaattgaaacagactccttaaaaaaaatagctgctgcgcaggtcaagcccaaatcagacaaatggaacaaattctatagccacagccagaaagtggttatggctgctaagtctaggggttcccagaactggaatagatggtgtctgtaatgatcttgctgccaaatatagagcattgcatggaatgaaaatagtagaagtttatttgattgagccctgagccagctgccaatcaaaactgaaagtaaataaatcttgtttactaacatagaactgttctctccctctctgcccctgattccccctcctcggactctacttcagctttagcttctttaaggaggaaagaatggagctgggttctctctgtcctgaaagaggtccacagttcttacatgcctctctccaagtatgctgggaaactctggcgagggcagggacttaaacttttatggctctgtgagatacacattaaggaaatattaactggcccaatttatcatcctgcccagtccgatgaaggaggggatagctgaattcagccaaggtggtttgaacatggtttgcagtgggggaaggaagctagcagaccttacgggtggggcctttgttccaattagtgtgtctttgttgtagcttcccctgctgaattgtagatgactgtactatggatgtttatgaagtccagaggggagtctcctgaccaggaagagttgcaagtacagaagtgcttcttcctttggggccccacaaccctaatgacctctttggagcttcagttctctatgactgatggtattgctgattggagcctcttgcaaaaggaagcagcattcacccttggagttctggactcacagctctgacgttgaaacaggtatattcctttaaagaagggtctcttctagttaaactgaatgcctggcccgtggagaccttgtaactcttttttttttttttttgacggaatcttgctctgtcacccagtctggagtgcagtggcgcgatctaggctcactgcaggctccgcctcccgggttcacgccattctcctgcctcagcctccccagcagctgggactacaggcgcacgctgccacgcctggctattttttttgtatttttagtagagacagggtttcactgtgttagccaggatggtctggatcttctgacctcatgatccgcccgccttggcctcccaaagtgctgggattacaggcgtgacccaccgcgcccggcgagaccttgtaactcttgagcctgatgttcccgctttcgggtccagtcatactcattgaataacaagggaagggcccaacaggcctgggttgtcaaatggaaatggcaaatttaggaatgcagccagcctgaggcaagcagcatcttaacctcacttgagaaagtggcagctctaatctcccactctgctgcctgattcaccaaggttcccctaagtacctgggcctgcctcacttatggatcagctaacctgaaacctaatggtatccagtgggttatgttcagcctcaccatcacctgctcaactagaaatggacattgtttctgtgctcagtgttcacaatcaaggaagtgctcttagccctggccaatactccccttaatgaatcttgctgtgtttttactgtctctgggagtgttgcaagtgttgccaatgacctaggtgtttgggctgccacttgaaaaaatgccaactggaagattataaactcccctctttggggccacaagctgtggaaatggttgggctgtcacagttatttatatagatggtaagggcctattctctgatgaaaagcaatgggaatcaagctgctggttccacttgcaccacccagattgccaccactgctgcctcgcttcatcagggtgttggacatgcgacacacccacagcacagactgggcacaaggtgaaggacttctgatatcgaggtgactggcatcacagacttggggctcctgccaatagttgacctgtttgtctcaatgaaggaagacacattgtatgtacagggagttacttctgctaattcttaacagatttactgcatttgactcctcttgaaactggcggtggtgcctcactgctgttgacacattttcaggttatgagtttgccaggtgcattccagttagtcaaagccagtggtgcaccttttattgtagaagccagggctgatagtcaaagtatttgatagtctttccatgctccctacagtacataggcactttgtattgttgaatgttggaatggcttcctaaaatcaactcaaaaagatttaaaactctacctgcctaatctcctcctggtttggacacgttaataagacagttgggtcattaactgcaactggcccagttagggatcatcctctttttgtcctttcttggttatgatcaggatgaaaataggttatctagaactattttgaaaattcaggatatcatcctgaccatttctagacatgatgaatctttctttctcctaatacctatctcaggctagactgtttggtacatctgctgggtggcagcctggtcaaaagatggaacaggaattcaaatttattctggttcagcctcttgagttttcttattggattgcattatcttaggatattgatcgcttggttgggtaaactgctcaccaagcgcccccaaaccttgtatccttgagtcttcttcctgtattcacgaaacggaggctagctaccatgttagcttgcacatagggtaaaatctcagacctttcataattcttgacatctacttatgtattgaaatagttttagccacttcctgccgaatggattgaagagttaatggtacaaattgggagtttatcagttgtaccaggggattttaatttatggaggtgactgagtgacaacatggagaggccaatgccatcgaaagattatttttattacttacatttcccaagaggagggggggcacttacattaaatgtaagtaattttattacttacatttcccacgatggggcgcatggggaagcactgggtttggtcaggatgcagaaggaggaagggaaagcctgggccatatcctttagtggggtttctgtgggaaagggaagggcagaggaaacagtttaggactggctagtttgagtaatttcagtgggctgtgggttgtaggggtgatacctggttgtctggtacctggccctgggagatttagggaaggggagtattgacttactgatgagaagttgataaaggggatagttgagggtgtggtctctggattggttagctgcatatgaagggcatgatcccagaccagccctttgcactaagaattggctagctctgggagtatagtctcttcccattcagtgaggccacaaattccagagcatcggaatacagaaaataatgaaatagagttgatataactggccttgtgataaatggatgccaaatagacaaacacaatataagaaaacagttttagaggagagaaactgcttaggggattactgtagtaatccaaataggagatgacattggttttaactagagaagtggctgaagagatgaagagaagtgaacagatttgagacatattttgaagcctgcatcaattcaattgatgatgaatttagatatagagtttgtggaaagggaggactcagtgactcctgtttccggctttacctaaatgaaacattttggacggtaaatatagcattggtagagaaataataaagagttcagcactggacatgttcaagttccatatggctgtgagattatttatgtagaggtataagttaggcaggagagtgagagagtttagaactaagaggatgaatctcaggtggtgataaaaatttgggaacctacactatatagacagtagttaaggcatggcactagatgaattatccagtagagtttgaatgactgggggcagatcatgcatttgcccacagccccacctccatttgacctgcttctctcttttaaataaccatcttggcttctgaatgtatgtgagtttgtcagccttaataggcaaagaaggaagacagttaagcaaatggcaaatgaaatgattgcattgatttctacgtggtatttgttatacagtggcatggacatgatttgttaagtgtttaactaaaagtagtcccttaggttttggattttatattctatgtagataacacatcagtagcctggctaaggaagctgtggtggctgtttagttttgatttcatgtggtctttttcaaagtagcaatttaggggcttattgaacatacagaaattgtacattgtttttcttcgttctctaatgcttgccagtagttatcagaattacatgactatgcttttgtttttttctttgttctcccatgttggctctgttttatctcttaatgtcaaatgtcatttcttggaatcattcaggaagttcttttagttagtttgccagtaatgaaaagtggcaagaaatgctgtaaaagaacctggaggtatttcacagctttggagatgaagggtgcttgatagattactagacaagtagtcttactaaactgctcaccaagtgcccccataacctggatccttgggtcttcttcctatatccgtgcaactgaggctactgtgttagcttacaagcagggtaaaatctcagactttttgtgattcttgctgcctacttatgtgtactcatgctgagaagagtagaagacacgaagaaaggaagtatgtaagcagcttccttgtgctaagagttatggagagggagtagacaaagtaaatgtaaaggatgcaccccatgaaactgcagtaattaatttattttcttgattttaaaaatacgtatatatgtggcaagacttctaccaaacttaacaggtgtcattactgactaaatcttgattcgcatattactttgaaggatattcatgcatccaacaaataccagtgtagtactgacaatgggaaagtcactgctatttaatatatcagctgtcaatagttcataatagcttcacttttatcagaatgtgtggctgactctcatagattgatggactcaaaagcactgtatagaggttttggaggtcagggtgccattttcaacattttaaaacaagggaaattaagaatttacccatagtaaggctgtactggtttttaagaatatccagttcctttgattttggctatcttattaactattaataattcgtacctacaggatgtcataataattagcagcattgaatgattgctatgtgcttggttttaaacatggggtaatgaaaaccgttattgttaaataaaatatatatggaagatggagtctttcagaatgtgtggttcatattcaaaaataaatactggcactctgagatggaaacctctatgtttgttcccaggtcacataattaattggtggcagtatgctggaaccagaagggcatcctagacatctctgtttataaaatgttattaaaaatcatctatgcaattttcccacttggttataatggtacaaagtaaagggataccatttctctgtttctaggaacactttggtgtcctggtgtaagctgagataaagattatatttctcatcagaaaaattatagttatttgtactctttaaaaattgaaactgcaaatgacatttgttttcacgtttatatttataaagtcttcaccacactttgtttgttgttcctacctcgccccgctttaagattagggaagaaaattacaatccacccaggcttctttaatgcatgaagaacttattctcccagagttttaggcaaggttcactgggcctctattgtaacaggaacagacatatattttgcttcagtgagtgtttcttgagctcataagcattttgaaaatattgaatgacttacagtcccttaagaaagtagccatttaaaaaagcatattcagttgaactttaaaaatataatttataccacaatactcaacaggctccaactgcttgaaagtatttggctgcaaagacattatttttagtgatcctaaccatactaggaacaaagaattgcgtctgtcaaaatgggatctctggcgctctaaaataatccacatgctttgtgaactttgatgaagtcaggcagctctctgtcatataaatatcatagtggcatcaaaacctgggctgaccatgtgctgcaggtggaatgcacacactcacccagtttcgcagcagaagcagctgacactagtagggagacagcgccgtcttcagttcctaaagccattggggcgtctgtgtgctgtccaaacctgaaataggtaaatgattcttcattcaatcctcccttgaaaatgaaaatgacttcagtaaatacttgtgctacaaattactcagatgcagtatttactcttttcctgtacgtcactgtatcatttagagccaaactgtaaagattatgagaaaaaaagaaataaactcagtgttagataaacaaattagagacaggaaatgctacactgaaatactgtctgaagaacttatgaaatgagtttaatctttcttttaagatctgttaagacatttttgaagggatgagagatgagttggaagatactgttttctttaaagaaaataattatttttcataagctattagaataaaagggaatgttaatatcagataatagcattattatctgattttattatctaatcattaagattactcacattatccttatctcttgaatttatctattcttgtttcattttcatttcattagaaattaatatatccctctctttcgtaaacataaaagactttattttataaaatatattacataaaatgttaacatctgtgtgagcatttataattgtgttcatcccttcagtctacctcagatgaaaatatatacaaaataaattaaataaaaatgtctgtaattatctttccattttgttgacatacatgtgtacctaaaactagaagagagccctgtactttttagagtgaagtaataatgaaagtgaaatcttacataccttgtcttatccaaaaaaacgagaacaaacaaaaatgtaaaatgttggtagggaactttaaatgaataccatccttattgatattaacttgccataaagtgtttctcctacagaaatgttttgctttaaagaaatttaaagtaaaatttgctttttgaaaatttaatgcagggatttaattctgagtggtttacaacaatgggttatgaatgtatcaccatgacagcaggttgctagagtctaggagtcaggagatgtggcttcattaaaagcacctccagataatgccctacgttagatttcactgaaagacaggagctgctgatgagggtgacctctgacatcaagtcatcttactataaacagaagggcgtggaaagccattggtcggaaccaggagtgtttactatccaggtctcctcctatttaacctacataactgcactgctcctggagcccgaaggttcacgccagagcaaggtgcttttaaggctacctgggtgttggttagagactataaacctctcagagcattctgtaaacctcgacacagtttcattctactgacaatggagactggaatttattggctgctgaacttcacacacacgcactacagaactgacttccaaatacagctggaataaatttcaggttttggggttttgaatgaggtaagttgcatttagcttttggttgaagcgttatcattattattatgttccatgggcagtcacacatttaagtgtaggcagttctatctcagagaaaaatatttttcttgttaaaataggttgtttagatttttcacagttttttagtacaaggatgatagaagaaacttgtacataggaactgagcaagccaatcaattagagaaaatccctgatctgtttatggctaaagtgtgaaacacacttcgtctttgtttactttataaaattcagctattcaaattacattatgttaatgttgggagaaatgcaggtaacgtgataagtgataatagattacatttcactacaaaacttttaacagtcaactttgttttcccctaatagtacatgctactgcaggattttaaaaaactaataccaactatttaaatgaaaggcttttttctgcataatttgttttgaaatttgtgctgaatttgaacttttcattagatttgagatgtagtcatcttgatagatatgtcatatttttaagagaatgagtgtttccctccatttatggaactattttttcctgaaaccataatagtaagatcaagtttaattttaactttttaaagaatcctgtagtgtttagtgaggtttaccttcctttagatgtgtactgagcacatactttgatttaaaaccttgatgtggaaggctttggtatgctttggtttaaattatttaaatatatctttgtgtctttctcaagaagaagaagtgtaaattgctgttttgctgcatcagagggttgagatgtgggagaattgtcaaaataataacagcatttgttttgttaaagacgactgagggaagctttgctgtgttgggactattttattcttgtgagaacaacacaattcaggcggagaaaatagatctattctaagtatttgcgagtactgatttactgttagaggtggatagttagggaagctgctggaagaaagggaggatagattatcccagccaataagttttcccgtttggtttacggggtctactgagcatcagtcagcactatccagtttcccacttcttttctgagttgtaggtactattttctgaaatactctgcaattgaataatgatgttacactaccttattttgcgttttgtttgttttctaaccgaaagttcactaaaccactaaaatgttacttatcaaaaatgaccaagaaaagcaaataccagtaaccatataatgggttctaactttttgcagggggaagaagagggacagagaggccaattttttatctctactttggtttttctcttttcttctccaagttccttataaattactctcgttagcagtttcaaaattgtatgatctaactttttgatcctgtagcaaccctgtagagggagatggttgtgtgagtccaggggtggcacacattttgctttagggaaatggtgcaagccaaatttaacaggtaatgcagctgttgaagaaatagaaaagccagatgacttcctacgtgtattgaggaaaccaggataaattgtccttagaaccagctcccagaaagccattttaattgaggtcaaagaggaagaaattgtgagtatatctcaattatttattaggtttacctagaatgagaccttcactacagatatacctaatctataattcctatactctttaacccttgagcattcctgctgtatgaatccctttaacatttagactgcagagtgtatttaattgtttatgacagtccagaatttagggacataaaaattgtgaaattaactgactaaattttactttcatctaaggaataagcttctgcatataaaaattattgtaataaatttcttagattttagttgaagttacacagttaatgatgctgtttcttctggtcacatgcttgtatgtgtgaaatgtttcacatagaactattttcagctcttagtttacaggtaatttaaattgttttttctttaatttgacaatttgagtatttctactcaaacaaatcatataatttgcattcttggtgtgtaaattatgctacagtcagtgtcttattaactactaatgaagaattttattttaggattaaaacctgagaaaaggtgatttgtaatctttttttataacaatggttatagaagagagatttaatataaaatataaaactactttaaaatagattttaaaactcaaaaatgttgctacgatgttgtggaaaatatcagattcaatccagcatgctataaatacatttttttttattgtataaagcttaattttaaaaataaagaacttgatgccaacattcttgaattttctctttataaatgttgctattttaatggaagatcaagaagataaaatctgtaaaattcaaaaatatgcctgttttacataattattttatcaatgtattgttctagaaatatttatattttatataaattaatctacagatatatagagatatatgttgttaaatttaaaattgctttaaaattttgtgtgcattctatcaatttgtttttaaagttaaagaatttctaatttttttaaaagttatggtgatactattgggcacattaggagagtttttatatatacttttaaaatgttttttaaagtttaggcatatatatgtacttatacagacatacgcacacagataaactttaacaaaacttttgcatatgaattgaacaattttatattggtaagtgagacaacctttatagtcaattattgttcaaattgaaaaggttagttgtcatttttacttaataggtaaatgatggtgtactagagtatattacataatgattgatattttatgtttggaaacatatgtaactatgcctgtggccaaattcttttgaagtttaatgaccaagatgagctgcatttgttaagtggtagagcactggcttgtctggggtccttttgtgcttggcagatcttgataaatgggtgagtttttcttaaccttgtggccaaaacattccaatatctttaaaaaaatttataaagatatagaatatgttgcgaaaaacatgagcaaattttctctatttaggggactaggttaaatttttaagatgatttttaaagcaatatttgtgagaattcataaatattcattttaatgcagggaaatctaaagtttctgatatgtaatactgctggaattcttctttcctggttcactgcgaagctgcacagtagtcagcaattttaatttcgctgcagaagattctaccaaattaacattatgatcattaagtgataattctttagaatattcattttgctctttttgctatgctaatacattgtaaagcatttatccatctttcttgtgacacccaggacggcaaagaaacatataaacaaaaggtataaagaagaccaagatatatgaggaagtatctctttaggtgtttgtttatcatgcacatttgtgaggaaaaaaattcttttagcgcttatgtatagtatttatgcatagtatcaaggctggacaatctagtcttttttccaatcttagaatgggagctttcatatgagctgtaacatgatatgttaaagcatattatggttccttttgtggcattttttaaaaagtaatgtgttacctttgcctgccccactgggtaataatgaaaaaatataccattagaaggagtttgaaattttcctaaataattcataaagccgatatggcatttatggcaggtgaaaaaggactgtggcatagataaggagaaaacgtgctttggcattttaaaggttaatgtgatttgacatttggtttaatacttacatactgtacataaataattgtgctttgtttttctgttattgttgctaagttgctttttgaatatattcaaccttgctatgaactctcaaatcacttgaaagctattgtgacagttgtagttgatgaagagttatagactatagaagtttttccacttaaaacataattcctccctagtgcatgattttgtctaacctccctcccccaaaccagggtcctggaaggccctcgcattaaaggccagaaatcaagtgagatcttgcctgtgacagcccaatactaaaggagtaaaataattttgccttcaggtttttggtggtggattttatttattaattatctaactccactattcttaataggtatgttattttgtctactgttgcacttagagtatttgatagtatctttgatgtgtagcagttaaagaagggttatggcaggttttctttgaatggaagtagatgcagacttccaggtatgcagtagagtcctctcactttcatagtcaataaatggtgatttgggcttttagaaacacggttttggttttgccagggagaagcttggttaaggaatgataaagaggttgaaaagtgatatagtaagaaaatggaggaataaatagacttccctaactacatgaaaagaatttcagaaatgtatacattttacagctgcaagatctttgtttctaaggaaaacaaagacactttattaaaagttttgtattatttaataattggatttttagaaactgtatttctaagactttaattttttgaccaccatttggcaaaatgccattttattttccttgaaaagcctctcaaatttgtataaacatattaaaacagagatatattttttaaaactcttggtgacaacttttgtgttgcaaagatttaatgtttcgagtttttaaaagttaagaagtgaagtataacgtaagtgaaagatagaaaatgagtcgtattgagaagtgttgacacatttttagccagttgagaaagtgcatctccaagtttatatccctatgggcctagcagtacaccaatcctatgaagatcttcacaacataaatcatatttacttggatccaaaaataatcataggttatcacagtaaagtgtacatcttatgggaagtccttgagtggtattaacttttaaatattatatttaggatatgagtatatattttctttcacacctgtacgtaagtaaactttggaataatttttagtaaaagcttatattgtaaaaattgtttatgttttgcctatttcatttattacattaggactcaatttttaagttaatacctacttttacatttttttatgttccttcatacattcctgaggtatgtaataggaaaggacatatgtaataggaaaggatatattttaattcatatgtattaaatgctgctaactagaaaccaggataatctagggcagcccattaaaccctgtatcagtcggttatcaatttttaaaaaaattaatgtgataagggccagtcaattgagatgcattaaataagaacatgacagctattcctggaataaagctggaataattatttaaaatacttttaaattacattatttaatttaaaattcaaatatggataacttgtaagtattagaaaatatgaaaaatgtcacatagccatggacatttcaagaagtcttttattttcgctaaattagaagccaaaggtaactaaagttagataccattctgcttaatcaggcaataatttacaacaattttattcaacccagtcataaaattcatttcataaagtatgcattcatataagactctaggcattgatatactacagttttttgaaataaatatcacttattcagtcagattcacatcttagagtattcacattagaaatgccaacaaagccgacaagtctaaattgttgttcacagtaattctgtatcgttttctatgtttacaaagagtttggcatgcaataatctgtaatataatctccatttttggaaaaaaatatttttctatctgcttatccatgttttccttaagcaatagtgcatttaatctcatttacattatattttatattttctacacagttcagtgaagaagtagtcttaccatccataagaatatatattaataaattatttattacataaactttcatttgtgaaattttaatctcgaatttatagttgctgaatccaccttttgttttcagtgtatagtatgtcctaagactcaattattaatgctcatttcaaaacaaaatgaagttccaaaagagatcttttgaaaatgtcttcttacattattctattctttacattttttattcccattaatgtttcacgatttgtaatcagaactattcactagaagataattgggataattgagcccagctattttggaagatgctagatataataaaagaaccttgctcttatttgcaaactttttttatgagttaattctcctcaaaagattgtgagcttctcaaagcacctagtggtttggaaacattaaaaaaattaagattgatttttatatatgaatgtaatagtcataattccaaagagtccagaaattatggtattttctacatatattttccagatattgaaagtattaattattctcaataccaaatcacacattctttattttaaagtatactttatgttacttacgtaaatacaacctaaaaagcttgaggggtgaatagtattgtgaaataagagatgcatagtgttgtgtaataagagaaatgacatttaaaaataattgtgtgactaatgtaataatattgaccagtcctctctactcctttattctgctttattttcatctcagcacttaaccactgctggcattgtattgttcatttaccagtttacttatttcttgtatgtctcctccactagaggaggaggtgtttgttgggcagacaggtgtttgttggtctaggtgagtgctgttcagtagaaaaatgatacaaatcctatgcgtattttaaattttctagtagtcacacttgaaaagtaagaatcaacaggagaaattattttatttaacacagtatacccaaaatatcattttactctcaatatcaaaaatactaagatattctacttcctctttttcatagtaagactttgaaatctggtgtgctttttacactaacagcacatctccgttcaattcagccacatttcaagctctaaatagccacgtgtggttagtggctcctgtgtcaaactgcttacgtctagttcatctctgtggctggaacactgcctcggatatctcaggcattcagtaaagccttgctgaatgagcaaatcttgatattttggacagaaaaagaaacaacgcagaagttgtttttcacattagtttttttttttttttttttttggctgtttttggggtggtggcggaggtggatgctagagatatctggataattttttcaaaactactatttattttgcttacatggagtttaaatgttactagtgcttggtaaaaactggttacttcagtagtctagtttaaaggattcctttaatgactgatgtattataaaagtaactagtaggttcttctttgaaaattgttccacagaactttaatttccactcttagttttaaatgggagatattagtcaagggtacaaagttttacttatgcaaggtgggtcgttcccagaaatccactgtacagaacagtgcctatagcaacaatataggcactaatattgtatactttaaaattcactaagagagtagatttatattatgttcacacacacacacacacacaatttgggaggaaatttttggaagtgatggatatgttcacagcatagattacagtggtagtttcacaggtgcattcttatctcaaactcatcaagttgtatacattaaataggtgtacctttttgtatatcaatcatacctcaataaagtgagattttaaaaagaaaggaaagtaaactaatgaacacaactggcaaatgtagcataggagagaatgaaaggcttgatgtgtggccttaagttgtaattccagccttgctagtgttagctgtgggatattaggcaagttgttgaacctctttgcacattagttttctagttcataagaggaggattttattaatcatacctgtctacatgcattaaatgagattatatatatacatagtctagcagagtgagtggaaaagaatatttgcttaataaatggcagtaattattattgttatgtaattgaagtcaaattttaaatattaagacgttttgatcttcattttgaacatttttaattcatatgtttatgaattttaggttcttcataggttctggttaaaatgccttcatagatctggagttgaaatttgctacataacttgctttcaggttgtttctgcttctcagtgttactatatgggaactgggaagaaaattgtatatatctaagcactgtgcctggcatgtggaaaacactcaaaaattttagctgttattcacccattccttcatctcaaaaatttagaattttgatatttatgttttcattgaatactaatagttgcttttcttaaaatagttaaatatttaactctttttcatggtgcttggaattttcctgtatttttataatttctctgaagagatattgcataggttaaagttcactttatttgcagcaagttgcattcatttacgctattcatcctttctgtcttggtgtgtgtgtgtgtgtgtgtgtgtgtgtgtgtgtgtatttctatggaaaaattttcaacatttatttttttatttattggcccacccccttgtgtgtcttgtgaaaactaggatttgaatttaactttttggcatgaaattctgactcatttcttgacctgcttgttttccacttcattcaaaacacattcagaagtaagcctggggtgatggtgcatacctgtagacccagttacgtggaaggctgagacaggaggatggcttacactagggagtttgagactgtagtgcaccatgattgcacctatgaatagccactgcactcctgcctaaatgatagtcattgaaggttctatatgttttataagaatattctttcttatatagcatatatgggtcagcacttgccatttaatgaagtctcaaatggaagagtgtgttcaaattaggtaaaactatccatttgcctctacttctttgatcaaaaccctagaaatatttttcttgatgattcctttaactcctctaccttaattcagaaataagatagggttttgaagtaatttgaagatgtcataaaataaccttttttgtcttcggtatatctaatctttcttttcaaatacagataaaaagatctgataatattctagttaacacttcaatcaattacaatattctgtcaattctatctcagaagtgtttgtcaaaaacaccctctcagttcaccccatggctcctgtcttgagtcttcaccacctctcactgacagattgaatggttcaaagtagcatttggggaacacctactcagggctggggatataatgatgtaccagatcaatgccatctctgccttcatggaacttctactatccgttttgttgcattaggcttttcccaactttcagccctcacctcatcccccttccacattaccttctatagcatctctacccagtttgtttttttacaacctttcaatggtcttcactgaccaaaggttaaattccaaattctttaccgtatataagggcttcataatatgcttcctctggcaaacttcttgacactgaaatacctactatttcccacatacagtctctgaagactcaattcagaacttactttcttcattgccttctccatcttcctttggctaagttaatttgttctatgaacactcacaatactttagatagacttcccctagagtagtcatggtatcctaaatattattcttctctcatttgaccaagaacaaatgaatgaaacctctaaaaataaccactctgctaaatggttattttaatatctaaaggaatttctaattcattctttcatcacatgcctgttaagcattggttataagtgtgggactctgtgggtactaaatagcaaaaccctgtagatgtgttctctgcctttactgttactactttgagaataaattaaaacaagcagaactttctagtaagttctttggggtaattatgctttggaaagccgtgggtgttaaagactaaaaaaagttaaatgataggaagcttgtctgtctctgactttcagttgcgagcatatgtctagtttgtggtggtctggagcttcctcagccagtcccaaggtccagtcatcatggtcttgaggaaagtgacattcacctggggataatttctgtgtattcattgggcagttcatatagttttttggtgataaatcataggcaagaaccagtaggaaagaaggttctttttttttcagatatgctttccttttaattcttgttttcctcatacaaatttaatggacataagacttgtgggatttggagttaattttatgtttacatttttaaaaaagtatttctccctccccaccctttccccttttctcctcctacgccttattcctcttcctcctcctccttgttcctcttcctcctcctcctcctcttcttcttcttccctcccctcccctcccgttacttccttccttcctttttcctcctcctttcttcctcttctccctctcctcctcctcctcttctttctctttttccttttcttcctcttcttttcctcatcccctcctccttctctacctcctcctcctttttcttctcttctctctgtgaaaccgttttttttttcttttttttttttttttttgcccctccatctcatggtactgattaccatgttaaaggcatagaagacattacataataaaacaggatgacagtctctttgctggtcagttttattttcatattgtgtaagtgtatacacaagatgcaaaagagactacagagttaatcaagaaaataattgatttcccagattataaaaatgtctagactttgtattaaaagcaaaagacgggatttttgaaaatgtagggtttttgtgagtttgtttgttaaggatttttctgaaacagaggaggaaaaaattactttgtgagttggaaagacaatgctgtatcttcaaagcttaagacttacttttaagtggtactgttcatattgcaattcacattgcacacatgttcctcatggtatatattcagtagaatttttttttgcttccaaaccacatattggaagtaaaactccttggattccataggttgcatagttaagttattgaaatatgaacacccagaaatagtgggcttataaatgtatattgtacatttttcatattaaccaagagatttttgaagtttagtctactctgcatatacttttaagaccataataatcagatatagatataagtgcttgaagtgcaattgtgaaaatctatggatttcaccatctttagaggatgtaccacatacttttgtccagaaatagatagcatggcctagaagtatgagttattctcatcctttacctctgtgggttaaaaaccacaaagttgaaatatagtctgcaagatatactgaaaatatatgtgtgaagcagtgctaaacttaattgatatgttgagacatatataaaacatacagccactagactgagaaaatgaaaattagtgtatgaacattttagttaatgctgtgctttgcatcaaaacctggtgtttattattatgtgcttttagtaggagacagaagcagtatcagttggaaaaacatttcttagtggattgagaacagtatgctttctagttcctaagtgggaaacctggttctttggtttctttgttcctggttaggcttatccccagttatttcagctgaacattttacatactaatggagtccagggaagtgtatttggcagctgttcatgggataataatgaaatacactatttagtactgtatgctgctgctgtaaagtgtggggggtattttatagagaacttggtgaacagagctatatccgctttaatagtgtgtgaacctgagtgaggaagttgtattttcatatgagaataactagtactcttttcttacaggtaaagaaaacgtgcacagaatcagatgtttcacaatctcagaattccaggtacagtaaaataaagaccaagactcccctaaggagaattgcagtttcggagcactagtaagatgttatacctgagacacaattgtgatttgaaacattgagcttcttgaagaacttatcttgatggaaactgtatatcatgctggctagcgtaccactactcataatattagtcaaagggactgtgattgaagtcagttttaaggaacaatagtggaagtatctctagaaatacgtgaaaaaaaatcccttggcattaagttaatgttcatttttttgttctaatttctttttataatgttttgaatctaaaattgtgccagatactgaataactgtcaaatctgtgtttacaaaaaaaaaaaaaaaactatgatatttctttttctttgcagtgaaacattgctagattttgagaatgttgtcaaattaggaaactcatagttaatttggcattctcgtttgggttgtttggagcctgtggaaatgatgaattaaagtggtgaggccacttcatataggaatttagcaccatttagttgtttgtggttgaaccagatgcccaacagatttttttagacctacacattttcattgctttcatttcaaagtccaggctgcaattttgaatggataagtaaaagtatcgtaaatactatgacaataataaacacatgttcttactatgctatgagtgatatgacttaacctatgtgtattcagttgagagatgggtctcgttttattttgtcctacttgctcccgcatatagtgcatgtagtgattttcttggtacatgaaaacattgcatatctaggtaaaatgttaatggccaaggccaaggtgggtggatcacctgaggtcaggagttcaagaccagcctggccaatatggtgaaaccccatctctacaaaaatacaaaaattagccaggcatgatggatggtgggtgcctgtaatcccagttactcgggagggtgaggtggaagaatcacttgaacctgggaggcggaggttgcagtgagccgagattgtgccattgcactccagcctgggcgacagagcgagactccatctcaaaaaaaaaaaaaaaaaaaaaaaaaaaatgtaatggccattatgtttttctttttgtagagtaagtgtatcttatgtatagtccacttatagtttgagtaactcttgttttgttgtatgcagtatgatattcctataattgattcctgtgcatattatattaaaatgattgcatatggattttccctttggatcatgaagagcatatgatatgatatcagatttttgatctttgatctttgttctgtgtaattagctatcaaaatggaactaactaattttagattattggagcattaggaaatggatgaaccactaaatgttttcctacaaagcagagtagttctaggatgtgcgaacagaagggaagactggggctctattccttggaggcacctccttcctaagtatttgcagacctatataagtgacctacctataacttgctttttaaggatgatatatgtaattagataatttttgcaagcagctggtcttgggagttaggaaaaacagaacaatataatcatccttattattaatatttcatatcaaaattttttagctttgaggctactcaggatttttgggcagataatactatgcttaagtaaattttaaactaacagaaagcgatcaaactgattcattgttcatagttggtatcagtaagttggagaagaaatagaaagagttcagagctcagtgtatttaaacctggaattaggtcattcttttttatctagaaaatcccagcccatgtggccttaaaaatataattttatttttaagaaaaaaatagtttttttgaagactgcttaaaatatatttgtcatttaataataactgtctctctaaatggaaaagtagccagagttcctggaaatcagcagttagttgctgtggattagctgctgcttaaagtttcctaatctgtaatgtaaatgggtaaaatcaggcaaatcaatttctaagaacttcataactttgtgatatcaaaaacaagcaaacaaatacaataatttttcttaaaatgtgagatggaaagaccttcaagaagacctagagtcatttgttggttcaagtttgcccagacgttttgataatgacaggtctcctctcctgacctgtggtacaatggtcaatctccacactctggtcaatatctatcaataacataaaaatgtgactgttcttggatcctgtatttattccccaatattaggcctgagagtgccagaactggcacttaatgtattgatggaacaccaaggagagaataaaaatataccgaagagcactcgacacaaaaaggatacaagaatttactgaatagtgaacaaattatatgcatgtactgaggttcagtttttctaacctgtcaaaaaacaaaaaaaatgacaaccaaacaagaaaaatgtctctaatatagacactaagcagcattattttaatacatacatatatgggtacattcttttttgctcattaagaaccacaggggctgacgcagtggctcacgcctgtaatcccagcactttgggaggccgaggcgggcagatgatgaggtcaggagatcgagaccatcctggctaacacagtgaaaccccgtctctactaaaaaaacaaaaaattagccaggcgtggtggcaggcgcctgtagtcccagctacttgggaggctgaggcaggagaatggcgtgaacctggaaggcggagcttgcagtgagccgagattgtgccactgcactccagcctgggtgacaaagcaagactctgtctcaaaaaaaaaaaaaaaaaacccacaaaatatatatattttatacatatatatatattttttctctctcctctgtgtgtgtatgtatgctctctctgtgtgtgtgtgtgtgtgtgtgtgtgtgtgtgtgtgtgtgtgtgtgtgtgagagagagagagagagattcagattgagatttaaagcccggggctaggtagttttattctaaacaaatatcaaataaagaattgaactcaaagtgaaatactgtatccgcataaaatgtgagccagagaactactgcctaaaaaatgctgcctcacttggaacctaaagctaatatcattcatttatttagttagctttatagtatgttggttttggatttgaaatgattagaataaatgcagatggaaagtgtttttacagtagggaaataattaaattgggtgtggagactttgacaagagaattcttgaagtgacatatgtgtatcagcaaattctttttcttgcttggccttaattcttttgggaagaaatgcttgggctgcagatgtaatggtatattgggaaaaagaatttacaaacccatgcagtataagtacggcaccaaactatcttctttgaaatagcattacatgtatatagtataagccagatgtcaggaatagtattttttccctgtttcctaaagctactaaacttgatgtcatgtggaaagggatgtgatgtgctttgtgtaaaatttgacattccttaaatgtttttctttttttgctttcctctgtgttgctaaccatgtccaggatgtactattgttcctaaactaatgttaaccataaaatgaatttatgagaaaaacaaaattaatatccttaccctaaaattaagtttgttactagatagaccatcttaaaacataaactgaaatgatattttgcattgatgtttttttctgtcttcatggtgaatttatttgtgtcaatttgggtcccatttgactcatcaccgaaaatacatggttcttgtttaatgtaataaatagctcctggacaaatgaattttacagcagaagtttccatgaatcttatttttttaactcctctactttcagtcctttttatttctgataatgaggtgaggaaataatttatttcattcttgtattgcatactttacaaatatcttagggtgtctctgtgttaaagtagtccctataacacacaaatgatttctctgttgaatttctatttctgtttctctttgcttttcctctcttgggccactgactagcattttcaccaagaagagatcaaagacataggaaggaaataaaactcaaaataggaaatttttattttatactcgttttgttaactagagagtgaatagaaatagaaattgtggtgaaattgggctgtgaagtgacttatcaggagttaagccagctcttgtcctttagtagctttgtttcatcctggccacagtgtcaccagtagaatatagtaaggagatctaaggagaatcttaaaatataggaagaacttgtggtatgtatgagctaagatgatagtttttccacatggagaataacaaaagattctgtggatagtggggaggattgactcttctccacttcgtaagttaaagaaattgagtttgctgagaacttaatgattacctgaaattagtaaaggccttggcctgtgtcttcttgccctagtctttactaactttccaattattaagagaaaggcaaaatgactttccgttttttaaagaagcattggaattagtttcagtttaatatgtaatatttaagtgagcctcagggagtttatctattcaatgtctacatgcaacagcttaaaaaaatgaaattcctaactcctattatgtagacagttgtgatttaataatgtttaatgtattaaattatacatagttatttgctagtaaaataattattgcagtacttccggaagactgaaatgtttatctgcgtataattgcctgtctcaaaattaaatgctgtattgttttcaaagcagggaaagctgagggctcctttgtgaaacatgcatagcatttcactgtgtcaaatcagaggtccatctagcccaatattctgtctccaagaagtaccaaaaatcattactgccagtttatgtttttctcaaacctggaaggttggaatatagttctaaataccttaaattctctcaataacatgatctggttgtacagaccacagaattgggtaaccatttcttggacttaattatattatcatatattatctttttgactaatgaacccaggaaattactaatcacaatgcaaagtaataattaattcctttaattattaaaaaacacctctttcaaattataaggcatacttcccctgaaaatgatagatattctaatagttaaatattctaagagtgtgatttaattctcatgtcatttatttaacctgagtcatattatagcttaatctttttcttcccaatttggaaagtgttttgtcttgtttcaaagtctggcctcatgtggatgcttctctagtcttttcatcatttttggctggcatttactggagattttcagaatttgttttaccttttctggggtgtgctgacagattcctgcagatatggatgcagatggggctgtgaatgagggtgaatgatgtcctctgttttgctgttaattgtgtctttgatagctgacctatcttgatcctttgttcatggtggcatctgtgctgatttcctcagataattgtctgtggtgtttgccaaatcacttatttcagtgataattgcagctttaaaaaacagtctcggccgggcacagtggctcaccctataaacccagcactttgggaggctgaggcgggtggatcatctgaggttgggagttcgagaccagcctggccaacatggtgagaccccgtctctactaaaaatacaaaaattagtagggcatagtggtgggcacctgtaatcccagctacttgggaggctgaggcacgagaatcgcttgaacctggggggcggaggttgcagtgagccgtaatcatgccactgcactccagcctgggcaacagagtgagactcggtctcaaaaaaaaaaaaaaagtctcaaaacatagactattgtttcctaaatgtcttatcacatatgtgcccaatcgacccttccagtagctcattgggaactcctggtaacttatctttattggccagtgtagctgagtgttatttttgtacactttttgatttctttctgcacttcccctgtagagttcatcattttctaagattaaatgaatgggcaaatgagaataatatagtacatgtcccttctcattgttactcagagaatagttgcttattatgtgtttaaattgaagaagactcatcctaaaacccattaaggaaaaggaataggctacaaccaaaaggaggaagggcctcacagtggcatttcttcattcataccgtgtttatttaacctttgcctcactgtcttcagctccctaggttttattcttgatgcttttgcttttctttcatttcatactttttcatgtataatctctgtttacaactcttgatgtggcccacagtgcctagcatgctccgcccacgtccttctgcttctgctcggtgtgcatgagctgctgcttgttaggaggtctgcattcaccactgctacttgcctctctccacagaggctgggactctccttccctttcagtttctcctttcccctcccacctttgcttacctacatcatttcaaatcatcttccagatgttttgcgcccgttgcagcactctccccttctctaattagagacaacttaatggttattcatttcactagtatagagacttagagcttgatttcataggtcaggcatctacaaactgtgatatgaaaggagagattgctagggacagacctttaagtggagtggctgccaaactcctgaagaagctcagtgctttaaggaagccttccctatccagccaactagtccagccccactgtcataaggccacagggtaccatgttcttctccttcagagattctgcatgtggtagatgcctcctcagttcaccagactataagctctacaaggttagagttcatatctgcctttgttcaccattgcctcattagtatacagcacagggcctagcacatagcaggtccccagtacatatctgttaaatgaatgaataacttccaaatacacaaatctggcttgcaattgctcctggaatatctcttttaaccacaaatccctagtgtaatttagttagggatttctctctgccatctcagctccacttgtgaaaaattgtaattacacttctttccccagggtctttcctttctagtgataaataattctctcagttgtcctgtctcagaacttttaagcaatctttgacttcttgctccctttcctaatcctgctggtcatcaagttgacattcagctatagcccccccaattttctatgaaaccatgttttttgaattttcctctgccgtgctttttgaatctctttatcctgcctcacctcactgccactatgaaagttcagaatcttgccacctcacctctgaatgaatgcagtaggtcttcacatggcttacagggtctagaccctgcctttctgttctgccaagactgtcagagagcctttcttaatgacactttccatatggtgttgccgtgttggtcaattgatcaggcagtattcagtagacagagtatatacagaagcatgagcaaataaccttaaaagtttatatgtgcaggaagtaaaaatgtgaaaatatactttttgtgcctaattactgcccacaaaaggtcaggggttttctgggctacctgttgtccactctcctagttctcttatttttatttttattttttgagacagactttcgctgtgtcacccagactggagtgcggtggcagaatctcggctcactgtatcctccacctcctaggtttgagcgattctcctgcctcagcctcttgagtagctgggactacaggcgcccccgccaccacacccgcctactttttgtatctttagttgaggtggggttttgtcatcctggccaggctggtctcaaactcctgacctcaagtcatctgcccgccttggcctcctaaagtgctgggattacaggcgtgagccactgcacctggccctatttcccttattttactctgttaaatgttgcttgagtctcattttgtattctacctatcgttccaaactgacatagcagtgcatggctctaacattagtcccaaaacattctaggaaaaaatatataccagttacataggtaatgttttccatctcccctgctgtctccatttcctacatgtatcatagagtaaaatcatgtatgtgtgaactctgtggccacccaagggcatctatttttaggtaatacttatctggtaagttctacagatgaaatcatttcattagagggatagaggagaataagagcaccagagtgcagtttgagcactgggggttagtgtggttaggaagggcttcatagaagattggggggctatagctgaatgtcaaagaatagataaattttgaagaaatgaaggaaagagaactcacagtgaggtacaaacaaacaaacaaacaaaccaaaaaacccaggagctgaaattgaaaggtatggtttttggatagtcccacttgatccatgtgaagaaatagtagatgagattagaaagttagggtaggttagcacagcttgtggctggtttagcttgctagttgttttagttaggactcttattggttgcagctactgttgtcagccagttgaagcagaaaaaggaagttttagtatctattattttttgggttttgtttttgttttttttttttttttgagatggagtttcgctcttgttgcccaggctggagggctggagtgcaatggcatgatcttggctcaccacaacctccacctcccaggttcaagcgattctcctgcttcagcctcctgagtagctgggattacaggcatgcacctaagcaaaggattaatttcttaactcgggaaaagagggcttgctgaatttcagaaggtatgggagacacagattatctccctgttcatctcttattcatctctgtcccctttgcttcaccgttctgtgtctttatctctctggctgaccagctttgtttttctccaggccacacaacaagaggaaaatgcccatgtgacactgctcctgattttatacatttgacttctttagccacctagataatagattcctctctttttcattatctcagttccagatttctagggacgggaatgttttcagagagtcagggtcacaaaacagaaatgtggctttcaggagccacctctgggagcctatgaattgggttgtgaggagctttcaagcaaaggttgagggtagataacccacaagtgccctctactttctactccttcccttcccaggacatttttaacctgccagttttatccagcacctacccctccctcatccttcactttataatccagcctatataaactagcatatatcaaggaaattgaaaatgcactcccccctttcctaattagagacaactcaatggctattcattttactactatagagacttagagcttgatttcataggtcaggcatctacaaaccgtgatctgaaagtagagattgctggagacagacctttaagtggagtggcagcgaaactgcaaagtaagaggaactcagttcccctctttatgtaaactcttgtaccaatttttggcctccctatacccatccccaagctgaccagttcctattcaagggacccagtcttctcttcggctctcaaataccaattcaaatgcaaattgctttctccatttcctgtgtgtagttgttagataattgtctgactaatgccctcaattttgccaagattagtgtctaggttttagctctttaaaaaaaaaaacaatgttcaaacatacctgcagaaagacagtcagcaatcaataacctagagcccagatttaaaacttggcaagctctcttacaggtattgagagctcaccaatggatttctgatcaggtaatgatataattaaaattgtactggtgatgacagatcaaccgtgactcaggtgcttggaggcagggagaccagctatgaaacttacataaaaggctggagagacacttagcaaattgtggttattttggggcggcattacacactatttttttcatagcttaaacacattttccaaattttctacagtggatacttatttcttttgatttaagaacaaatacatgcatataaagcctgaaataatagatttggcttgaaataggcatggtggcagggggaaggatctggcctcttctttctgacagcttgcattgttctttagagatgagaaaatgcctgtcttcgccacatgtattagtgattaattccagaaaatggctgtgttcctggtcagcctctcctacagtaaactgagctcagaaatctttgtggttaacagtacaaaactcgttctggagactgttagctgcttgagttaatttggtcagagtaattcctcatgtaaagcagcatttgtgcagtgacttctatccagaagacctaaggagctaggacaagactctgctttgcatcacaggggtaattagaatgttgtcgattgagggcaacaaccatctctgagtattctccaagattgcttaggggttattaagcatcttaaatccttattttgcacttagagcatctgtagtgcagaaattctagactcagtgtgagtagaaacatagaagcttttgtggtccacttcatgcttggccaactctagatggtaatagaaagggggatatagtggttttcctctcagtagttcaattaaatgcttattctcccccttaaaggtactatttattgagcatctactatgggtcaggcaccaaatgcttgagatacgtcagtaaacaaaacaagagcatacatggtaaaggagtatgttagaaggtaatacataaccaccaattaaataaaatagggaggatcaggaacattgcggaggggaatggttgtggttttaaattgggtgatattttagcaaacttgaaggaaatgaatgagtgagccaagcagagagctggtggaagtacactcccttcagtaaaagcctgcgtggcatgttcaggtgacagaagagggaaggacagtgtggctagaatagagtgagcccagagttcaaaatttgaaatagcaatattctagaaaaagctactatttctagtcttttccacattttggaaatatttacttgtaatttcaataaaccattttcaaataaatgtcttggactaattgcctcttttgtcactgctacaagatggggctgatccccaaccaggaacacctctctctgccacaccacacacatcttctaagactagggctctctcctgatcagaaggcttcaagattcttcaccagtggaactcgaagtcttaaggctttttctaaagtagtgttcttaaagtttcagtcttaaatatagatgagggcttaatagagattccaaaattttgatttgtaaaggtacagagattctgcttattatcttacatttaatcatcacatttcagttgtcttagcaacctacacagtattctcatttggttttcaataagccaatggatgaatgggttctttgttcacgtgtttatgaatttctatcacctgatacttgaagtctttcaggcatgcttactgtgccaaataactgtctttatattcctaaaattcatgtagctaaaattaagctctactttttctaaatatttacatttccaatgagagaatctccaacataagaatagttggaaaaatgtatatataagcttgtgttttttttttttttttttttttttttttttttttggtcatcgaatgatttaatccactcttaaaattctagaaaaagttatatcaaacaaatacttgtcttgcttgggtagtaagagccaaataatacaggtatctttagttcaacagcggcacctttataagcttgtatttaaaaaatacttttgctttagttataattaatttccaaggctccacagacttgatggcaaactcaattgtctagcaaacctcacccatacagacatatttgagaattacagagagaaaaaaaaaagcctatgacaaatctaggcttcatagaggtatctctgagatgttgtctcagaatgttttgtcttactgaatgcacagttttaaattctaagtgaaggaatatatcgaaaatgtttaacaaagtacctgccactgtattatgtgaatttaaatgactgctcttattacaagtaggcatagtgatagtattgacaagtgacagtctaatgacaaaaagacaaaaatagcgaagcataaatgtaagaatgcaaaatgcttagtcacatgagatattttggcatgaacactggaagcccagtatgctttagtaatccctgaggacattgatatgccttagtactgtgtgatgattctcactagtgttggtcaccctgattttctcagtaaaagttaaattacatttaacatcataacattttagaattatttatatacaaaatgatcccattaaaatattttagaattatttatttacaaaatgatcccatttaaaatatgctattgcttaaaataaccacagctcagcaacacacaatatttgactaaaccataatgaccaaattccttgaaggttctggatagatgaggttatctagaattattcctttttcatgctaacatgagcaactcaagcatctggatcacttagggatttttttttttttttctccaatccaggtcaggtacctagcacagtgtgtggcacatagtaggagtgcaataaatatttataataggaattggtgaatgaatgaatgaggagctagtttttatattttggggagagaagtggcaagttcttcaagtctttacctacactagtcgcactaccgtatgccatataagaaggtttaaatgtcatctgtaaataagatcaaatctaaggaagacctctaagtttgggctgtggtggctcccgcctgtaatcccagcactttgggaggccaaggcaggcagattatttgaattcaggagtttgagaccagcctggccaacatggtgaaaccccatctctactaaaaatacaaaaaattagccaggcgtggtgttgcgtgcctgtagtccctggtactcagcaggctgagacagaagaatcgcttgaacccgagaggtggaggttgcagtgagccaagattgtgccattgcactccagcctgggtgacagagcaagacttcgtctaaaaaattaaaataaaataaaaaccctctaagtttgctctaacaagtagagtaactctgtatcccagcttaccccatgtagagtcccagtttacacttggtatctcagcatcccttttggatagagagtttactttcaagaaagtcttgtttgcatgatgaatttaatggttattctaattaaagtcatcacgtccttaccaaaggtttttgaaataaaaatgtaataatcaagaatttccctttttctgtctcccccttcttttctcccttccccttctttcctatcttaggatgacttttaccatgggcattgcacttttatctttaatacaagacaatatgtgaaaaagctctttgaaaggaaagatgacttgggaaataattgttccatttttttaggcttggcttccataggaagctcttctaatgcattctgtcatgtgattaatttgtcaaaattccatacctgtcagaaataatgtaatcttttcaagaacatagacagtcttattacatgaagtgatgtaatcctatactatttatctcctctgtattcctcattctcttattttctattattcttcaaatagaagagctaaagtcccaactaatggggatgttagagatcatgctagagcctgggaaaaaatgattaatgtggtttggtgggatgccaagacagatgcgccacaccctgctcggtgcaacagctgttgtagtaaagactgaaggcattacataggagcatcatgtgtgacatcgaacgggagacaaaatagtttactgtggctgagacactgacatttacatattcttaaccattatgttatgtgtgtgctgttggggtagttattatcctaggtttttctcattatttataggtgtttgttttaaagagaaacaatgatgaaaaccatggtatagagaaaaaatgaggagagggtgtgtttgtgtgtgtgtctgtgtgtatatgtgcatgcatgcaacatgactggaagtgtggattacccattggtatttctccaaaggggatttagaagggttaattctttctgcgcagggctgacagcacatgacacaactatccaaccatgccttcttccagatctcagtagcagttccagtcacagtgagaaccccaaactccctgccgtgttttcacactctcctggctacccaagagatgcatgattttcatcagaggaagatactgtgtatcctaaaaattcacatctcatggacttaaaaagatctggaaaatgcaaggcttagaaaatgttagtgaagcagacttttaatggcccagaatgaatcactcaacttggctggaaaaagcattctcttctatagcttctgacaatgaaccatggcatggctgcccagatacttaacattgcaatgagggcatccacatgacagtataggcagcaaagcacaacccctcaataccttagaaaagcaactcacagttggtttcccagtaacatcatttgactgtaggtgctgcttagaaagagtcaataagctccagatcctgaattcaaagccttttcctgacactggaagaagagcagtgtgaggcttcaaattgtttccaaaacgcctacatttccagcatcttttctctttccattccatttccaatcagctgcattccatctagcaaattcttgatattagggcatacagatttttagaaaattgaattttatttcatggaaaggttatttttttgtgcagttagaattagtgatctttgaggaatattgggaatagttggcttttcacatattgataactgcttcttgatttattgtttatcagtgctctaaacagggtttggaaaatatttggaactgattccttttatttgcatatatgatatatccccatgtgtattagttttcacactgctgataaagacatactcaagactgggcaatttacaaaataaagaggtttaatggacttacagctccacgtgcctggggaggcctcacaattatggcggaaggcaaaaggcatgtgtcacatgggggccgacaagagaagagggcttgtgctttttaaaaccatcagatctcgtgagacttattcactatcacaagaacagcatgggaaagacctgcccccatgattcaattacctcccactgggtctttcccacaacatgtgggaattcaagataagatttggatggggacacagacaaaccatatcaccatgtttcttacagtgcattgttttgtgtgtcttttcccctatggccatacattgtgaatccatttagttaaagcaactgagtggccattaaatgttttgtgctaaatgtaagagataaaactggaaaaaagaaaagggggggaggacagtgcaagatatcagcccttgttgcctagtcaagaaacagaggaatcgtgaaagaaagcttattttccatgtttgcaattcctgggaatgaccaaactggttttgcaaaccatgtgaattgagtccatgtgtatgctaggggtgagggagttattgagactagtttatttgagatattctgggtgtcttttactttctaaatattcttactccttttcttatgggggaaagaattttatgcaatagactttcattaaattgaattttcacaaccaaattgaagctgttatcagttggttgaactcttgctaactgaatgactataaggacaggtttcaatttcttcttatttaaagagtctgatttttttcagctgctattttttttcctcatattttcatgttgcctttatccagttggctgtttacattgtcagtaataagagttagaacttctaagtgtgacatgtgttttttatttcaaggacttctactaaaattgtttcttttgcatgcatgctatggaaggcttgcttaaaaactttgagaagactctaagtagagcccagaatttcgctaagaatgtggaccttttctttggtaagttggccatcctgtagaaagcgaatggcagtttcctaaagaaaaccctaatatggcttctttgaaaaaaaattgccaacatgcagtgccaaatcgtatttagtaaaaccttgtccccaaataaaaccagggaaataggcacaaagaagagaaacaggatacatcagtgcatgttgcaggagggttggatttgttgaaagattaatcataaagtatgtggacaaaagtgaattaagtaagtataagatacaatgtcactacctatttattcatcttttagctaaatatatgccttcccatgtctgcggacttttcctctcttattttgaccagcgccagctcacctctgctggtgcccacactggatcatgctaaattcaggtcagcatgcaaagggaatcagcctgcttagctagtggattttctaggcataatttatacatacataatttttagtgtcaggccaagcattttcatttttataatttcttctttctgatagtaaaccatttaatttggagcaaatataaatgattcctaatgaagcacaagtgaacagaaggaaattacttttgttaaactagtacttcaatgtatttttctctccctttcaagtagaggatgactatgagaaactgatacacagtattattcattatctggttagttcactagatcaagatgttgatgtgtggtgtagaaaggtggaaaaagttagagagttaaaaacaggttgatacaagctgttgagaaaaaaaaatacaatgaggctacttatgttttaaatcaagaatatgttttcagtgaaaatactctctaatgattcacagaagaatgtcaacttggactacatctgctgaaaatcaaagtgtaagtagttatatggcattgaattctggcaggagtctatgctgtgatatgaaacgaaagttcccatcaaatgacaatactttatttttctgcctttaagagtagttttctgactttaaaaaatgttaacagcattttttctccttcacattacaaagataaattggcaacgtgcctgtatgatttccagagtaggtttcttaaaataattttgatgggaaggtaattgtttaatgtcagtgtataaagttctcccatagtttaaacaaaattaaataagagaaaacacaaagaggaggttttgtataattactgggaaaacatagaaggaacaattaggtagttagacctgaaaagaagtgaactagggttttcaaatttcatactatttatagggttccttgcattattctctgacatcacttgatttttttgtttctgagtttgcaaatcagaatagcagcatatttatccattaatacatatttatagctttttgcacttatatattttctattcaagagtttcatgataaaatgaaatacactgaatacatattatgtgcaaaacaacaccattacaaaagtatacactgatacagatgcgagttagaaaattatatgcggtggggcgtggtggctcatgcctgtaatcccagcacttctggaggccaaggtgggcggatcaagaggtcaggagttcgagaccagcctggccaacatggtgaaaccctgtctctactgaaaatacaaaaattagtagggtgtggtggcgcacgcctgtaatcccagctactccggaggatgaggcaagagaattgcttgaacccgggaggcggagggtgcagtgagctgagattgcaccactgaactctagcttgggtgacaaagcaagactctgtcttgaaaaaaaaaaagaaaaaaaaaattatatgcttatattgcaagccgctttgcataaataatctgttctaatataggattcatttagcaaaattcatgaaaatagacatagtgtttgtgccctgaacatcatattgaagggtatcccagtcaattaaaggatagtaataaagtataaaaattattattgattaccttatttttttacagtgttatttttaaataccttggagatatcttaaattgttatttagaatgtacaatttaacataaatttaactgaagttgggacctgcttttttatgttaaattgtagactttttcttactcaattgccataaattctaataaattctaacttttttgcataacagtggagagaaagtttgaaatggttcatatgagcagctttgattttggaatgagactggggacacagctcaaggtttcctattttctcctgtccctctcttctggaatcaacccaagtgcccatagtgaatgaatcggtaaagaaaatgtggtatatgtatacaatggaatattattcagccataaaaagaattaaatcctgttatttgcaacaacatggatagaactgggggtcattatttaagtgaagtaagacaagcacggaaaagcaagtatcacatattctcactcctatgtaggagctaaaaaagtggatctcataaggatagagagtagattgtagattggtgtttaccagaggccaggaagggtaggaaggaaggagggatccaaagattttggttaatgggtacaaatataaattagatagaagaaataagagctggtgttcaacacgtcagtagggtgagtatagttaatattaatctattgtacatttcaaaatctctaaaagagaataattggaatgttcctagcataaagaaaatacaaatatttaagatgatggatatcccaaataccctgatttgattatatgaatgtatcaaattatcacacgtaccctcaaaatgtgtccttctgttacgtaccaactttaaaaagaaaataacatcatataacaactatagcccttagatgcaaaaagacctgagtgcaaatatcattccctttcttactaacatctaagtttcatatagtcttttagcttcatcgtttaaccccgaaatctggtaccatcctcttctattttcttgatgactaaattagatggcattatgtgtactgtttgacacatagttaacactcaatgaaagatagttatcttcagcctttgtacaaataactctagagaaatattagttgacctattgaaatgtggcacaatccagggctcacccctctcaggatcattagcattagattgagggtatttccctgcatacctctctctaataccagaaactcaatattttagtagtcacagggaaaagatgatagcaacagtgccatgggtgaactgtactctttttctgttctttgagcataaccataatgaatcaagaggaaaaggggaaggaactgaggagttgcccaccagctgtttctactgactgtgggaggaatttcctttgctcttttgttctaaaagatatctagatcatttcagcaaaaacccatatttttaaatcaaaaaaaagatctatatgattctagggacacagacacacacacacatacacacacacataccccttctttacaccattgtagaattgtaaaattaacacgtacagctaccaaagattgcatcatgacacagaaggatttctaatggcagtacttaatacctctccaaaataccttaagagggaaaaccactttggtacatctgttgtcactgagtggtgagcacttcttatattatctttattctctaagtagttgctcttcgttatttattcattggctctctaaatacagcacttaccctttttattccctgtctgatttctaaaaatggaacattcataaaataactcagtattatataaaaatttctaaagtgagaatctagctatatatctggaggcttaaactcacattgttttgttaccaacacaaatgttgaaatctactgaaagagtgtagtcaacttttccctgagcaaattcattttgatgaggcactgtgggaatttttgtctggaactgggtgtcatatgcttacatctctgtctaggctactgattcagggagctgtgcaatataaagatgaaatgtgatacacacacacacacacacacagccaggagaaataaaatgtgaacccaaaagaataacagaatgaatctatttgcaaatgtagtaaattcccatgtttatagagaaacaagagggagggtaacaggggacaagaccagtaagaattagggaagcacatggcttatagaattgttcattatctgatgtttccatgaattgtgacactctaggagtggagtctcagcccctccagcacccactctaccaacttgggcccttcagtgcctcggttttatcatggggctaataacaatgcctgctttctacaattgttatgaggattaaattagctataactaaaacacttccagcagcatcaagtgctatttttattatttccattactaattttgtgtttatgcattttgtggaaaaggaaacatgaacattgtgtggttcaaatagccaaaaaaaaattaaaatgtgattacactaaattagaatttatgtgattttattgcacctgaaggttaacatgattctgggattctaataacaaaaaagctttaaaaccatcttgatttgtttatacagaaaaacaggaattggcctgatagagaatgaaaactatgaaatagctggctgtcttgctttattgatatttttcacaggctttatttaactcccaaagacctagcctaaacaatagtatttttagaggacatagtcacataaataatctttctcattttgctctaaatgcctgctttaaccacagggggaaaaaatacaactttgttcttgtatgtttaagtcaaagatagtacacatagtatataatgttaattccatattaaaatgaccatttgaagaaagtgttcattaagaaagattacatttacttcaaggaattttcttgatatcaagcaatatttatttttcataattgagcttatgtgcctaaaataatccactcaaatctggataaatcatagtcttctatttgcacattcatcaactaaactctcatataaggaaggaagccactctacaagtcatatttctgaactgggaattatcttttcctgtcatgttttttgtttttgtttgtttgtgtgtttttctttgagatggagtttcgcctttgttacccaggctggagtgcaatggcatgattttggctcaccacaacctctgcccccagagttcaagcaattctcctgcctcagcctcacgagtacgtgggattacagttgtgcgtgtgccaccacacctgggtaattttgtagttttagtagagatggggtttctccatgttggtcaggctggtctcaaactcccgacctcaggtgatccacccgcctcagcctcccaaagtgctaagattacaggcgtgagccactgtgcccggcctcctgtcatgtatttttaacaggagtgtctcaggaatttaagccctttatttggactgactcccctgttcacttatttttctcagttcagtgagtgttgccaataagagagagattagacaaaaaagacaaagcacatcatctcttttctaatgtggatgttactcagtgatgaggggagagcagataagatccccagttaccaaagcgattaataacatcattctgtccattcacactcattcagccagtgtttattgaagagctttgtttgtctctgtcactgtgatcctacaggaaagacaatacctcctcttaaccaaggttgacaagtagctactcctagtttaataatttttgtaaaactttcagagctgttttttttttcgtattacaaatttactacattggatctactacactgtagattcttcagacagaaaatacatatggtcatgctaaataaaacaaaaataatctctagtttcagcacccacagtcttctagtcatagagagcaattccagttgttggcttgaatagtaaagcttttttctaacacaaaacatttgagactagtaacttcctatgcatttagttatcagttaatgtaagtctgtgtgtaataaatacgactttcattgagtttcgggatgtccttcgtgttcacgtgtagccctgcctcatcacccaccttaaagtggattgcttgtatccagtttctagtctccttggctcttcgcatgaggagagagagaaatgggaaaccctaattccctgttcacttgattcaacatctacgatttcattctattttaaaactctaccctggcagtaccctgcttactcattcgtagctgccttcagacatgctattctctgcttgaacatagtcgctcttagttcctcaacttttattttctcacttaagagcctgcttcactgagaatcatttcctagtgtcatgattctgaggtgccttttccatccactccttcaggctcctgtgctcaccatgccatggcctcaacacactgtgctagaatattgttttaccccctgactccctaactggactttgagttggtaggtagcattttatctgtcttccaaggatcttagccatctcctggcacatggaagtggtcataaaatatctattggatatatgaatgaataaatggactgacatcttgtggcaacatcctttcccccagtaaaaaccagaatggaatatacttcttatagtccagtggttctgactgaataacatatttattttggtagcagaaaatgccattgtttgggaaaactcaaggccatctactaacttctttattcttgcattgtcgtgatgatgtgactgatttccacagatctcataaaaatcattctcggtattctatattctatttcctatgtatgaaaggtgaatactcttgagtcattaattcaacaaattaattcaacagttatttattgaatgtcaattatgttccaggcacaattttaggtggggctacagcaaagtataaaacagacaaaagtttctcctttggggtttacattccagtggagagaggcaagcaataataaagattaatatacaaaacagtatattagaggtggtaagtgcaatggagaaaaagcaggaaaagaagagagagaatgaatggggggaagggggtgacaattttgcattgcctggccagggaaggccttagtgagagctgggtctcactaaggaggaaatgagggctgggtcatgcagctgtctgggagaagagtcccaggaagagagaacagcatgtgcaaaggtcctgaggtgagagcatgtctgttgtattttaggaactgtgtagtcaactggagagcagagagaatgctgctaaattctattatctatctatctacctacctacctacctacctatcttctatctatctatttagtaacattgtatcagattactttatatatatattgtataggctgtcaaacttcattcatatttttatttactaattgaccaggcagttatttaccacctaccatgggccaggttctatcttaggtattttaaggaaagtaaaatctattagatatagttcttgcccaaaagaagtttacgaaataatcagagataagacacatacaggactcatgacacgagatgagctctcataaggaaatgactactcattggccagagaaacagctagagaatgacatctgggcttcttggaagagatggcatcaaactgcaccttgagaggcatacaatgccaacggcacatcatatgcaatggtgtaaacgggggcacacccactgagtcactggcagtgcaggatctgtgaaggcaggagtgataggtaaggtcaaaaggaaagctttggtcagcatttgaaagcctttgaatgagtatatattttgtgaattctcttcattaaaaatgttctaagatttgtcatgatgttcagtgccttggtcttcataattctgtgttgccctcacctaattgccagcatattttagttaaattcaattagatatttcagttagctatatacatttttcagattgaaagctgttaacaggttgtataaaacctgtttcttatactttaacaaaataatttccaagtgtactatgcgatttttaattctagaaggttttctattaaaatgaaaatgaaatgtatgaaatctgtctcttattatttcagtcttctataggttttcgagtgtaaattagggagaaatgcagaataatttaaaattaaagttacttatagagaaagctgaatagaaaaataatgtgtatatagcatttgtttttctagaataaagtaagcacttatttagcttttaggtttcaactatattgtctttctcttgagcagattttacatagagctggtatgacatatctcagtgtaatacataatatattactaatgtctttaaattcagaagataagaaaaaactttgagatcaagtttttaatttgggaaaggtctaattaaactccttacattgggatatttgagttaattgttaaagtgctaattcagtttatcaaccacttgttatcacatagttttatcaacctacactgtgaaataaaggagtctagggttttttttttttttttttggaaggaaacgtatttatcgaaagagatttatttagattattctacatattctctgggaatttgtagtgtttcttaaagttggactaaatgttgaatgggaggataggaggagaaggcgatggaccctacaggtgcaaactctttccaaatcaccagggctttggctgttactcactcacccccgccttccttgctcttggagccttcagatttttccccagtagcttcaccttacagcaagcttagcagaagcagttccacagcatgccaacccccctcacttttgaataatccagagactccctgtgccacagataacatgcaatcataaatcttctcagcttcagcagttttcgtcttctaaattcaattaagttgagcccagtaagaatttgtggatcaaacagtgagctctatatagattcaaattcaacttagggttctgatgtttgttactaattttcaggaaaaaaaaataaaagaaaaatactgctgctattttctaaagcttccttataaaggtatttcttattgaaaccaactcatatttctcaaattcctagaccactatctgtcatgcaatttgagtctgttttccaaatggtagagtgccagagaatcaaaagctgcttgttttgcttgcctgattttctttagcattctttggaggatttaaagtatggggggaagaaaaggaaacctgacttacattaagagctgaacatgaaaaagggattaggcaaagctttaactttttcattatgcaaactttcctgaactataatacatatctttatagagttttattaattgttggggctgcaatttggattttgctaaaaagtatttactactaaaaacttcaaggttgttactaaacacatcaatcattttacatttggcccctttgcatggtgaacagaccgtccttcctccatcttttgttggggaatacctggctgaaggtctcagtgaaaagctaggaagatactcctcctctgagggagacatctggcttcttggctgattccatgcacacttttgttaatgggctcagattccccagaattcttttatgtggttacattgtagatggactgtctgcatagtcttgtcctcttgaatgatttatgtagaggttaaaaatacatatatatttggtctggttcttagaatctacgcataagattaaatgaatctcagcaagttcagttttggaaaaaaaaattaaatttattattacaaaggcaatctagtagaggatgtagattctcgagccagaatgcttaatttgaaacatggatttgccacttgctagctatacagtgttggacaagttatttaatctctttgtgccttcttggtttccctaaccacatacaggatgataataacaatatctacctcatatgtttccatgaggtttaaatggtttacactgtcaaagcttttaggacagtgcctggcgcgactaagtactcagtgagtgttagtcatgatgtcatgattattcatggtattcaccagacaagaatatgttctcatttgtgtatgatttaggattaaatttgggactaatattgagtggttcaatgctaattttgataaggctcatggaggtgtgtggtcacttttagtggagagtaactttaattcctttttacatagtgaaaaaaagagttcaccttccactcactagacttgattttgcagactccctgttctgatctggattttattatgagtgaaatgaagttagtgactcagtggtccataggtcattagtctgtagctgctctgttacatggaaaagtcctgaatgacaaaggtctactcaagggtgggttggcaaggtaatttagaaacctgtattattcccaaccaaaattggagcataaaaccttctattcactatccaaaaaggaagtgaaatcagccccacatagagatgtatgcactcccatgtttattgcagcgttattcacaataaccaagatatggaaaacagttgaagtgttcatagatggttgaatggataaagaaattgcaaaatatatacacacaaaaaaagaagtgttattcagccttaaaaaggagattatgccatttgtgacaacatggatgaacctggaggacattatgctaggtgaatatggcagacgcaaaaagaaaaatactgcatgatctcacttatatgtggaatacacgtactttctatagatagatagaaattgtatataatttctgttcccttcctcagggtaatttaaatggatattttaaaatagagggctattaagctgttgaaacatttcaaatacaactataacctatgtatatctctatatgtggaatctaaaaataaaaaagtcaaatacatagaaacagagggtagaatggtagttaccagagatgggaggagggatcaggaggtgtggatcaaagtttacaaagttacagttatgtacgatgaataactctagaaatctaaagcactggtgtgaagattatagtcaataatactgtaatgtataccagaaatttattaagagtatggatgttagaaaatctttcacaaaaaagaaaggtgactgtgaaagaaatgatatgttgattgtcttatcattttactaagtatatgtgtatgaaaacatatgttgtacaccttaaatatatgtcctccccccatataaaatttctgttcccttcttcagagtcatttaagtggatatttaaaaaatagagttattaagcttttgaaacacttcaaatacgtcagcctatgcatattaaaattttaatgcagcaaatttactaatatttgcaaaaccagtttagatagagataatatatagatatatagtcagattctgaccatgtcctaagtgttcttagtatctattgatgaatagatttcattaatttaatgagatgatagtatactaaaacttgtctaagtaaatggttggcgtccttgaaacttcctattgaatacaacatgagtaaaatgttcgtgtaaagtaaatatttttcaaatagggatgtgttattggtgtttcttaaatatagattacttgctgctgctttttaaattggatataaactttaaagtgaacagcattgtaggaagttgaagaggaagaaaatatattattttgagaaggtattatttaaatctatataaatccaacttaattaaggacattggataattactattaaggtcacaaatttataaaaatttacaaactaacatgaagtttaacagctttattcaagagtaaagttcatgaattgactgaaagagctcctcctaaccaaaaaaaaaaaaacttctgtatttttccatagaactaaggtcttaattccttctatcaatcatgtgttttccccgtttgcattgaaggctccctactctgtcctgcagcagcagtccctcctgttggcagggcttttctctcctcctgggggcttcctgcagtccacttcaaacagggctctggttccctagcgggcctgttaaattattaccctcaggtgttgattcatccttggcattgttgcattttaccattttgtagtcttcaggcatgggggaaggggaagagagttgaagaagatcaaagtagcagtactgaagttggagctttagaggtggggatgagccctcagcccctctgctgttcctccctgcccttcccccgcctgaccccagcctacccccaccaccccctgactttctgccctctcaagcctaatcagaagacagagggggctatgtgcttgaactgtttacttacaagcactttatttttacttttgcatacaagcaacaaacggtttaacactacatgatgttttattgtatagtacaactgtataaacagaagataacagatgaggacttactatttttttgattcggtggtttttgaacatacactctattctctgtaagacactgtgggggaaggttatgatgagcaagagactccttgttcccaggcagtgctgagtgaaatagttaataaatttttatggagcgggacccaattattacttgtgttatagagcacaaatatgaaactccatgagaaaagcacatcaaagggaaacaccagcatggtttttaaatatctgtaatcagtaaagtattgcatgttctttttagaaaatcagaaaatactcaatttattaaactaaaaacacagtcactctacccagagttaaccacactttggcacatttaattttccatatatgtgtgtgtgtgtatctgtatatctgtctatctatatatatatatattcggtctttttttaatttttgtttcataaaatgtatgactcagtctatcttgctttttaaaaactctacattatcttatgaatatttcaccatagaattgaaagttatttgcataatatatcagagcacataataatttatgtatgtaatcattttcttatttggggatatttctgttcctttcagaatttgtcctcttataaataattcattgaatatatttgtgcataaatcttctcatattcctgattttcttagagtgaacttctagaaatgcaatttcaggtcaaaggtcatgcatattttaaagctcctgaacattttgccagatagcattccatcaagcttataccattgaaaagtcaaagccagcatggcagaggagttcttgtctcatgcctgtcagcaccttgttttgtcattgtaaactataattgttgctgttctgttcccttcttcaaagtcatttaaatggatattttaaaaagtagagggttattaagcttctgaaacacttcaaatacaacttcaacctatgcatatctattaaaagtttaatgcagcaaatttactaatatttgcaaaaccagtttagacaaagataatatatagatatatagccagatcatgactttcatgatgtaagtgttggttaagtaaaaattatgagttttttagtttggcagatttttagtttatttttaaaagtacaatatgcaaacagaaaattatacatatcataaatatgcagttttgtgaattttcataaaactggatacacccatgtaatccgtacccagagaagacatcgaatgtgatcaattcccagaatcctccctcatgccctcttcacaatcataccccttcttcctgactttcaacactgtagatcaatattgcctgtgttctactttgtataaatggaatttcgtgtaatgtatgtattttttgtgtgtctggcttcttttgcttaactttgtatttgtaaaatttatgcattttgctatgtgagagcatgtgtttgttatagtctccattcgtttttgttttgtggccctaatgttgagtgagacctcattaagatgtcatgtcttgatacaccttacatggtctctgaatgatctttgcttgtttcctattcagcatagatctcatggctcaccttttcaaccactaatcttccaacagtcttaagttcctgtctccttttctcttcatcttctttacattgtggcctttggctgctggttgtttttgctgtcctcttcatcggacttcctttggtgggtttgaagtggctatttccatactcaccacagcccagcagctggatgtggtaaggacagggagaacaagcctgcacacctctcttacactcccttccattagataggatgcagtcatgtgtacacttacatataagagatattctaaagtacagaattatggttgggggcccaggagcacaacttaaatcctatttattgcaaaggaagaaggaaatcataaaatactggggataactatgaaatgtgctagaaaactctaccaatttgttctttattctcagctaggccattaatcctgcctggaaattattctgtttcacagacaactctcttttatttctaatagtatttatttaaaaacttctccactctccttaaacttactatgtttcatcttgccttcatagttccacatttgaaggtcctgactcccacttcacggataaattaaaagcctgtctattgtgcctcattctgtaaatggccaattctctctatatatattctgggtctcctaccatttcagaggttaccaaaaacttttgtgttaacccagtgattttttttttttttttgggcctttactttcttaacctctgctaaatttatcactattgacgtgttaactacttcttaaaatattctttttttagctttctaagacagtatctttctggctttcctgccatcttttgattctctttttttctgatatcatgtatatgttcctcttttatgcttatcccttaagcaatgttgcttcccagtgttctatcacttgtatctttttacttaccacacttttctggggtgacctcttccatacccatagcttgaatacccagtatatgctggtgaatcttaaatctctgtttccagcatagatctcttctgtgaagcttcctgctgactgctggatatctctacttgcatatcccttgtgcaccttaaactcaacatgtccagaattgaactcacatgcatctgcaaagattctcctctttcttttcttcttatcttggtgcatcgtgccttcttcatcacagaaatctggatgtccatcctgattcttttttcatgctctctcctcgtatttaatcaatcacaattccctagaaaaatgtgtcttcttaaaatttctagaatctattgactttcattgatctctactgttactactccagttcatacccataatctgtcaccttggtagtggagtctcttgatcatttccctgcatgtggttttctcttctaatctatgcatccagacatgtaagacccccatggtgtggtgcctgctgacatttccaccttcttctccgatcctccatgttctctatgctcatctccatgtcttggtttttacatgtgttgcccactctgcctggaatgtcctacatttctttgtctagcttctgtttagatttcgaaaaaaaaggtaacagttttctctgccaacaacctttgtctgactcacacactcccaaggtttcatgaagaatccctcgtatgtattccccaaagcttgccgttatgatagattacttagaaaaatgtattttaattttctactgatttgatgttacctttactagactttgagcttctcattcctcactgtatctatagatgttatttaaaatatttaacacgagatacagcattggcatggatccaatagaaagaagggtggggccctttgctatgccaggctatatctcttcaattcactggacttcacctggcttcctcctttctgcaccatggcctgaaaattttccccagggggtaaactggagcaatcatagggctcaccagatttgttttccatttcccagggagcactgtctcatgctgcctgatgttcaatatcttgagaaacattattatctgtattttatttagttctttttagtttttttcaggtggaaagataagttagttccctgttactccatcttaggtaaaagcagaagttacaccatgtctgttacctgtttgaggtgggtgacgttatatgtcagttatggacttttattgatatacttagagaataacttaaagatgaagggacatcagaaataagcatttctggagcctttattttatgccatattttttatgtacatgaatttatttcatccaatttggtaaatcttattgtcctgttttacagatgggcaaattgtaactaaccctgtaactaaccaaagttcacaaagctagtcacatccagctttcaaactcaggcttggctgctatcaaacctgcctcctttctcacttacccacactgctggtttggtaaattccagagccttattgtattgacaaaggacctcattactgggtaggtaagtgatccactagagtgaaactgtgccttggtcctgaggtgaagcgagtctttttacctatcttcttttttgtaaaaccctccagtagttccccattcctctcagaataaatgcccaagaacttacaatagtctgaaagtccaatgcagcctagccccccatgatatctttggctccacttcctcctcttctctcactgctcggtcttttctgggctgctggcctttgctctgtctgagcctgccagacgtgcctcctctcacagcctttacgcaggctgttctgtttggaattttcttccctctggtatctgcatgaatgaggattatgagacacatgtgccaattatatttaaattgtaccctgcctcctcatcaacactgtcgatctctgcttcaggttttctcctataatttaccatctcctgacataatgcacaatttacttagttattaaagatgtggggttaaggagttccaactcctctgtgcacttttatgcacttagaatggtgcctagtacattgtaggtgctctgtaaatatttgttaattaattaatgtccaaggtcctgtgccagataagacatctcaaaaaactcatagtctaatgggaggaaacagacacacaacaagtataaaacagcgtggaagggcaatagtagagatatgtatagggaacatcacaagcatttagtttattctgaatggctcaataaacacttccagcaaatggtaaagcctttgctaatcccttaaggataagttggagtctgtcaggtaaaaagaggtaaggttttccgagtagagtgaatctttgtgcaaggatatgggatcagaatcagcatgccttgtagaggacactaagatgtgatactctgggcagtgagaactcatggaaggatgcttgttaagggagtgccatgggcagatgaacctttatggagggaatactcaggctacagtatcaataatggatttgaagaagatgaaattggaggcaggaaagataatggaaggttgttgcatagtacagggaggagttaaaatgcagataaaggactgactcataaaagtttaggaatttaaagcatcacgcttttttatttgatgggatttggttagtgagggaaggggaaaaaccaggtgactccaggagactgtcagtcagtgcctcttgcacattttttttcctgaagtcaattaataactgtctatattgatcaagtgttttgttgatttgttttgtttgatctattttaaaatccttacaaggtcccattttccatgaggaggttaggaggggaatgagaaagtaagagaacctatctctgcatcactagattgagcttcagatagaatttcaacatcatatagataagataaagcattacgtatatattatattacattgatatcatagaagagcaaaactgcacatgcataagaatttatacacctatattttcgcattgagaatagaggccccaaatgtatttcagtttgcttggcagaaaagagtagaaccacactccttgatgtgaaattgcatattctctttgtgtccctctgctcttcacataccttgactcacacatgaataggagaatagggcaaagcaccatctccctatagcgttcaaacggaatgttctagaaatgagtggagttggccggggcccactgccctctgtggttacgccactgtgggtgcagggtaggtttgggtgtatgccgaacacctactgcccatgtgaaggagagcaaagcaatctgttgatgaagcagtttgttgtcattgttcctattctgatcgttatttgaaacagttgtcttggctatcgatttttgcaatgatgtttttgatgtgtcatttgaatgtgaaacttaaaattaagaatattagagttggaagagatccagaatcatttagagcaaatctactgaatttattgatggggtaattaaaggccagagaggcaaaatgatttgctcaatgtttgtggcatttcaggcagaaccaacactagacgttaacttcttgggtcattgggtcacactttggttctctttgcactctgtgagttatgaggcacctagacaaggaaaggaaagccatttttaggaagatgtgtctgttattatagtaggttaggaaggaagattgaagtttagaagatactgtcgtgtttcagacctgagacagtgaaagaggacctgaatagggtggagtgaatgggaaaaagaaagaaaaggtgaatatgacatatattcaatatatgtcaagataaactcataggacttgtgatgagttaggtaatgcagagcatttgtacttggtagttagaatatatatgttctatataggcaaaaacacatacacacacacaaccctcatacatatacctatcacagatacactctgtattggatattcataacatgcatatcactaataaaaacaaaacaaaacagcagtcaaaacgttattttctcctttaatctttgtaaaaacactgagagatattgttgttccctttacatagaaataaggctcaaagggtttaaatgtttgcctaaagtcataaattagtgtgaggagctgaggtgggacttgaagacaagtttcttaattaaaatctgttctttccacaggcgccctttcactcaccccaagcatgtagggtctgaattttcttctgtggtgaatttttaaacctgttatatcagtctattcctttattttaggcagtgcatagtacggctcctcagaaaacatatatcccacaccctcttatctgcttttccagatttaagttgccttaagctattggtttcctctgtttgacagcatacaccatagtgtttagagatgtagtgcattatggcattaattttgcctggggtctttctcgagctattcatccttcagcagctggaggagagccatatacactctaaatctgtgtactacctagcgaaatctgtaaagccaagcttcccatccaggtcatgattcactgcatcctaggagtttgtgcatagaagcttgactcttcagtatggtgtctgagtaacagatcacattcttcatggatgtgacagttgtggcttctctttgggctttgttaggcataggctagactgttagacatcttacaaatctcctctccccacagtgccttacacagcaccttgtctgtattaattgctcaaaaacattgttgaatgcatggttaatgaaagttattattggcattattctgtggacttttttctttgacatttaacatttaaatatatacagatgcatatatatacacatacattatatatacacacaaatattaaactatacatatgtattctccatacatttcaaatatacataattgataagtcagtacacagataagttgtatgaaatctgaaacatgaagttaaggttttgtgcaacatgagtgctttatattttagacagattagctggggaaatggtagtccaggaactaagcacaactctataaataagggcaaccaaatagatatgagggatctagagataaacattttcagtttagaatactgtatatttcttttttttgacatatatttgaaaagagagaaaacggtaaacccaggagcagtaatttctaaagtaataaagatttacttacatggccttctgttccttttgttgataaggatgaatagaatgatataatgccctgttctctccctctagtttctgggccactgttatattgtctaataatatccactcataggacatagggtggcctttctctctttttataagggtataattatccagtagaaagtcaatattcctttcatcaatttttaaaattacttaatttcttttgtttcgataggtataggccctgcacggccttacaaatgagtaagggatacagcccaggagcaatgtccagctgcactgtttttacttacataaactcatgaacagtgtgtcagccagctttacacactgtgaccgtgagggatgtattttcccaaacattactgatcctttattgaaatggaaaatttagtttgcatgtggaataatttccctttgcaagtcaattgtgatttattaaatttccttgtccttcacaagatgtcaatggtgttatctcttgatacacctcaggacacgtcttgtctgtttgtcgtcactaggccttcatgatatacagcctttatgatatgtcttcctgaactctgaactcttgtaggaaatggattctatcatataaaactcagtatcctccaaatatgcctcagatgaagtagatttcagataaatatttgtaagttaatgagataattttatcctgtatgaaaataattctgaaatggaagacagcatgtagatacatcgtaaatattgttcactctatgtggacatctctccatggcaaaagaagactcagacaaaccaaactattatactaccaccaaaaaagtctgtgcaattaaaaaacagtgcaacacaatgcaacaatgcatccagccatgatggtctgaataggtgcaatctcattaaggcagaacacccccatgactgcttcatcttgcatctgtggtgcctagcatggcagccagtacatggtgggcattaaagatagacatttatgaatgaatgaataagacgccccacatttaaaactcagaaaatatgttttatgctattagttttgcttgaggtcccatttagtatgtgttatgtgtgaaggtgggaatagtggcattgtaaaatggaaggagtacatttttgaggtgattagccatagaggaaaagctgtaggaacctatttgggcaaatgacaccactgtgcaggaaatctctaaggagatctgtaattcttggctttagtacaacaccaaaaaaaaatcatccataccttattatgcagaaatttcccattattaagagatgttaatagtgaatatgcattcatattcactattaagagaatgaacacttattcagtatcccctctgggcagagctgattgataaacatcctggtgttaggcaaagactatagaaagaaggggtaccttgtgtaaaatgtaggttttctctcctgattatgatttttgccattactacaaacaatatgttgcatttgcatacaacttacaattttgaaagcatcgtctcaaacatacattattcttcactccatcttccttgttaggacaagagctgtttttctggtttcatacatgaaagcctaaataatgtctctcacctgggaaaaagtagagacaggactagagcccaagccttccaggcatccattctttctgcctgcccacttagacttaaagtaagactctgacagcaggctcttgaatttacctttgcttatattataacaacatccaaagcagggacaaccttgatgaccttgaccaactttaacacttgtgtaaatacaagaaaaatcaactttgctaaacttgtggtgtgcccataggtgacagtaagctaaaatgctaactccatggcataactgcatttgctacatgcagacagatagagttgatgtttgtcatggtatgagcccagggaatcagacaagtacttctctaaactcttcccactcaacttaatacaaggtaagcaggtcctgcagtagttcaaggacctgctgcacactgtatacagaatagggtactgtttaacagccttttatctgtcatacgtttcttttcacttactactgttactgtagcctgcctccacatcaagcttcgctgcagaaaggagatggatagacacctttaaagaattattcttcccccacttcttccctccatttggcttcctcttagactgtgcctcaagtgaagacaaggctagttacggcctcattatgcaagaggtcagagtgagatgtgaggtgtctacctttctctctaagcagatgcacccaaccaaagtgtgcagaaagaaccactgctgttcctactacacgctgattacagttgcacctggagccacattccagcatcagtgtcattcagatcgtcttagttctatccaagaattcttgtagaacctaagaaggagagctgatcagactaccagcacattaactcaaacatgccacggagtctaaataaatcaagtaatatcatacttgggataagatttaatatactgagtttgtgggcgagccacgatgttttgaatctattccatatgcctaaaatttggtgatgatatgtcttatttagcatgagttctcaagagtagccttagacattgtgcatttccgtgtcttgatatttggacattttcttgtgggtgtcctgaagctcttcctcactttgaggtgacattgaattgcaaagtctagacttttctgaaattgagaattatattatgggatgggattgaaaccatggttttctattgttttgcttaaagctaactttgaacaacaacagctcagctttagaaggtgttttgcctataaaaccattcacataatcaaaagctgaagtgtatgcaggatcagcttaatcaggacagagttatggatagccgtatacttccctagtgtttatagataggattgtgaatttggaagggaaacccagtcagcctaaattacttgtgttataactggagagttcactattctccattataatggggttttgaagatatgatatgcctacaaaactcttttttgtttttaaacttactatcttttttcattagtaaatatgtgaaagttttagtatcagtgctttttgctttgaaagggaatacaattattaattttacccatttcttattatgatattgcaaacagacaacagcagagacaaatacacatgtgtacccacttgctacctatataaggccttataatcattttatattcactatagatcgtaaaaataaacactacagactctgatgagggtctctatactcctctgagatatcgaccccattgctccttgagaaaaacactatcctgaatttagaagttatcattcccataagtgcattcacattatattttagtacatatttatgaattcagaaacaatatataatatgcttttgccagttttaaaaatccacataaatataaaattgtatgcataatgctgtgacatttaaaaatctaagattatattctttatatttattcctattaatacatgtagctctagctcatttattataaccgctgtatagtatttcattgtaattatatggcatagactatgctctcttttagatagacatttaagttatttctaattcttaactcttagaaaccatgttatggaataatttttctggagttgaaacagaaaagaggaatttggggacttagtgcaaggtacttgcttcaccatttattgtgtaatacaagttttaataacagtaaattaaagtattagaatgtgtgcattcaataataacattttgtaaaaatatttcaaagatttcaataaaaattaataaacacaattggtagaatatccctctgcctgctattggctttgctgcctccctagtctttagttccctcaacccagaatacccttggaattgccccttctgacttggctggccctgtaagggcttcctgtcttcctgctgagtgtatgcagctttgagtgaagttctttctgtatctctggcaacagttttgttttctctctctacccaccttgcccactctctgactgcttcccatcccaaaggagagatgtgttttcagatggcacttctcatctctactcagcctttttttggagggtgagtggctagatatgggcgatggggaacacaaagggaaatgctaagacacaaggggttttcatgagtggtaaaatgactggagggtttgcaggaggatcagggaggagaaagagtaaggaaaggggaaggagagagggaacagggaaaaatctaggaggggtggactaagatattatagtttcaaatatcagtatttatgcaaaatacacaaaaatatatgctagtactttaaaatggcacctattaatggaaaattaaaaaccggtgttacagttagtagtagtgtaaacacattttcaactttactagataatgtaatatttctttccaaattggctgtaccaatttacattcccaacagcagtgagagaattacccattttaccacactctagttaacgtttgacctttatttgattttgtaatgtttgccagcctgataggtttgatacaatgtttcattgttgtttaaagttataattcattcactgattattaggactgtagtgaatacttgtccagtgcatttttataacttttataatttttaaaataaattttattacaaaggtagtatagttttataatatcattaaaatcattaaaaacacaagcaagcaaccatcagccgccacataaacatacctcagtttgacatatgtatgtgccaatgaagccgttaccacagtcaagataattaacttattcatcaaccccaaaagtttgctcctgccccttaataatttattcctctctacttattgttacgggatctttggggtgtcaattttctagccagaaacctctgtgaccgtggcgcctttacccaggttcttgtcctgcatccaggaagaatgaggtacacagacaagtgaagagtgaacaagataaagatgagttttatttagtgtcacaacagctcagaggagacccacagtgggtggctcctctctgtaggtatgtcatccgtggagtgttcagttctcagcagagaggaggctctggagagagtagcctgtctctgcagctggttgtccagatggctgcagctctcagcagagagggtagctcctctttctgctggttgtcctgttgtctctttgcccccttcggccatcctctggctgtcctatgccctgctctggctgagcccagggcttttacagacctcagaggggaagagggaggaagtgcctgccaaatggtccatgggtggccattggtggcccagaagaggcaccaagactccccactctggtctgcaggactggcgtcccagcccccagccttcaggccctcactggcctgaaagtggggccttactgaggaccctcctccttctgctcaagaatcagtctgcctcctactgccattcatggccctggtctcggccccaacccctgctctgatcttggagcaggtgccaggagcagagagaggccaggcaacgggagcaaacaccccccccccagcctataaggatgggggtccttcctgggggcaccgtgggtgccagtggcagagacgacccagatcctgcacctgggagggcaggcacagctgcacccagaagctcccaccctgccaacttggaaggggcgggactcctacttgtccccagctcctgccttctccatggagtgggaggcccaggtctgcagctgtgggtcaggtggctgcagctgcacccaggagggcagattctgcctgttcttggcacccctcaagagcacaaggaggcttggatccacagccgcagtttgggcggctacagtggcatccagggagctcccgcccactcagaagggatggggctcccacccgctccatggagtgtgcagccccagcagtgcctccctgctacagccagtgtgatggcatcaactactgccatcactaccaccttcctccctccaatctcttggcaaccatggatcttccttgatagttgctttcagagccttctgtgttgtaagtgtgtatcaatgggtcattccttttattgctgagcagtattcctttgggtggtggtactacagtttatctatccgctcacctattaatggacatttgtgttatttccagctgtttaattgaccacttaatctttcacagaagaatatatatatgcgcctataaattttgtcatatgcaaaatgttaaataggaaataatccctgttagtattgtaatcagtgcctgggacaggacgtgcataggtattcagtaagtaggtgttaaaggaacttagacatgttttggcaaaatctgcaatctaattaggaaaacaaagcaagcacacctaagaaattaaagtgcacagagcagttgacctgaatggaaatcagtaatataataatatccatcttctacccaaaggtcatgacacccccccaacctcgccatcagcacttacttggaagtctcccttctttcagttcaaggcatcctaaattaaatcactcatctttcactgaaaacagtccctccactttcttcctgttttgttcaaatcttttcctaactactgagttcaaaacctgaattatttttgtaatgtccctctgttcacatttgattagtttccaagttctggttattctgcttcctaaatgcccccactttgttgccgctatgactgctttagtttagctctaactatctcttagctcagcacttagtcatctatcttgcctccttgactggctttcccctctctaattcagcctccacatggtcatcacacacttttctgaagtgtaattttgaccatgctgctttgttgcttctacctctccatttgctcctcattgcctgtaggctaaaattcagacttcgtgggatagcactgaagatgctctatgcttttcacgctttctccctgacctctatcatgcagaaatatttaactgcttgcaggaacgtgaacacacgatgccgtttcccatctccatgccattgaataaacctgtccatccatcttctggaatgtttcgccaactttgaccaggagaaaactcagaactcagatttgaagccttcttttatctcctgcatacatgtacatttacagaaaactcagtaaagttaaccactcctcatctatgccaagtgtctacaacactgcccttgcactgttgccagatcttccatgctagactgtgaccacagcaagtggctttttacctttgaatctagtaacaagtacaagagcagttacctaataggtactcggcaaatattttgggtgctgaataaatatgagtaactcaaattatggtgctcaataaatacgaataaatgaacatgtgactgaaataatctgatcatcaagttgtaatatcccagccaacatatgcctcttgtattttacttgttttcacttgtcaccaccaccttagtcaaaaaccatttaactttcttcctgaattgttgaatcagcttgctaacctatgtcagtaaattatccctcttttctaaactatagtaacacagattagctagactaatcttgcaaagactgctttaattatgttatttccccattagattccactgcctggctttcaaaagctctagctactctaataatcagacttttttctattgtataacacagtctccatttcagctaacccattcttcccacttgcccataacaagctctgttccttccagcttgtgtgccggtgctcacatttatccttttgcctgaatacccttgtcctctcttcccatctgtctgaattctactgactatttatgccttgctaaagttggcacctgcatcatatctcctttctatctatatctatatctatctatttatatcacatctccttggaacttctgaactatagcaatttgctattcaaagcgaatagaagttacaatgtacatattttctctctatatatcggaatctatattttcccccctaccctatactagaatataagctccacaaaggcagagaatttttgtctgtattgtctgtaaaggaaagccaagggctgagacacacaatatttcttaaataagtgaatgaaagtatgaaattaacagttgcatggtgctggttcaaataatcctcatttcctcggaagaaaagcactttgaagaaagtatgaacaaatttgaatttctgaattttaaagtatgtgatactttagaggcaatttcttgagtggaattacaaaaccatattcacttatctaaaatgtagcattaaagttctgaattttagaaccacttctgaacgtcatgatttctgtacaagatagtgtcaattagtcaatcatgttatctggaatttttatgcattagtataaattgaaattaactcaacatagttctattacagaagtggataaatggagcatgaaatgatatgagaacattctactcaaagtaaaaaagtagattcaggttcttggatccagattaatgtgatgatatctgtattttgacaggggtaaggccattttgcaagtctttcctaaattccatgattgttaaaaggaaaaaattaaagctcactctattgaagtccttagctcaaaatttgacacgtactagatatgtgttaaatagttgaatggaagccattggagaaccattttttttaagaggagggggacttcagaagggcagtgacatagttccagttgaatttgagaaaaaaattagggtaattgtctagagaatgatatagagagaagacagaagatagtaaaaccaggaagttctttgttcattcatcaaggttcagttataaagcacctactacttggtatatacctagggctgagtgaataactaagattctgttataagtatagcctgctggaaaaaatttagatgaacaattatgatgacaaaatttaagagtgattagagggaaaggagtgaacactttggaatctattctgctagaaatgctgattgtacttggtgaacggtgtaaaaattgagggtttgaagacacactccagtgttctgatttgagagaccaatttaataatatagttagagataagagtatgagaaagtatgaaaggaatgatgatggggttggttgtggacatatgaagttagaagagtctatagaaaatccctgtggagataaccagtatagaattataggtaagttctggtgctcagagagatatgagggctgaggagggatgaatttggaattaatcaacaaaaaatagttgttgaaaacataaatccatgtggaatttccccagaagggtgcttacctcattgagatgaaataagggctgaggctgcagataaggacagcagaatgttaagaggacaagaatgacactcaaagacagcacatcatggctagacgtgacgtcaagaaaccaggaaagagtagttgtatcacttaaaatggtttcaactacaagtaatagagaacctgacccacccacttttaaacaatactgtaatttatctgctctcataactggaattccagaggtagactggcctcaagagtggttgatccaggagctcaataacttcatcaagaaaccagtttcctttgtctccttttgcactgccatccacggctgtgaatttgtcctacatctgtttctcctctggggatagaatgactggtaatacaagtcagactacatgctccctcctttatattcagcggaagaggcagtttgaataggaacctctcctagaagaatgaagaggaacttacccccaagtctccagcaaagtgctccttctgtcccattggcacaaatttggtaaactaattattcccaaaacaattattaatttagattaagaattaggcctccatcttctggggctgagggtagatttagcttctttttttttttttttttttttttttttttttgtgaaatggagtctcactctgttgcccaggctggagggctgtggcatgatctcggctcactgcaacctctacctcccaggttcaagcgattctcctgccacagcctcccgagtagctgggattacaggtgtgcgccaccacacccgactaatttttgtatttttagtagagacggggtttcaccatgtcagtcaggctggtctctaactcctgacctcatgatccacctgcctcagcctcccaaagtgctgggattataggcatgagccactgcacctgtccagatttagcttcttttgaggcaccagcctttgctggtgagaggtgaatacctgaataaaaattaagattctgttaggtaaaaggaagtgagacagttaatgcatagcagacaacaaggagcactacagaagcattagtaagcttaggagggagaaaggttgaggagaagttattaacattgtcatataccaaatgggtcaagggaagaattaaggagaggcggaaaaatgcccatgagagcagtaattagaatgtgaccccagagacacaccatggattctaattaaagtggatagagggtgactgtgaggggaaaagtagttatgaggaattgagtctagtttcaagattctgagttttgaaagaaacgataaagataatagctagaggggggaaataatgagaatcaggggtttcttttttgttttgttttcatgatcatcaattaaatgtttcaaagttagtcagtgatttctaactgggctctgatgaaggggctttgagtgaccagttgtatgaacttagtcaacttgtcaagtctctttgacttctcatccattgaaagggaaaaaaagaaagctgtttttatcctatggagttggtggatttcagaaatatttttcttcagttttcttttattttatttataatttcaacttttagaatcacaagttacatgtgcaggtttgttatatgagtagattgtgtgatgctgaggtttagggtgtgaatgatcccatcacccagattgtgaacacagcacccaacagttagttttcaacccttgcccctccctccttcccacctcgattagtccctagtgtctattgttcccatctttatgtccatgagtactcaatgtttagctcccacttgtaagtgagaacatgcggtatttggttttctgttcctgcagtaaattcacttaggataatgacctccagctggtacatacataccatggaatactatgcagccaaaacataatggaatcatgtccttttcagaaatattttaaagaagagaatattgtttatattttaggtgtgtgtgtttaggagatattttaaatgttatactccatcaagtcttcaatacatttgggggaaacagaaaataaactaattttactttctacctcattgtttggtcttaggctaaaatccatgttttacggagaattcaagaaatttttaaacttcaggtagaactgtgttttttacaaatgtatagaaagcatagtgcctaatgcatggtagaaactcattaaatgattattaaattgttctacttttcatatttaaggatgaaaaatattagagattctccatcaatcagattataaaattctttatactggagaaatttcttataccatattttttatttgtcagagaattgattctaaaaaacaataaaactatgccacaaaaaaaactagtaatattgagtagtgcagcaaaacctgggtaactaagtctaactaggtaggttaattgaagttactggaaaatttattcatacattcaacaagtgttcattgagcacttattatgtgacaggccttgtgctaggcttcttgctctcatagagtatacattctagagggagagccaattaaataaattaatatacaatatgtcagggagataattgccttgaagaagaataaaatgagataatgggatagtaggcaattagtacaaatgttttcattttgtatgaggagagcaggaagggaatctctgaacaggggatgtttgagctgagacacaggacatgaagaatggctgggagaactgtgttcctgggaaaggggaaatcaagtgcagaggtcctcacctgggaacacattgggtgtgtttgacaaacagcaggttagactggggagatgggatgtagggaattggggctctgtgagtgaggggaatcacctaggagatgaggtcaagaaatggggcatcagtgtgccatataaggaagcaaggccttagagactgtgggaggaatttgggaactactctaagagacatgagaaggcattagagggtttagagcagaggactgattgcattgagctggttatcactctaactgccttggggagaataggctgttctagggcaagtgtggcttggggagataaagttcaaacaaatgtaactttttgtttccttgaaatatttaataaagtaaagctacctattcagggagtttgtgcaagtaatagcactgtcagatctactacaataaataggtgataatggtttgtaattagcaaagtaactattcatatagaaatcattcagttgatgctagttgactaatcactcctcatgcaatcttactcttgtatttgatgaactttgttttgaagccagtgcaatatgaagtgcaccatccctcctcagcagggacaaattaccagattattgagatcagtctccttaaaattaatgttattataacattctgttgtaaagaaagaattatatggcaggtatttttgtcaagcttttaggaactgttggagtgctttaaatttataacattgtgtgttccccttaaatgttcatggttggaacacatctaattttatgcaatatttaaaaacttttttggcagtgagattcatagggcagaagttacagaatgatttcattttggaaaataagtgaaaagtaaagataacacatgagcccaataaaatagtccattttcttgatttttttttttttttgccaatatctttttcatgagggcagaccatggtgcattattccacccccgcccccagcatttgcaaaccaccagtcatttccttagggaccttaacaaacggaagcattgaattctcttcagtcagtggtgcctcccacctgggaaaaagacagctctgtaattgaatcccagcatatgcattgtcatccctcctgcctgctctcctggtgctacagcaaattaaaagatctccaagggtcagcctgcctcccagctgccagccccagtagacatgagggagccagcaaggaccaggtggagcagttttgagttgcactaaacacacggcgcaaggagattggccataacttcccaattgaatatttatgccagccacatttctcatcttgctctttggcactgaacacagggctgagctcctgctgatttcagggcgctgcattgtgtttggatcagctttgtgaagtattacaccagatgagaaatgggcccaagttcctatcactaagacggctggttgactttttttttttttttcatggagactatcatgttatagtatcaaaagctggggcagtgagggagttccctgacatctcctgacactgctgttacatgaatcgtacacaacttcaaccattgcttgctatggagtggaactttaatggctcctattcagggacagacaaatatactctgatttgtatattactgcatgttcgtctttttttttcaaggttttatttttgtttgctaaggtcagggacttatcacagggccctctcatcacatttcacattctgatccctcgtggcaggtgctaacttccttgctctcaaactgaatgggttgagtaacctcataaagatacagaatgtcttggcagagaaaggaaaagactacagaatgcctgtctatggaagagtctcagtgttatttagttattagttagccctgtaaacccgagaagatatttggaaacccatctacacacacccattaactttttctaggtggtggatcacagacttaaattcatgttcctgattcctaatccatattgttatctaataaaagcacattccttatgtagattttatcatgaaatttgcttaaaaaaatcattctcttcaattgtatttttgtatagcataataaactatagatcagtgaaccactgaacttcttgtgaattgctggttctaaaatgaaattctcaaatgattaaatttaaataattaggaggcagtgataatgagaagccaatataagttctgtaggcaaaagacatgccagagtaacctcatagtcttttgtgacagcagtaccagaaaggaagagcaaagacatgcattacacttagaacacatagaattcagccaagcgcatgccagaggctcggatatttatgagaaaaagacagaaattagctcaataactattcccgatgaactgatataaatctggaggtatacctctagtaccctctttaagacctgtccttggcattgtgcttttcaacatgactacaggcatgcgccaccacgcccagctaatttttgtatttttagtagagagggggtttcaccatgttggccaggatggtctccatctcttgacctcatgatccacccaccttggcctcccaaaatgctgggattacaggcgtgagccactgtggctggccaacatgtttattgtgagggcattgagggcatgctaagaaagtttgtaggtgagataggaacttcactgggaaagaggacattgaacagcagaatcagaatctaacagacaggctgaaacaatggactcaagtccaacaagatggcatttaggagaaacacatgaaaagctgttcactcgggtcccaaatgccaactgcatgtgtagtgagcgactgggaggacacagggctctcaagcatcacatgggacaaagacttgagaatttcactggctgggtttaggcatgaattaggactgcacagtgtctgaggacaaagctaatgtactcttcagtctacactgacaagtgagagttgtaatagccttgccatattttggaccacaactgtgtgactatggggaccactgttaaagaagaatcctggagatcttatggaagagaatgctaggaaagtaaaagagtttgagatggactgagtggactgagggaattggagatgccctccctgagagagaaaaagctcttgggcaggacaggtcattgatgtgtgaaagactgttatatgaaagaaggtttagacttgacccatgacaataaatgaattttcttggaccaaagtttcagggaagccccggatagaaaactttctgatagtataagttatctgaaaatgaaagggctgcctcttaagaaaatgattttcttgacactacaagttttcaaatagacaaaccaggctgttttattgtctgtgttgtagaagtgattgtagtaataaaatttatgaaggatgcactgtaggccaacctttggatacttttttttgtgtgatcttatttaattcacacattagccttccagaggatattattatctccaatattgagactaaggtcccatgactggtaaatgaggcagagtttaaaattcaggttttagttgacagtagagactcttaacactgctctcatagccttaagcacaatattccattttgcttttgaggacatttaatgtcccttcagaactggaaatctgatcattttaataggttaccaccttttttttgtacattatatcaatgctttgctcttgttagtacaacattgggaaacctagatttgtttatcctgtgaacagtttgatctttactggtagagttttttcttagaaaaaaacagtgatatgtttcttagtacaattgatggcattaaatgttttgattgtggtcttatggctttactccactacttgctagaggaaaataattttctgcttcattaatgatggtttgaactgatctgacagaaagtgaatcctgtgccattcaaataatgcttggaaaatccattggatttttgtttatttctttgttttccgattaagggggacttttaaaaacaaaaatttagggaaatgcttctggttttcggaaacatttattcacatttcttggggttggagagaactgacatgttttaaatttgttagagtcatagtgaacaaaggggaagagttgcaggtctcaagtctagagctgtaggccctggaaaggaaaaattgcaaaagtgtccagagaacagtgtgttcatggctttatttgctgttagtccgaggcctgaggtcaccctggcagatgggtcacttgcactgcaagcactcatgctggcctcagggacagggatgaggtcactggcacatttcaagaacagcttcctttctttatgcatacaccactttcctggtccttgttaagggtctccttcctcttgcggttcccatctctgcagctgaccccagttctgactgtgtctggggaaatgggttggtgagggcctccttctgggactatctgtccacctgatcagtgatatagacactgtgccgcggagaggagccacatctcccagccagcctgccagcagagtaattggctcagggttacaagttgtgacaagtggtttttggatcctaatctgaaatatgtcggtttaacatgacctggcattgttacctgatgtttttaaatgcccgtactttttccagaaagtgggaactgatacacagcagtggcatgtcctactaattttcataagatctaaattgatcaggatgctttattactttttttattccacagtatatttttcctctttgactctaaagtgcatgtgcacgcgtgtacacacacacacacagacacaaacatgtgtgcacacacacacaccccccctcactcatttgggagatctaacactgcacatataaatattgaaacttccaggctgggcgcggtggctcacacctgtaatccaagcactttgggaggctgaggcagttggatcaggaggtcaggagttcgagaccagcctggccaacatggtgaaaccccgtctccactaaaaatacaaaaattagccaggcgtggtggcacgtgcctataatcccagctactcaggaagctgaggcaggagaattgcttgaactcggaaggcggaggttgcagtgagccaagatcgtgccgttgcactccagctctgggcgacagagcaagactccgtcttgaggaaaaaaaaaaaaaaagaaatttccacatgcatttccatcagagaactaattccatctccccttacctagccccttgctctcctgcctagcctgtgggaatctttgaagattctttgtattctaagaactgtcccaagaacaaagtagatgctcaagcaatgtttgctgaactagactacatttgattccatgtaaccaaatgactttatctacatttttttctattccttttattcattagcacccactaaatatactccactattctaggaatagggaaaaaaattcatgaacaaattagaaaacaatcctaccctgatggtgccttacagtcttaattacgtgaatagaagctattgttgttattcttacttttcaggtaaggagaattgaggcttttgtcacataggaagaaaaaattatgagcaagtcttgcccttaaaatcattctgatggtcaaatgcaaatttgctattttggtggactcttgagaatgtgggaaatagacccatgtccactttatgcaaagagaaaaagctggcatgagtgggagtgtttgaacatcaagaatgcttttgcatttcttgggttgtgaacaactgatggagtcaacttataaataagcaggatcatgactcattaccaggatctgtacagaataaataatggcttcagagttcgagtagactctaaactacacagttttaaggcttcccctttcttgggtttgaagaggatatttcaaattattagaaagaaattccatctatgctacagaaaaattgcaggaaaaaaaaatccccagaaactagttgcatgtctttacatttttctttcttttccttttttaagtttttgtgtttatgactaagttcattttttatattgtctggaaagatgctaatattcaaatggcctcatgacataaggaccactaacaaggggttgaaataaacatcctggaaagaaagaatgactacctttaaatattatgagcagtgtacatttggcagagcagatccttatattgactttagtaacctgaaaactattcaaaatgttttatttcagggatatgcattcctgattgtgatttcatggtgtgaataaaataaagtcacttaaattgatagaaacagtctgagctctggcatcagataaacatgagttcaagttctggtgctgctactttctatctgtgtaaccttgggactgctgtgtatcctctctgagcctcaatttcttcatctgtaaaatgtggaaaattatatattaatacgttattttaaagattaaaggtgataatatatatatgaaaaaccaaacacagaatgtgtcatactgtaatagtccattttcatactgctgtaaagaactgcccaagactgggtaatttatagaggaaagaggcttagttgacttacagttccgcatggctggggaggcttcaggaaacttataattatggcaaaaggtgaccgggaagcaaggcaccttcttcccaaggtagcagggaggagaatgaacacaggaggaactaccaaacacttatgacaccatcagatcttgtgagaactcactcactatcttgagaatagcatgggggagaccgcccctatgacttgattacctccaccttgtctctcccttgacatgtggggattatgaggattacagggattacaattcaagatgagatttgggtggggacacaaagcctaaaccatatcacatacaatatatacacagtaaaaactgatacccattaatcatttcctgttgcttaaacctaaggtaaaatttatagattttacattctgtataaattggaattaaaaagaaaatgaagtgtcacaattaaattaatcacaaaacatataaaaggaaatacaggaatatttttgctgtattcttagtagccatagtgtatctctgttctctgaagacttttagttgcaagaaacattgacctacctaaatgaattcaagcataagtaactaaattgtaaatatctagataattgcatttcggtttcctgtggactggaatgtagaatgccaaggctatttttattttgaggtttttgtttttcaggggtaacattttctgtttcttctctgctccgttctatggtgtgtgcttcatccttttattcctgaccggtgttccttctttactcatcttgtatgtcgtccagattggctatgagcccctacactactttgtggcttcagtgatatcattaagcagatacctcccccaggatcccttattcgaattcatcaaaacccagctaagaatttctgatgacattttctagaatctttaagtttacattaatttctatctgttccactttatggacgcttactgtactttaattttctattcacaggacgctgctttgtcatttagatggtaaactccttgagggtagggccatgttttcttcactcagcaatcctaacacctgtgacagtgctttacatgtagtaagcaaccattaatttgtttgatcatttaaattaaaagtcttggccgggtgcggtggctcacgcctgtaatcccagcactttgggaggccgaggtgggtggatcacaaggtcaggagatcgagatcatcctggctaacacagtgaaatcccgtctctactaaaaatacaaaaaattagccgggcgtggtggcagccacctgtagtcccagctactcgggaggctgaggcaggagaatggtgtgaacccaggagacagagcttgcagtgagccaagatggcaccactgcactactgtactccagcctgggtgacaaagcgagactccgtctcaaaaaaaaaaaaaaaaaaaaaaaaaaagtctttgggttgggcgagtctagtagaagataatgactttacgagcatttagcattgactgtaattaagtctgttatcgggatgtgctacagatactacttggtactgtttttgagctcatctttgttcttggatttcacatctctttttcttctgtttgttccatgattggcaaatcttctgattcctgactgccatttaaactcatttatcccagtttttcacacttaaattcaccttgtcacactcacatgcttgatttcacagctgtttctaagatggttatggcttacacaccatttcactcattcatttattactgaaatgtttcttgagaaactgcttttcttgagaaactactttttcaggcagctttgcaggcaataaggatatagcagtgattcactggaatgaaataatacaaattaaaatcagcaaaggaaaaaggcatatggggcagagttcaggagaaaccggagtttatttccagttgtcttctgtccagagttgtacaaatagcacttatttgtccctacaacaatgtgcgacagtacatgcagagcgttgccaatggtggatgctcatccaagccttagtgcccaggggtcactattattggaggtcagttatataaacatgtctgaccacccatgtggctgaccttcattactgtttttagccccttcataagtcagactgattctgcgtggctcaaagcccccaccaggaatcacattgttagcatcattgttagcaaagagtatctggtgtggcccaaggctccagctaaacacaggtactctaataagttaagatattccaagggcttaaaggttatctcccaggaattggtcaagggacagacctttcttttgaatgtgcagggtttggacgatacactttttactgcacaagggctaacctcacttattttctttcttctctcaaggaccaagccctgcgccatctaaacaattgtttccaacgttgtttcctcagttttagttttatagtggcaatattaggtcccagttactctatcatagacaggaattatagtcaagtaatttgaacaactctttataaaatgttatttcattcttattacttcctttctatgcttttgaatatattctataatgtgcctatataaaaatgtacataattaattagcacatataaatgacacctaaataaatatgtacacatatttgaggtgcttactttttttattcaattaacaatctagtagtttggaagctactgagtttgacagctgtttatttgcatctttaataggaagggcacttcaggagttaacaaagataaatgaaaaagaatcttgttatcacagacatcctgtggcagcttcttttttttcatttgttttctagaagaacgtgtacacaaatgacaataagttaagacagagtgtgaaaagtgctgcagaggaaggtaaaaataatataacaaaaatatgatagtatgaccaggtcacttctggttttgaggaccagaaaaagctgtttggagaaagtagcatttctgaggtatttaaacattgattaagatggttttcaggagctatcagacaagaaagatgctgtacaagctaaaattgtgaaggggaaattgtgacaatagtacaataatcatttctgatacaagaaactgtatactaggtgattacttgaagataaagctgaatggagagttgtgaatgtctgggtaaggcattgggacaggatagtactgattatatttgtaaagagaagacatataataagagctaagtttggatttctcagaaatcacatataactttatttttgttcccctctatgcatttcttatgattggctttaataaagcattctgttattttcagaatttgactgatgtgtttagctgtggtttttctttttcctatttgatgtttgtggtgctgtaaggctctggggttgatgtttttcatcagatttgggaaaattttgaccattacttattccaatattattctgtatcattctctttctcctgtttttttgataatattacacaggttacttatactcaattaagtttccactcccacttttttcctctgtgcttcagtttggataatttgcattggcccagcttcagatatcctggtcctttcttttgcaatgtccaatatgctgttaagtccactcaaataatacttatgtaatatattgttattttcattctagaaattttatttagttcttttttaagagtttccatttcttctccctatgcaatatagagatacatactgttataaataaagcttcaatgctgcaaaagaaatggcactcgaatataaaattttctttttaattctcagcaaggcaacatacttctatagaagggtgcgcacttacagatagagcaatggtgagtgcacacctggacaacagagggaaaggggttcttacccctgaggcacatagcccctgctgccgtgtctttcccctattggctatggtgagatggctaaactaattctgattggctaatttaaagagagtgacagggtgagtggtctggtggaaaaaaatggttatccagggtggagaatgagtcagggcggagcaggtagtaggtaattggaatgagttgggatgaagcaggtaatcagaatgagccagggtgaagcaggtaattggaatgagtcagggtggagcaggtaatcagaatgagtcagggtggaacaggtaattgaaaagggttgctttatgaggaagttaagtttaaaagtagaaggcaaagaatcaatactgacatattgattctttgaaaagaaatttagaactcatatctaacaatacatatatttttatatatatgttatatacatatatgtattgatccatatatgacagatgtatatatggcagatatgtatatattaatacctatatatggcatataaatatttatataccttttgtgtgtatcttttcctataagttacttaatatattcacattagttttaaaatccttatctgctagtttcaacacttgggtcataaacaggtctgcttttatttactgtgttttctgtccactaggagtcatatttttctgctttttgttaggtcacaaaatatttataatgttctgaacattatatacaataaatcaatagcgattgaagcatagtatttcttttgtgttttatttccccaaaaagtggtagttctttcctctggcagttaaggtgaggatctgttcactgagacccttcctagagttgagcttaactggagctagactatgattagcccaacttccatccctctgaaaaatcactgcttttatatttcaacatttgaactggagaggcattgactgaagttataattttttagggttttttttagttaatatttttatttagtactggcaaggtccttatacatgtaactttggtaaattcactcattagttctagtagtttgggggtttggggtatgaatttcccagaattttctctataaacaattaaatcatttgtgaattaaagttttttctttctaaactttgcttattttatttatctttgtcttgtactggctaagattgctagtagaatattgtggtgaagtaggaaaagcagatgtctttggcttgctaccgaaataattcattatttcatcaccgaatatgatataagctatagacttttcaagagtgcttttatcagacagaggaaaaatacttcttttcttagtttgccaagaatttgtatcatgaatggatgatgaatattgtcaaattttttttgcactcatggaaataatattatgttaatatattgaattacattgatttccacatgtgaaatcagctttacattactggcataaagcgcacttggtcatgatttttttctattgctgggtttgatttgagaatattttgttaaatattttctcatctatgtttataagaaatatatatccatattttcttttcttaaaattgttcctttctggttttggggtcagggtaattctggtctcctaccatggaatgaaaagtgtttccttctattttttctgaaagaatttattaaaaaaattgttactaaaaaaaatttttttttaaataacagtagcaaaaaaagtttgctagtgtttattaattgaaccatatggccctggaggttttttgataaatatttaattataaattaagttttttaatcaatgcaggactatttagattttctatgttaattggatcaattttaataaatgtgtctttcaggaaattcactgattttgtgtgtctttgaattaattggcataatatagtttataatacttccttattaccctttcaaaatcattggtatctctcatgatcatcttttggatttgtaaattttctctattgttcacagattttgtttcaattatttctactctttattgtttccttctacttaccttttgtttaatttccttttcttcctctagtttcttaaagtggaaacttaggtcacagattttaaatccttcttcttttctaatataaccatttaaaggtataaacttctcattaatcactactttatttacataccacagtttgatttgatcttttcattatcattttgttctaaatatttattatatttacttgtgattttttttcctttggttcacaaattatttggaagtgtagtgtttaattttcaaatgttggggattttttatatgtcttattaccattgctttctaaattaattcattgtggtcagatactataccctgtgaaatttcaactttaaaatctatcaatatttactttatagcccacctatatcccaggtctgtcctcttgatagatgttccatgtgcacttgaaaatagtgtgcattttataattattgggtattagtgtcctggaactgtcaattaggtcacattggtgataacgctttccaaatcttacgtgtatattttttaaaatttatttttgtctacttttcttctgttggttactgtgaaaactgtgtcataaaagctccaactatgatcatagacttatctgtttcttcctttaattctgtcagtttttgcttcatgtattctgtatctctgcttgtaggcacatgttatgtcttcttgaataatttattgtttttcatcattttccaattcctttctttatatttgctgatagtcttcatcttgaggcctattttgtgtgatgtaatattagcttgaccatcttttttatgttaattatctgcgtggtatatcattttccattctttgaccctccacctatttgggccttatcacttttcaggttcccaggatgcagatgctgagatatttcctgcaggagtttatttgggttgtgctgtcagtattagttccttttgaggggcatgaaggaagcagggctggattcagagacgttgatctgtagcacagttgcagcaaaggtctcagctagtcttatgagaggccctagactatggtgacccttagggtaagagggaatagtcattttacccctccattgacctgtcagtagatgagggctgccctcagaaagagtgtgctcttgggcacagtgaccccgtttagttgagggcaagttttggaaaggaactcagtagaaagctaccagttggtaacactctcagcagctatgggaatgagttcttcaggatgtctgggcagcgtactaaagtagcacagtatgctgatatttaaagtgcttctctcatagatcccccgtaattaggtcttggttgtataatctaacctgaccatagtcagctttttattggagtgtttagtccattgatatttagtgtaatcgtcaatgtgtttgagttcgagtgtgccatcttgctttgtattttccatttttcacatatattctttgtttgcttccctttttttggcttcttggggttaattgaattctttaaaatgctgctttaatcgttctgttgggtttttgttatacctgatggtatttttcttaacatttaatgctagagattactccatgtaccctaaacttaacctcttatccaagtttaatataacacttcatgccaaatgaaagaaccttgaaaaatataatttcaccccactttttgctgttgttgtcacatattatataagtccctgtatacagtgcaattatttttgcttcaataggctgtctttcatgaattaagagaaaaataaaagataatcttttatatttacctatatatttacatttatgttattcttaattctttcctgtaggtctgagttttcctctggtatcttttctttgagctgaaggtcttcctttagtatttgttatagttcaggttgttggtgagaaattctctcaacttttattgatctttatgtttctttcttccatgaaagcatgtgtagcttctttgggctactgcacagttctttttcctagtttcctttcctttttcttttttttttttttcttttgaaacagagtctcgctctgtcgctccggctggagtgcagtggcgcaatctccactcactgcaagctccgcatcccaggttcacaccactctcctgcctcagcctccggagtagctgggactacaggcgcccgccaccaagcccggctgattttttttgtatttgtagtagagacggggtttcaccgtgttagccaggatggtctcgatctcctgacctcgtgatccactcgcctcggcctcccgaagtgctgggattacaggcgtgagccaccgcgcccggcctctagtttccttttcaaaagatggtcagcccttcaagaatcccaattttattttatcccagttgtagcacaatctctggagcaaacttaagtcaaagtcctattcctgaatgcatactaaaagtgttacaaaaccagctgtcaggacttgggctcattttttgactccctgggtcaacaaggtcagctggaagcttctgcttgatttggagttcacactttatttctagctactgatttcttccatattggtggcaggggatgccaaatttaggtaattaaacattttcagctctctagtgtgtagctaaggtgatcagtttaggagggtgggtatgcatatcagcttaaattgccaagatgacagaatctgcattttttcttacagtattatatggaatagtcataggattattttttgttatttttatatgtcagtgataacatgtttatttttgtgttagtaataacatgttttccatattatgttataatatgttataataacgtgttatgttattacaaaccggttatgaggcttaacttactagggaagcttttcttatttatttatgcatttgtttgtatgtttgtttctcatgaactggcatgttcatctggttgactaagtcttagatactggttttaattattactgtgagatcacgtggtcaatagaataatatttgtaatctattaaaaaataactgctgcaatttcaacttttctctgctgcttactgctctaccaggtctatggaaatgcaggacctagcaagtcctcatactcttgttggaggtggtgatactccaggtagctccaaactggaaaaatctaatctcagcagcacatcagttactacaaatgggacaggaggtaagtgtactaccctgaagatacccagaatcatatttcaatgtttgctttaattttacttcttagagatctgctaataaataaatatcttattatcaataacacaaatcagcattatatccaaggtatatataattaatattgattgttttgatgattttcttgaaatttttgctcctcctgtatagctgggaacattcacagagaatagatagcattgagcaacatttcaagggccttgaacaaggctttctttttgtatttgcccttgtaaatattccacaaactttagaaattgaggtcaaaggatttccaccctggtattagcaaaaatgtctgtatgtgtgtgtgtacacacttactactttttggttttattttgaattataaacatttttcttaaaaatgtttcttcttaaaagtgcttttttaaaaaaacacatggttttggaaatacaaaaatactcatatctgctgcattttcttttcaaagagaataacacttaacatttatttaaaaaggaattgcatttttttcagataatttctcattctattagcccataattacgccacagcatgacaacaataatagctattacttcagatattctgctttattatttttataaaatgtattcaacttgtcagaaaatatggtccaatttttatatcagaatgtgtgtttgtagagattatgtatacacttatatatagactgtattttaaattattcacaatttgaaattttgtagatccatctagccaataaatttagaattatatgacatttaatttagatattagcatttgccacatcatattttcttttaaattttaaataaatatctgtgaaattgatacacctcttcccatttattttagaataacgatgcaatctaaagttttctctgtaaggttgtgtgcattgcaacttacctgtatttaataatgttttacaccagttcccttgtagattaacattttccttgtttatgatgtttatttgtctctaaacatgcatctgtaatttcagctaattaattatgcaattgcaaatgtatagaatatttagtgatgaaaactagagtaaggtacatttaaaccttaaattgggtacaaataataaaatttaaaaactcaagcactctaggaacagactggtgaagttcactaatcatcatatgtatatatttgactgaactaaaacagacctgataaactaaaatgttgaagtcatacagtgcagttataattttggctaaaaggtcagaaaccagtgcaagcattgaagattattcatatccactcagcaggcattcagacaatgaacttttatactgttcctgttctcaggggaaaacatgactgttttaaacacagcagactggttgctgagttgcaacaccccctcttctgcaacaagtatgagagatgctggtacactgcatgtgtttgggtgtgtggatttgcccctctggattgctgtctgttgctatgtctatgtttgcatctcttttctgtgttcagtacttaaaaaggaaaaatgaacatgccttttagttgtttattgacagcagttggttatgatttcttatcaatctgtattcttagatttttttaggtcagtagtattagtattcttttcttaaatttttcataatttcacctaaatgatgcatatattggttttctaactatttatcagtttattacatgattaattttgcccaacaactgccatgtcaaacagcaattgaagcagaatggccacgcatgcaaacttaatcaccttcataacccacagactttcataatttaaattaaattcttaattaaggaaagatatttgctactctacagactttgagaaatattccaaagtatataaggtaacattaataatcaatatcccctcaccttaaaaattatcagtaatgaaagctatacatttaaaactagaaattaatattggcttttaaatttttttgaactatggatattaactgcattcatacctacacacatataaacaaactttctcctaaatcaaattctaatatcctaaaaaaaatcaattagaacaaagccatcacatttttgtggcaccacccagttgtagaatcaaaaaggagctcatgcctattggaaatgtgcatcacaaacaagcagttagaataggcacagtttgcctggaccttgctctatctctgatgaaattagaatatatgatcagtgaagaaaaactacttcaatatgctcattatttgtatttgtatagttttagttttaatgtttttcaattttatacttaaatatacttttcatacttaaaattatgttgctagaatttagatactcttaattctatagcagggtctttttctctaaagggccagatagtaagtatttttggctttgtaggccacatgtctgtgtttcagctgctcagctctgccatcatagtgcaaaagcaacatagaaaatatgtaaatgaataagcatggctatggtccaataaaacttcatgggccctaaaatttaaatttcatataattttcatgtgtcatgaaatattgtaattttgacaactttttaaacatttaatatgtaaaaaaatgttcttagcttactggctgtggtctgttctcaaatagtgtttaacacaagcaacattataatagtgaatatgtgcaataaatagtaatttacctctgatctcaaccagaaacatttttctaagtggtaagcatcaggctttcctggttcttaatgtcagtgttaaaactcgtgagtccatgggagaagaacaaggagttgtgcgtcagggccactgtggatctggatcttagcactacacatactggctgtgtcaccttgaacaagttacttaagctctctgagcttcaattcctttctataaaaggatgataataatacttcttggcaagacttttgtcttagataatgtatataaattgcttaacaataaatatcagtatgtcttcctttctttaattagtaatgcaataataggcaacagctttttaaggaaaatgaaaatatgcattgtgttaacagactccatttggtcagataaatttagttgcatttagaaatgtgtaaactgggctaaagaaagcaaacttttggtaacaaaatgttagataaactttgattattaataatgtagtcctggtagcatattatatgaaacttttaatgaatttcaatgacttttttttttttgaaacggagtcttgctctgtcacccaggctggagtgcagtggcgcgatctccgctcactgcaagctccgcctcccgggttcatgccattctcctgcctcagcctcccgagtagctgggactacaggcacccgccacgacacccagctaattttttgtatttttagtagagatggggtttcaccgtgttagccagggcggtctcgatctcctgacttcgtgatcggcccgcctcagcctcccgaagtgctgggattacaggcctgaggcaccgtgcccggccaaatttcaatgactttttatggtgggtgttggtgacacagactaagcatttgttgcatgatctcttctgttaagaataaactattttattttcaattcttggtttttattgttggaattgtatcacttcataaaattataacaaaacaaaaggcaaaagaaaagaactaatttaatagcttttcaagatcattccaataactcgagatgttcaaaaagattctttatttatttatttaagatggagtctcactctgtctaccaggctggagtgcagtggtgccatctcggctcaccgcaacttccacctcccaggttcaagtgattctcctgcctcagtctcctgagtagctgggactacagacacacgccaccacgcccatcaggctaatttttgtactttacttagtagaggctgggtttcaccacgttggccaggctggtcctgaactcctcacctcaggtgatctgactacctaggcctcccaaagtgtcgggattacaggcgtgggccactacacccagcctaattttttttaattgatataagtagatagtatcacctttagattttatcctactacattggtgctctttaagtatgttgcaatattcttgaaagtaatttaatgtgtttcactaccttaatcctaattatataattacatctgcagatttatatggaacatagattttcctttgaaattgttagcacttgtaaaattattaaagtgtaaaatatagagatagcataaatgcaagcataccttagcaaataaagcagaggtcaggccttgtgggctgtctgctctctgttgtcgctatttagctctgctattgttgcacaaaagcagccatatacaatacctacacaaattaacgtgattgtatttaaataatttgacttatgaacactgaaatttgaatttcattaaaatgttcatgtcacaaaatattctccttttgatatttttcagccacttaaaaaggtaaaaaccattcttagcttaaaaccatacagaaacaggccatgggtcagatttggcccaactcctgatatagatctatatgtgtatacataagttatgttgtacatataagaatgcatgccaattatatgaaaatttacttccagatataggtaattccagattctaatttgctgaatggtgtcaggattcatgatgaactacacttcatatacaaaaatacttagatctattgggagggctagggcagtatctaaaagagtaaattttcactttctcacttaattgaaatgtatcaagttcctattatatgccaagttctatgccaggaaatgggaacccagtgacctaaagaacacaataccagccatccaggaaccaaaagtctagcagagggaggcagacatgaaaataatgaatgccataatatgttcaaggtggatgaacagtggagggagggaatatttgattctacatggagattaagaaacaacttcaaagaaaaggtttgggggaatagaaatcagacattctgatcagctttagtgtttttttctatatttgaaatcgatatagaaaagaatcttctagaatttttactgtagagatgattgactcacatataatgaattagtatttgtgcaatagagctacctactgctgtgggtcagctcttttgtagatttttttttagaataaaagtcataaatggcttcatcaaattattttacaaaattaaatactttatgggtagttaggaatgaaagacacttggtaatcataggtttttgaatgaatatattgatccaaacaagcataaatcataggctatactgattattaaaaccagtaggcaatacttttactgcttccctgcagtgttataaattgtaactttcctgatctaactctttctgaaattctttgtagaaactaagctgtcaaaagcctctatatgtgatttttgtggttcagaaagaagtgtatgtggaattacatatatgtagttttttaaatggacaccttaaactggtgcacacacaccttaatctatgtttaaactacactgatttatgaagatgaaatgtaaatgtaaattatgtgggttacctttcgaggatgaagcctgaattgcaacatatgaatatgaactttgagttatgataataaaacagactttctctaaaagtaattaatcgacattaatgttatacttaacttctaaagacaatttaaggggacaagagtaagactgctttaaaaataagtgtatggcagtagggatgaaggttgggatgtgaagacaggaaatctgtgatttagtagccattactggtacctgacaataattatgtatgaccttgatttagtctatagataagaattatttttaaagctaaaaaaatggaaaagccaatcatgtatgtttatttatttttaccatttgactctatcagaaacatccaaattgcaagtagctaactagtggggagggggacctgacagtacaaggatttcttaacggttctcgacaaagtggtatagaaagtaattttatgccacttttagcaaaacgagctctgactcacttactttgaagatacagaataataatcccacaaaactcttcaacctaggacattaaaatattgtttcttttgaaatcaaaacatttggtgtgtaagcttgcatttggttgagaaatacggtgcttgtcttctataaaaggattttgcttccattttattgcatgtaatgattttggtttgctgtcctgaaaattaaaagccccatttaaacttcatgttaatttaagaaagacaaaatatagcttaacatacatttgaacagtcaaggaataggcactgataattatttggaataaggatttttacaagttagtagtaataagactagatttgtcttactaatgaacatttttccaatagtgtcttgcatatatttaatgaaagtttcctgccactagaaaagtatatagtaggtgtaatttaaagtgcagaaacaaaagcaagataaaagaaaaaagaatacatttcaaatatatttctagcttcagtgaaaataacgttgttttccaagctttatctataattattatataatgtttactttatactagttaactgttatataaatatcaagataatacttcttcgtattctaacatgtcttaataaatcagctaataatataaggagtgtctattcacttctctatttgagctttctactgctgaaaaaatagttgtttattattacctaatattactgctttttatttagaaaaatcaaaccaaaataactttgggacttacttagagatcaagaggtgcttgttgatgctcacttagtatgaatgcagcttattttctgtgacagaataaatgttttatttctacttttccattttgttctacccttgcataggaaaaacaattttacattaacatgtaccacttcccctcaaatgttagcatccattactttaaaattcaggcattttagtaaagctaacacatcttgcttgttactcctctcttcatatactttcccagggatggcttttctcagtaaaatgaacttcctttgtctatctttgactaaaagcaaacctttaaaattttaatgagagatgtttccagtataatgaattagaccaaaaactcactctctccttcttctttctccttttgacctccccaaactttcaaattgaagagattataatcaaaatcaatactaagcttttgaaattgggtctcaaagttgaaattcaaagtaacaaaactaatcttcatgtctggcttctagaccagtttcgttagacacagctcacattctgccacctccattcgcaagtaaaatctatattacaattagtataataaagctacttttgcaaatattgttcgtagatatagatatgcataaataggaatttagctgcaagtagaagtcagaagctctgataaactgtttcttagttttgctgaaggctttgggccatgactttttgtcataaatgttagaactcaattgtaaacattgcgtgaaatggagtagccttgatacccatctagattatactctgcattatcttcatacagacaaaaggaattcttgattagctagtgctgcctgagaggcagtatggtttaagagtttggattctgaacacacactacttggtctcaaattctagctcttacaagctttgtgactggggacgttatttaacctttttgtgcctcagtttccttatctgaaaaataaagatgatgatattatctactgactgttgagaggagtaaatcagtaggtgtaaaggacaagagaagtgcctggaatgtatcaagttcattttaagggtgtgctgttactgttacctaatttcaaatttgctacttcttgatgtcttttaaaatatcccatgaggaagaaatgggaaacatgccttagtatcctattccagtattttgcagtttttattttcagtgaagtatttttaattattctatctaggagataattgcattctcatcatgctttgggcctttgagaagagacactgtcatgagcataagctattttcgtacctgaaggcagcctgatacggtggaaagatcctgcatactagagctaaaaacctgagttcaaatcttagctctaccgtctcctgcactggaacttatgcaggcttttcagcccccctgaacttcagtttccttgtctataaaatggttatagtgatttgtattaattagagttgttttaaggattagctaaatgtacatcatctagcacgtagcaagctctcaataagtattagttttatagtagtaaatataaaggtgataaaatgattttataatgataggtttagttattgataaggtataaccataatagggattactgtgcaaattactactgaaaagtaataaccaccaattcattatttatcattatataaataattagactactcttcagatcattgttgctcttgaaagataagtcaaacttgagtttgcttttttgctaagaaaagtaatccaagtttctttactttctgtttccaacatttacatttctcctctgaatcttccagctgatcatgtcattaataaataatggatactaaattaacccagagctcactgaaggtctggttaattctgttcatgtggaaaagagcataatcattaccgcatggttttctatcaattaatttcttttctaacagaataacattactgacttgtgtgattggtgggtaccctatgactgactgttcttttttgtcctttggctagtcttcagctttcttctttataattttctgcttgcttctaagttatttaactgtatcattcatttcacttatgaccaggaaacacaagaggtgttaagtagaaaatagcttagtttatttccttgctgctatgatatatgtagtaaagccttgccaacaaagggaaaatatggtgtgaccaaatgggtaaaactttattctcacgccccatcacccttgttgcatctaataatgataataatgtgtactaggccactttgttaccaagcaaagattttgccaaaatacaccattaccacgtagaaataacatattaaaatgagttttcaaaaggtgtacttgctgctgtagaagtcatctctttttctacgcttatctctaaacatattaaaaattgttatgccattaaagtatgaagcccaacaccttatagctcgtgagtcttttttagagcttcattgagtgcttcatttttcattcattgtgtgaatgagcccatggtttctatacttttatatgtctccattgtattattatgcaaacttaaaaaatatcttcctgggaaaaataaaatataagctagtaaatttctttggtataattttaattaaatgtgctgaagactgatgatgattccttctttcctattgactatatgagagtgtgtttaggtgaattaaaaatacaaatatgtgtactgctgtttcactttttaaggctgactgcctttaaaagctggatttgagagaactagcttggccagaggattttagattaaatcctctaaatgcatgcccgtttagaagctaaattaacaaactctcttcatcaacttctcaggttttctcttgcatgcccatggtagctagaaatatcactagtagaacggacagagtctttgacataaatttagaagtaaaactcacatgtacttattcttctacgtagtgtctcttcttgcagtcaaaacagagcccttgaacagcagtgaaaccacagccacgactggagatggagcgcttgacacttttactgggtcaggtaaagcctttagctcgtgtgtccttacgtacacatgggggtgcatccacatcctcctcctcgggaataagcaacataagcatccaagctcttagaactttgatccttataaagttagaaacaaattcttattttttgagaactcatagtcatagcagtatgcattgttataaattatatttagaataatttcgcttgatattttagttgacagcaaaagtcccatgactttcttattatggataagtaaacttaacttccttcaaaattattttatacgatgtttaattaatttaataattaagttgtagtagctgaccttgcttcttcaacttacccatttgaattacataaaaactgccttctgtttaacattcgagatgtaaaactatccatttgattccttctaaataaccttgtttcctctctgggtttaaaaaactcctcctgtgtaagcagctgagtgacaagtattaaaggttaatgggctgcaggagagcacatgctggttgcattagaacccagcctctgagagcgctcgaatgcttcaaagagaacaatagcatgtctttaaacatcaatccctttaaaatataaatacctgataactcccagctgggcacaaagggcatgaattaagtagacttaattaaatttttttaagttacaatatttcttcggctttttatctggtgaaaggatttttctaacctgaggaggatcgggtacatcagaaagaagaacattaaacctaggaaagtatttgtggtaattgaatctcggttctgttattctactttaatacattttacatttatccatgtgctcatgttataaggatttttttgtcagtatgttttgtgtaaaaatagttgagatatgtcttagagtattatgtcattatagcatatatttgatttttacagatgatctaatttcactagttcacaccgattagaagcagttgccatatatttacataaatattagtactccaagaaagaaataatagtacataaactttgcacagagactcatatgtactaatccacatcttttctagcagtttacctgcctctcaggagatagttaccagttcagtattctgtattgcacacttaccatagcttttgtaaactttctgcaaaataaatctatatgaacaaattgttaaggaaaggaatggagttattaacttattgctgacctacttcagtagtatactacaagttaattgaaagctgaatgacaaaactataaagtgttagctccagaaggaatttcagagctctctgatccgttttgtagacaagagaagttaaaagtggttaaggccatacagtcaaggcctcacagctggtcagtggtataaacaaatctaaaaccatgtccttatgatcagtccctgggtcctttctgtaatgccccatcagaaaatagatggaaaaagaaataggcatgaacaatcatcctgtctgaaattcactcatattgtctttgtagatattttcgcaaatttttaaagaagtatctagggacgtgctgtccagtaaggtagccaccagtcatatgtggttattaaaatttgataaaattaaaaattttgttttttattttcattttcacagcaatattgcagtaagtatatttttattaattgattttgaaaatcatcaagtacgactagaggcgttaagttctcaatattttcagcaaccaaaatttaactgaattttcaagtttaaacacatttcaagtgtttaacagctgcatgtggttagcagctaccatattggacagctcagatacagaacatttccaacactgtggaaagttttattccacagcagtgatccagggcagggattatcaacatcagcactgttaaagacttgggctaattctttagtgtgggaaagctatcctctgcactgtaagatgtttggctgcatctatcccagaatgccagcagcactcccccagatgcttctttactaaagaagcaaccaaagatgtcttactaaagacaaccaaaaatgtatccagactgtttaagtgtcccctggcaggcaaaattctcacccccacccacttctcatcccattgagagtcaccaatctaagatggcacgataatgagaatgaaaccttaaaattgctttgacaccatcagagaaactgacaatagatattaaacatgtatttaaattaattttcagggcattttgaaaacaagcagttttgcttactgttgtatgcagaaatgatggaatgtaatgagtgttttgggtaatgtttatgattaatcagatgacagtggggaataaaacgaaattctttcaagtttgtacaagatattccagaaaccattctggaaatgaggctgccctttgtgggagcagtctttactttgatctgcaaaatttccactcactttaatccaattttgttgttcttttcagttatctgcaaatttctgaattagaacaaaatgtatatattttagtaaagaagcataaactttcctacgtgaacatcgtagttttctgagccaaaggttttctgttctatttagaaaatgaacatatagacgttaatagaaatttgtaaaggttagttgaggctttatagtgttgtgagtacattattctaatgatgtttagatttatcattagaagaaacatcctatatattcagaattgagttcatgtatatgagttttttctgaaatgtgtaattttggtctatgtcttatttataaaaggttactataatgaatatttatcttcatgattcagcgtctctttggaaaagccttctatttcacaatattgataataactgatgagtatagcccaagtcttgagtgtaccaaggagaaattctgtaaagaagagacgaaagaatatttaatcaagcgtcatttaactatatttctgttagagtatttggtattgttaatcgataaattagaatgaatatctttggaataacactactattatgaagtgcacatttaatgtccattgtgtagtagaacaaagagtctgttttcattaagttgatttgaaaatttaaaacgttctttaagttttgataaatatgtagaaaagtaatagtttattggtcaatttattttcaacgatacgtatcaaattcagttaaattctggttgctgaaaatatttagaagtaacacctttagtcaaatttgatgattttcaaaattgactgataatattcttaaaaatatacttacttcattatcgctatgaaaatgaaaatattctttccatattcagagcttataggcaaaatagcattttaaacacattaaatgatgcatgtttgtgaagcagatcacaagggttcttgtgatatatatagaaatatatcatgtttcataaaatagttagcaacctaaacctatttgtcacttttacaattctaaaagtttcgctccagaattattatgaacaactcagaaaggacatagtactttgaagtataactatgattgattagactaaactaattccagcactgcattgtgtactactttaatctttttgaaaagtgaatgaacagcagatggcctaataaagacactctgtgtgctcgctcagtgtggattggctctaagggaactggctcacactttagagtccatatatttgcaaaacatctgtcttagtcaaggcagatagttaaaggaaagagaaacttccaagctattggatatattccagtttggggctccatgtttggatgaactgttaataggacctcactttcacctttaagttcttctcagaaaagtattatctctaatagttcaaagtatatttgtaaatgtaattgctactgcattttgtgattatgttttaaagaaatcacctgcactttctttaattattactggaatattttagactgcattttttaattgttcatctgatgggtaaaatgagaggaaatagaataaaatagtattttaccattagaaaatgaagtttggaacatcacagtcttattttgtattgtatttgaattagaacagatatggaggaagagcaatatgtatatattgccatcatatttggtattttaaaatgtaaagtttgcaaattttaaaaatttacttttatattttgaaagcttaattaccctataatcaaagatatttattcatagcatattaatatataagagcatgctaatgatttgagaaactggaagaatgacagagggaatgatttgtgagacaaatgtttatttcatgctttttgcacaaaactcaaagcagtttaattaggagaaagtgtttaggcagctgtttccttttagaaaatgaatttctggaaacatgtatttaacatggtaatttcttcaaattggttatgtacactctagtgaaatgtatttatgaagcaacctttggtgcactggtatttttgtgtcttacagtaattacaagtagtggctacagccccagatcagcacatcagtattccccacagctgtatccttccaagtaagtggtcagtagattcttgctttaaattggcaaacatttatgtctatacatgttttatagatggttggataatacttggatagattacatatatagataaatatcctgtacaaatttgaaatggagacacccacatgtatcttgatgattcccttgaatatttatgtataccttgagaaaaatatcaagctcaaattagaatacattgcattttaattcaaattcaaaaatgctggctggttaaaaaatctaaagagattacattttatctaaatgtcaacacttcataattaattccatcattgaaattcttttgttggatttccagttctaataaacatatttttgaagaatatgccttattgtttttataactaatatagtcactttattgaggacagtggtagatatttcttaagtttaactatattgggtgtatatctgaattggtttggaatcagccagacgtgccaagattttgtattgctgatacatacacatttaaatatagtatgttattttctgcagcatctagagtgtctgcctttacatatatatagactgaaggttggatatccaatggggaacatgatgtaaaatgtggcatgatgaaaggaatgatgttccttttttttttttttttttaaggaagcttcctacctttctttttctttttttaaatttccaattcttgggagcgaattcttagtagggcttttaaatagacttccatagtctttgcatagcattaagtcactcatggtgagtgtgaatttgctcatgagcatattaattagctagtgtgtgctccattttcctcatctgtgtattaactggagtgctatttcagatatgagcaagaattgtagacctggaagagacacaggtgtaaaatctaaatcaaatttctacttttacaggtgtggtatagacatagggagtttaaatcatttgtctatggtcactagattggcttgtagcagagcctgagctcctgacattcagactgttgctttttcctatattgttaaaattatattgtggataaagaggattacttcctggatattatagggtttcactgaatctaggctgtctaaattaatacacagtctttgttgccacagtaatgctatttttctgatatttaggccctatccacacattctttctacaccagcagctcaaacaatgtctgcctatgcaggccagactcagtattcggggatgcagcagccagccgtctacacagcctactcacagacaggacagccctacagcttgcccacttacggtatttcacatcttctgttttcttctttggttataggcaggtaatcctgctggctggtagctttgtattctattgtaggttacaacttagaaggaaaatcatcttactaattaaatggtttacacattcaattttctgaacagatttgggtgtgatgttgccagccatcaagacagagagtggactttcccaaactcagtccccattacagagtggctgcctcagttacagcccagggttctctaccccacagccaggccagacaccttattcttaccaaatgccaggtaagtagctacacatgaaacatgttttgggagaactaattctttgagtgagactcattggcttcagactaggaatatccaatcatgaaggtagttttaagctttatcacagctcacacaatttctaaagaaagataactagacagaaacacgatgaaatggttgagtatacgtcaggaaacatgacctataccaaacttaaatacttaagtttaagctgcgtaacatcagcaggaaaccaagtccaagcaaagcaactcccaagccagacaccaggtcagccacacatttggcgtctacttaagcaatttaaaagatctgtagcacaaaccagtattttcttttcactcttcctgaagtatgtaatgctgttttgattatacttaaacttgaattaactcttttctaagttccatatattattgaccagttgaggattttttgttcattcctaaaattcctctctcctattgatactatattgcttaataggactgttatataatatttactctccaatcctccatataggcatataggatcattaaatttttttaaattttagactcctattaaaattgtgttttatctttttttttttttttttttttctgagatgcagtctcgctctgttgcccaggctggagtgcaatggcatgatcttggctaacttgcaacctccacctcctgggttcaagcgattctcctgcctcagcctcctgagtagctgggattacaggtgtgcaccaccacacccagctaatttttgtatttttagtagtgacggggtttcaccatgttgatcaggctggtctcaaactcctgatctcaggtgacccgcccgccacggcctcccaaagtactgggattacaggcgtgagccaccatgcctagctgtgttttatcttaatgcaatagttgccaaaagaattttagtgacatagtaaaaactttaaaagctggttactatctgtcattttgtctgtactgcaaatcacaaatttggggctatattaacatatttgaaccaactggtatgacattttggtcaattgattcaaatgaaataattacttagatatgttcagctggaatagcagtgctcttttttacctagaatgtaggttgaaacatatttgaaagcatgctatagccacaaaaattcatacagcttcagttagccatgtgacagacagtatttttttttttttcacgaatactttcatactggttattccaggtcaggtcagtggcactgattacataatacattgctagtcaaaacacattgataaaacaagtaatcagctacctcaatagcctttcattttacttcttgacaagcacattccataaggactttttttttaggaaacctgtaattggcagctcacttgtttttgccctgatttgagaaatcattaaatttcagaccttgtagtaaagttttagaaggccctcaaaccctagatttgtgtaccataaacagttctcccttgagtctgaaccctaattcacagctatttttgttctaaagaaaagacaaagggaacaaaagtacaaggagttgctaaatggggttctgtatgtttatttcccacgctaaaaaccctgtacaaatgttgaactcaagtgattttttgtatgtaaatgcagttgatatggtttgaaagttccagtagtttcctggaggtagtcttagtctgtgtaagattttatcctttgcatacccctgcacttctagactcttaacccttgaatgttggcctcactccttatgaagactgttcccatgtgcttctgtttagctcaacagattcaataggaaagggtttaccagctgttacaagagggagagagctaagcctattttctgtataaatgtctcaacttcaaatttcactgtcttcacgacaaatttcaaagtgtttctctcacagaattctgcaaagtgaaatatctttatcattttacaaggaatacttttaaaatgcaatttgttttttacctctaggttctagttttgcaccatcatctactatttatgcaaataattcagtttccaattcaacgaatttcagtggttcacaacaggtatagtagctttttgtgtttatgctttttatatgtatttcagatttttgaagagtactctcaggttgccatatatgtgcatactctcccagaataaggtttctttatttaaaaattatgatagcatttcaggatagtaaaaaattagctatctagaattcttggaatatgcattattctggctattttagattttttgattgctaaaggtttgtgctttaaacatttatgctgtagttgttttaatcatttggcatggaattacaaaatgtattggatattttgctatcttaaaatatactaagaacaattttatttttcttgataaagcagttattataatgaatattaattggttgaatcaatattaattgattaaaataagtcataggattatactacagactatataacattttcagtcctaaaaagtgtcctttgttactaaacaaaatgcctcaaagactactgttggcttttaaataatttttctgttttttagttttatgaatacttttaataaatgtttgattcccactttcctgacagctgcaactttttgcttttgtcactgtgcctgcctctggtagtctttagtcctccttctaattatgttttcttaatatttttgtgagttttaaaatctagcatgttagaattatgcatgaagcaagagtgaatgtccctgaataagtaaatcagctcggagtgagatgaattcgtgatatatgttgacacttccaaatcttttgtccttattttttgattttcagccatgttcgaagtagttgagattgaagagttagtggctgacttctggtctggcaatacactattttactttagtatagttgctagacacttatatattctaaaatgtaagttactgtacaagtgcttactttttagatttactgaaggaattttatcaattgctttattttagttttattgatatcacaaaaggcagaaaggaaattttgatcattaaaatcgtgtggaataataatatttttgataggattaaacggtgtaatttagcattaggaaaatgatgtcttaaaacactaaacatcagagccagtgtatacattttattttttaaaattgaggttttttttgtaacttgattttatgcatttatttattggtccagcaagcatttattgagcacttgctatatgttagatttttggctagggattgaagattcaaaacgagtaactcattgttccctgctctttagaaggattcagtcctccgaaagaaacaaatatgaaaataagatggacagagggtgggatgggatatagtgaatataataacagaaatatacactaggcagagttgtactataaaggaaaaactgctctgcctctatttgggaggattaagaaaagatttgtaaaggaaaagagcatttatttgaaaagagttaatcatagaacagatctgattctctgtgaagatttaaatatagtggatcccaatgtaaaatgtaatctgtatttgggaccatggcctgagcaccagtttgttgttttggctcatacctattgagtgcccataaagtgttaggaattggtctgtatactggggcacacgaaggtggggctggagtagatcagatctgattcctgcctcatagagcttacagcctactgggacaaacatacaataaaccagtaaacacacaaataaatgcagaattagaaagagaacagggcctgcgaaaacatcaactgaatataattttgaataggggaggttttatataaggcttctctatggaaaccacatttaggccaagacttctaagagttaggtgaagaaggagggcagtggtgtttcaggcaaagaaagcagagtgtaccaaatccccaatggatggaaaacttggtgtgtcactgaacttaaaaaaaaaaaaaaggctggagttcagttagtgcatgagggggaagtggggaagcacatttgcagagataggcgggggcctgctcacgtaaggcctggtggtttacaataaggaatttggattctattccaagcccagtgggaggctatgatagcattttgagcaagaaaattacatcatttaatttatgttttgagacgataactctgccaccaaggtctttggagaaagtcagaaatggaaacgaggagataaatttaaaaatgaatacattgcctgcaacaggaagaaaaggtagtttggacaagggggcgacagtggaaatgaaaagaaagtgagatctttgagatatgtttgaatatgaaaagacattatattccccagtggggaatagcctggacctttccagtatgtaacctcatcctcttctgcaggaattagtaggctaacagagagcttcagcacagatgtttgacttaggcactctgggtttaaattctagctctgaaacttactagctgtgtgactttgtgcaaatcacttaaccactctgtgccttagtccccttcaaagtaaaatgaatatagtattaagaccacataagagagtataaggattaaatgagtaaatatatctgagcccttagaacagtgctttgatacagagtaagcactatgtaaacatttgctaccactgttttactctgagagatattggtaggaactttgtttaaatatgatgaggtttttgttcttggctcacaagttacagtagtgggaaacattggatcttgaaattttcagactaatagaattttagttttctgccatattacttaatcatttatgaagatatacatatttacttataaagattatttcttttattttttggaaaccacatcaaatgtagatcttttttcctttggaacacatttcatcaggggatcttaatgttatcagtgatgaccaaggatttgtcatcactgataacattttgggctgacacatgctagatatcttaaacaccaattatcacaacaaatccttactcatcatcctactgtgtaaaaggattttgaatcattttaaggttcttaaaatttttaaataaaaagcaggtcaggggtgttgattcagtgctttcatttttctctgtaacaaaggagggaaactaaatcattgaaaagttcactaaagactttaaatcaaggcctcaggtggcatgtagtttgtgagaggctgggtaaaaaaaaaataataatattcatcttcttttatttactttttacctcctgccaagaaaacagaattatcagtggtagcccagaaaggaacaaaaatcacaaaaatgcagactgaggtctctgtggagtctaggaggggcagccccaactccttgctggtgatgttagaagatgtgtaagaacggattttgtgaatatgagctgattccatctccttctttcctcttcaaacacgtaggtcctgatgatgtaaatccttgaataagtaactatcaggagcaaagtgaagcatatgctaactttaatcacattaaaatttgtgtactggacctggtttgccaaaacaatagggtatttcactactatatgtttgtaagaaatgcccacaaagtagtctctgctcattaggatcacctcaaagctgtggactcagaaacaaatggggctgagtactaatctttcagttaccataatgactggttttcttgggagagtattaaagagtaatttctctttcaaacacacacatctcaattattgtttcaggattatccatcctatacagcctttggccaaaaccagtatgcacagtattattcagcatcaacgtatggagcgtatatgacatcgaataacacagccgatggcacaccctcttcaacctctacttatcagttgcaggaatctctcccaggactgactaaccaaccaggtacagatcttcacccaggtgaaatacttttatatgttttgcaatatctaataaaacggagaaagtggacattccaaaaacatggcggaaagctcccagataattgtgctgatgtttaatctgtgttagcatgactgtgtaagacgaggctcttctggcatttcagaagatccttcttttagatatgggacagataggcgattttaatctctaaatgatggtgtacatatgaatatggagcttttgccagactcattattcatttgtgaagaacttgcaacaaagttgtaatattatcttccttatgactgatattatttcttttgtgctaaagagactgcataagcccttcacctttgtaagttgtcagtagctctagcccgtgaacatttcctacattcctgggatttgtagaatcagtgataggtagtttaatatctttgtgtgatcagtgtgtatttaaaatccattgtgtgtttcattatctgaaacttgcagtatttgaattgcatttgcgacacgtaatttgacacagctgaagtatttaaagttaaaagcaaatgtaacagagactcagtataatcctaagaaaagttccaggactttttggagaaattattgaggtgattctaaaatcacaaggaaaggtggatgaattagaatagtcaaaactatttttaaaaataagaacgaagtttgaagactcagattacctgatttaaagacttataatgtacagtaatcaagagagtgcaaaaggatagacacatagagcaatgaaacacaatggagagtccagaaacagatgcatatatatgctagaaaatggatttttgaatcaggatacaaaggcaattgagtagagaatgaatagtttttttcaacaaatggtgctagaacaattggacatctatatgcaaaagaggaaaggatctcaacttatatgcaaaaattaactccaaatggattgtaagcctacatctaaaaagctaaaactataaaacttctagaagaaaaaaatggtggaaatctttgtgaccctgggctacataaagattttatagatatgacattaaaaacacaattcatacaagaaaagaacagataaaattagatttcaaaaaattgtaaagaacttttgctcttcaaaagacactattagagaagtgtctgttcatgtccttcgcccactttttgatggggttgtttgttttcttcttgtaaatttgtttgagttcattgtagattctggatattagccctttgtcagatgagtaggttgcaaaaattttctcccatgttgtaggttgcctgttcactctgatggtagtttcttttgctgtgcagaagctctttagtttaattagatcccatttgtcaatgttggcttttgttgccattgcttttggtgttttggacatgaagtccttgcccacgcctatgtcctgaatggtaatgcctaggttttcttctagggtttttatggttttaggtctaacgtttaaatctttaatccatcttgaattgatttttgtataaggtgtaaggaagggatccagtttcagctttctacatatggctagccagttttcccagcaccatttattaaatagggaatcctttccccattgcttgtttttctcaggtttgtcaaagatcagatagttgtagataggcggcattatttctgagggctctgttctgttccattgatctatatctctgttttggtaccagtaccatgctgttttggttactgtagccttgtagtatagtttgaagtcaggtagcgtgatgcctccagctttgttcttttggcttaggagtgacttggcaatgcgggctcttttttggttccatatgaactttaaagtagttttttccaattctgtgaagaaagtcattggtagcttgatggggatggcattgaatctataaattaccttgggcagtatggccattttcacgatattgattcttcctacccatgagcatggaatgttcttccatttgtttgtgtcctcttttatttcattgagcagtggtttgtagttctccttgaagaggtccttcacatcccttgtaagttggattcctaggtattttattctctttgaagcaattgtgaatgggagttcacccatgatttggctctctgtctgtctgttgttggtgtataagaatgcttgtgatttttgtacattgattttgtatcctgagactttgctgaagttgcttatcagcttaaggagattttgggctgagacgatggggttctctagataaacaatcatgtcgtctgcaaacagggacaatttgacttcctcttttcctaattgaataccctttatttccttctcctgcctgattgccctggccagaacttccaacactatgttgaataggagcggtgagagagggcatccctgtcttgtgccagttttcaaagggaatgcttccagtttttgcccattcagtatgatattggctatgggtttgtcatagatagctcttattattttgagatacgtcccatcaatacctaatttattgagagtttttagcatgaagggttgttgaattttgtcaaaggctttttctgcatctattgagataatcatgtggtttttgtctttggctctgtttatatgctggattacatttattgatttgcgtatattgaaccagccttgcatcccagggatgaagcccacttgatcatggtggataagctttttgatgtgctgctggattcggtttgccagtattttattgaggatttttgcatcaatgttcatcaaggatattggtctacaattctcttttttggttgtgtctctgcccggctttggtatcagaatgatgctggcctcataaaatgagttagggaggattccctctttttctattgattggaatagtttcagaaggaatggtaccagttcctccttgtacctctggtagaattcggctgtgaatccatctggtcctggactctttttggttggtaaactattgattattgccacaatttcagagcctgttattggtctattcagagattcaacttcttcctggtttagtcttgggagagtgtatgtgtcgaggaatgtatccatttcttctagattttctagtttatttgcgtagaggtgtttgtagtattctctgatggtagtttgtatttctgtgggatcggtggtgatatcccctttatcattttttattgtgtctatttgattcttctctctttttttctttattagtcttgctagcggtctatcaattttgttgatcctttcaaaaaaccagctcctggattcattgatttttttgaagggttttttgtgtctctatttccttcagttctgctctgattttagttatttcttgccttctgctagcttttgaatgtgtttgctcttgcttttctagttcttttaattgtgatgttagggtgtcaattttggatctttcctgctttctcttgtaggcatttagtgctataaatttccctctacacactgctttgaatgcgtcccagagattctggtatgtggtgtctttgttctcgttggtttcgaagaacatctttatttctgccttcatttcgttatgtacccagtagtcattcaggagcaggttgttcagtttccatgtagttgagtggctttgagtgagattcttaatcctgagttctagtttgattgcactgtggtctgagagatagtctgttataatttctgttcttttacatttgctgaggagagctttacttccaagtatgtggtcaattttggaataggtgtggtgtggtgctgaaaaaaatgtatattctgttgatttggggtggagagttctgtagatgtctattaggtctgcttggtgcagagctgagttcaattcctgggtatccttgttgactttctgtctcgttgatctgtctaatgttgacagtggggtgttaaagtctcccattattaatgtgtgggagtctaagtctctttgtaggtcactgaggacttgctttatgaatctgggtgctcctgtattgggtgcataaatatttaggatagttagctcctcttgttgaattgatccctttaccattatgtaatggccttctttgtctcttttgatctttgttggtttaaagtctgttttatcagagactaggattgcaacccctgcctttttttgttttccattggcttggtagatcttcctccatccttttaaaaagacaagctatagacttggagaaaatatttataatacacatactgatacaggaattatataaatatataaagaactgtcaaaattcactaagaaaaattaggttaagaaatttttaaaatatcattaatttgttcaagtatatttttctgccttcagttatttgcaagatccaaattcatctctacttctttcttattcagctttggatgggagggaaaatagggaaacatggtcacagtactgtaaactctttctaactggaccagtggggccaagatgactcaatgccattaaacgattatttattgagtatatattaggcatcagcactgtgctagaaactgatatttcagcagtaaatgagctctttgcccacctttggctttcatttgacaagcaggacaaatatcaagcaagtaattacaatagtgagaaagggaaaatggtaggtcatatgggggatattaacaagtaaactaatttggacataaagtaaaaatgaaactgatattttaagcaacagccaagatatgtttatatcatgaattgatgaaatgataacattcatgatttttagttccctgttcagaatataatctttacctgtgggtccaagaaataattatctagtagatagagcttgtctttgatgcccctacattttagttttttccccttatcttccttttatatcctcctacctgtgggcacacagcccctttgaatttctggtccttgtccctttggggctctctgttttggcttttcagctagccttagcctccctgggtatctgtaccccttgcagggccaggattagggtgaggtcagtgaagcacctagagcacaaaatttaaggtggaactcgttcttggggtccttaaattttgtgccctaggcgccttactcattagccccagcccaaatcacatgttccaaatctgtcatgatcctctttgggtcaatacttgtgttgcatcaaggatcttactttcattcaaagaatgaatgatttcagaatccttgcttaacaagcagtggagatacttcagggaaggagatatttcacgacctcttatcaccctgtggaaggtttttctcaatgatgaatgtgtgaggaaaacaaggtagggtgaaaccacagaagtatttaattatcaagatatcagagactgaatgatggacaagaccaaaagggtgtttttttaatttgctagactacagctaccaagaatgaaacccatttgtgtactcagatacggtatatgctacgtggagctttgtgtaaaatgttgcttttgctccaatttccatataatcacgagaaagcttctctgcaggaaaaacacagatggttactttccttattagaataatcagtattgaaaatagctattttattcctattaaatatattaaatgcaggcaggtagatattctgagtatgtgactttggatgtgacacattcacatatggaattctgacattcactatcagaatgctgcaatttcatcaggccttcattggttgctgaggtcaagaaatatagtttgacatcattttcagattttattagactgtctgttgaatttaaagaaggaattaattctacttataactatattattctctcaaccaaaatcgtaacaacacacatgtctggatctttaaagaattctatgacctcagaccttcagtcaatgcagttttaggtttaattttgccttttcagatctggcatacggccaaaaagcaaacaagtttataactatggaatttttctttattattgatggaatctgatgtatttagttcaagggcaagaaaagtatttcccattgactggttctgcattttggacttaaagtagaaacctaaaattaaacccacagtttttcatagaacagtcactgctgaattctacttttataatgaaaacataccttatgttcaataagagacagctggtttttctgatttagagataagcctaatgaaataaagtgggatctaaatatccaaaacttaaaaggtgcagttattcattactgtactgattaaaggataattattcaatcatgtatagtattgggtcaagaaaagcctagggcaattttgtaatgactgatgttacttggaaattgcaaatagcattccattatttaatttaccttattaggtagtttgacagtggatttaaagaaacactaccatgctgattaagagcagacattttacttcattctctttctaaaggtctttctttaaagtaaaatttatattgggtatatcagattttttatttgtattaagaaagtttgaggacagatttgcacatgaagatgagaaatatttttatagcgcctccttttcaaatattttaaacatctttaaaatcaaatacagttagtcttgtataacaatattatgttttaccctgacactttgacaaacattacaatacattagctaactgaacctaacaggtgctctagaaaagtaaaggatagagtaagatcatttcactctctgaaaagaagccagtttcttaggcagaacacagcagccttttgataacttcatggtatttcacgtaaggaaaggaagggaagtaaagtgctaactcatctaatggaaactaacaagaggatttagatagaaaggaccacattcaactgctctgccaatttacattttccctacctgtggcattgctatgcccttgtgcaattacctgagtgaaatttggcagaggcactggaattaacagctttcttcttttaaaaaaaagtgtcaacaaatgtttaatgactggttgagctcaagttcctggttttaccctttatcagaagaaaggatagcacctgcaaaaggaatagaggtcagtacaattccacctgggtgattgctctaggagcccagatgtatcgcatggcctctgcagggcatgctcttttgcttctgtgaagttctttcagtgaattctttggccctccatctcacagaaattatataatgcccatgtgacttttattttaatttattgtttaactgacaaataaaaaagtatatatattggtgcagtgatgggcacccgtaatctcagctactctggaggctgaggcgagaagattgcttgagtccaggagtctgagtctttaaaaagaaattgtatctatttttgtgtataacccattgttttgaaatacatttatattgtgaaatggctaaattgagctgattaacatatgcattacctcacatgcttatcattttgtggtgagaaccccgaaaatctattctcttagcaatttttagaaatacaatacattgttactacgtatagtaacatgttgtataatagatatcttgaacttactcctcttgtctagctgaagtgttatatcctttgaccaacagctccccagtctccctctccagccccacagcccttggcaaccaccatcttactcacttcttctacgagttcaacttttttgcactccacatataaatgaggtcatgtagtatttgtctttctgtgcttagcttatttcacttaacataatgttctctaagttcatccttgttgtctcaaatgacaggattttcttttttaaggccaaacattattccataatgtacatataccacatttcctttgtccgtttatccattgatgaacacttaggttgactccatatcttggctatttgtgaataatgctgcaatgaacatggaagtgcagatatctcttcaacatactgatttcatttcctttgatatatacccagcggtgtgattgctggatcatatggtagttccgtttttaggaacttccatagcattttctataatggctgatatggtttggtggtgtccccatccaaaatctcatcttgaattgtaatccccctaatgcccatgtgtcaagggagagaccaggtggaggtaattgaatcaggggggcagtttcctccatgctgttctcgtgatagtgagtgagttctcatgaaatctgacagttttatacatgtttggtagttccttctgctttccttctccttcctgccaccttgtgaagaaggtgccttgcttccccttccccttctgccatgattgtaagtttcctgaggcttcctcagccatgctcaactgagtcagctaaacctctttcctttgtaaattacccagtctcgagtagttctttatagcgatgtgaaaatggactaaatggctgtgctaatttacacccccaccagcagtgtgcaagatttctgtccgccacagtgtctcctacacttgttatttttcttcttttagataataccattttaacaggtgtgaggtggtatctcattgtagttttaatttgcatttctttgataatgagtcatgttgagcatttttcatacacctgttgtcatttttatgtcttcttttgagtgatgatcatgccaacccattgcccattttttatttgagttatttgttttttactattgagttgtttaagttccttgtgtattttggatattaaccctttatcagatgtatggtttgcaaatattttctctcactctagtaggttgttatatgactcttttataagtagaagcagatctaggtttgaccttctggtaacctgaagagtccattgctatttgcctgagaaagtatagccaaatggttaaaggaggagttctgcagtcataccagtgttgcatcatacaagctatttaattttgttaaattaattgccacttctccagtttctccattattaaaagacaataatgaaggacctaattcaccgggttggagtgaggtttaagtcagacacacacacacacacacacgcatatatatatatacacacataaatatatataatgtttcataataaagagctttgacaaatcaataagaaaaagacaaacagcctagttttcttaatgggcaaaagatttaacagttacttcattaaaaagaagatatcaaatgagcaagaaacatgaaaaagtattcttcataattactcatcaagaaaattataattaaaaccacagtgagataccatcaatcacacacccaaaatggtgaaaataaaaaaacgctaacaatatcaagtattgacaaggatgtggaacaactgaaactctcattgtggtaagagtaaattaatactgtctttaaattaataaaaatgagcagtgggttagcatggtcgttaatacactggaaagagagtaatacactggaaaaaagtcagtgtctgttaaagatgaacatatgccttccctctgacccaggaatcacattgccaggtatgcatacccaagaagaattaagagcttgtatccacaaagacatgtacaagaatgtatatagcagctttattcatagtagcctaaaattgtgaataacccaaatgtccatcaacagaatggatacagtgtaatagatacagtgtaatatatatatacatgaagaagttctagccacattaaggaaaggacaactgctatcccaggctagaatatggattatctcacagcagtgaatgaagccaaacacatatatttcaataaaaaaaatttttaaagaacagtgcatgacatgtactaaggggtgaataaatgtagagttacccttcatagttttctaaaaaggctgtctttatccccatcaaaacacttctgcagatattttgtccaaattcttagagcccttttaagatccttcagtaatttgaaaagcatcaatgggaataaagtcttaggtttactgaaacccagatacgtcctacaaccacagtcttttctctttcctcttctgctcttttcacccctttgctgtgacagctgctggatcccagttcatttgaatagcagaattattcctgctaaactcctcctttatggactcagcctacaaccacccatgactggggttcctcaagtttttgtcctttcagctcttgcactgtgacaagaacaaagttgccttatgatagttaacacctgaaaattgatctataatgactataaggagaagttttatggaacgtcatccaaaatgttttttaaatgcatgcttaataagtgagggttaattttaatcaccattttatttgaaagcagacatttggtttgtgggatatagtaaccttaggaaaattctgtttcaaaaataattaaaaatggaacttttatgtgattttatttaaaagttggtgtatgttcagacatctaaagactaatttaatgcctatacaaataaggtgaaacatgatttactatgagacaaggctatattcaaccccataacttaaaaaccttattactctgctatctactctcaccgaggtgataacatagacccatgaaatgaactatgctggcaatattttaagtgcaaataatatttggagcacaggcatatttttttgatcatgtgctgacatgcacagtgtttcccaaagaaaatgttagaggttacccatgtaaaaattactatttctcagaaaaagtgatgcctagtttgttcagatttgtttatttagattaataactgcttggttttcctcagaattgttttattttaatttttaaatttaatgataaaaaataatagccataatatctttttgtttaaaaatcatgtaatttaaatttaatgtagtttaccttctgtcttggaaattgtcactttatacatataatttaaatcaaattaaatataaatcagatttatccctcagtattccagaaagctgccatgaaactgagatttagagagattgaataaaatgcttgtactcatatagtaattctgactcttcaacttgttatactgtatctcacagttgcctcagtttatcttaacagttgctcctacagatttgctactactcagtactctctacctcctaagatactttctcacaagctttaatcatttcagagttttagatatctatgggacgtacagaagtcaattggattctgaaactgaattaaagtctgaaacttaggatgtggcctagttggaggtataggtttatatgtgagtcatcacagagagggtcattaacacatgagagagttaaatcccccagattgtgtggagtgaagacagtgatcagaggatggaattctgacatactagctcataaggaatgggagaagtacaggagtccatgttttctagatggagatggactgatcggagtgattctagaactaggagagtgcaaggtatcagctgtcaaataatagtttcgaggaggtgctgtttaagagaatcacacacagcacagagatcctggaagacaaggactgagtctgtctattgcatttgtcaacaaggtgatttctggggactattagcaggagtatttttatcgcattttggggaactgaagctagattatgataaattggatatcaataagtggggacagatatgccgtccagtgctgcagccactggccacacgtgactcttgagcacttgtcatgttgctagtgtggactgagatccagtataagcatagaacactgcacaacatttcaaagacttagtatgaaaaagaaaatgtaaaacatatcattgataattttatattgattacatacggatataacatgaatatattgagtcaattaacacattgattacatactgatatgataacatggatatattggggcaattaacatagaagtgatgataattttacatatctctttttactttttttaacatagctgataaaaaactttaaaatattatataagatcacatttgtggctcacatggtatttctgtcatatagcactagtatgcactattctaagaagttttatgtaaaagagaaaatggaagcaaatagtatctagatggaaattccaggtcagagggaaggactttttaacttctcagtgaccccaagaaatgggagaggtggaagggaaaatgggagaggtggaagggaagatgggagaggtggaagggaagatgggagaggtggaagggaagatgagagaggtggaagggaagatgagagagggtttgactaatgaagcatgacttcctaggaggtggggctgggagtcaggtttgcaggtggagggatggaattgatccagaagaagacatctcattctctgaactgtgacaaaaaaggaggtgaggacatatctaaatggagataaatatgtaagtgaaggtatagacaggaagttgaaggcgtatggtgtagaaaagacattcaagtttaatagatcacatagattacaactagtaggagtttgtgtaaactacaaaagttctgactgacttgtgtgtgcttgggattataaatctcttttttgccatcaggaggtttctattgtataggaatttgttaagataattaataatgaagactcatacttgatctaaaaatgaagtgctattcttgacctaagtcatgttatctataggagagttcgataccatgcagagtccctccacacccatcaaagatcttgatgagagaacctgtaggagttctgggtcaaagtccagaggaagaggccggaaaaataatccctccccgcctcctgatagtgacctggaggtatgcctactcattcttaaagattgtagtgtgatgctttattttaccgaatgatacattctctatcttacagttccattatgtttcaaatttaaaaatcaagatatatcatgaattgaatggaactactttgtgataggcattttacaactctgaagtttgagattccatccattataatattaaaattaagaacaaataacagtataaaaatgatcttgatttacagattattggcctgagataattgcaagttttgatctaaattggcaccgacaaattttaaaactatagccattgtttgtgggatacttttctatgtagcactgtattcgatagcactaaagtaatggaagatgtccaaatgggtcattaagtttaaaaagatgaaagtaatttgtatagaaagaaaaattcatcttctaaaaataggacaagtttcaatcacttaatagtatgtgttaaaatctgaaaatttcattatatgtcactttctatttatgagttcttttgagatatatctgtactaagcagggttgatttttatatacaacatcagtagaaactattcttaaccataatatgttacttcttacataccacatacttcggttaagaaaaaaattgaacttccagatttagtaaaatcaagtgacagacgttgtgattctttataagagataacttccttttcttgaacaacagcaacaagttcacattgcctcaagaacttgacagatgatataaatgagtgaccgggctgagttgcccagcagactgtgaggagctcagagtgcaggcccattctgagggacctgcctgtcactgccatgtaggaatggcagccagcctggccacaacttctagttgctgtgctacagtcaaaaccctgaagtttgtgggcaattgcctagttctcaaatgttaattcataatttgaaatccttcaaaactccagggaggccaacatatctgctggcctaatgtgaccccaggatctatacttgacaattctgtttagcggttactcattgattcttttaaatatttctttaaaatctaattctttgcagaaattgtaaaagtttatgaatccctaaggtataaaactttaaaatatgtagagtttcaagcatgcttctatcataaagtctgaatgtatctctttttggtgttaactacgagtaaatgtatggattaatttattcaagcgaggacatctgactcttaagcttataatttgtataattcctgctcctcaggctttataggagttagatttggcaaatttgaaaaacaaaaaaatgaatagtattattttctattaaatgatatcaagatgatctctaggaagggagacattttctgcttgtaaagagatttctgtttccttggactttttaattttctgatatttattttttgtcttcagcgtgtgtttgtctgggatttggatgaaaccatcattgtttttcactcactgctcaccgggtcttatgcacagaagtatggcaaggtaagaaatcaagaaatgttactccaagaaatcttgttaaattttttgtgtttgtttaaaatcaagggctatttaaaaattcttttaagtgtttttttattgcagtctgtgaaatcttctcttaattatctatttctagtgtcttatagttctttaatatgaactggcaaatttaacaaagctaattataaattgaattccttgctatttcttcaaaaggactgagttttctacatcaagaccaagcttcttagtctcacataattattttagaaaaaaaattgtaaatcgaaatggacttcaaaacattataaaatcatatattatccccaataaaagagctttaagaaattgtttaaattaatttgttgcaattttatagcaatagcgagtaatctttcgtctgacagatcttttggatttatgaatgagtgttttttctgtgacttgagtacacatatgaacagcaaccgaggtaacaccccctcccatacacaaagtcagcaatagatggtctcatgcctcacctgcctttctctcttgctattgtttttattttctcttttatttatttatttcattgttattattattattattattattattattattattattattttgagacaaagtctcactctgtcccccaggctagagtgcagtgacatgatcttggctcactgcaacctctgcttcccgtgctcaaatgatccacctgcctcagcctctcgagtagctgggatcacaggtgcccgccaccatgcctggctaatttttgtatttttagtagagacggggtttcaccatgttggccaggctggtctcgaactcctgacctcaagtgatctgcctgcccctcggcctccaaagtgctgggattacaggcgtgagccaccacacccagcagttatttttatagttagcttcttataacatcattattacaaacctctgtgagtgcttctccgaagactgatgcaactctgaaaggctttttggctagaaacacagctgtttaggcaataactgtttaagtcttagactctgtagggctcataatcaaactaaagccaactcagaacatgttggcttactgtcagttactatactcaaagttgtatctttggttcctttacatatcacgcttacagaaatgtcttcctatgtcttcatagcattccattattttataatatctcatgctcatgcagtttttagctttgtctatattaagctatattaagctttgtcttctgacaagtaatgataaaattgcgttgaagtctagtcttcctaaattacactttgggtgaatctgcattgtcatttggttttagtataggtaatgaggtaatggatatttctaaacagatgtgaaggtaataattttgtttaacaaccatttacaagaagtgttagcccctttatcacaaaagtaaagtaaattatacagaaatttggagtacacactcaatatcctactactgattaagtgtgcaatataaaaagtttccagactataatctgaagaatttattctaagtagtattggcttatcagaagtacacagtaaatcctgttgagctgattgcaatatttttgtgcagctaagtttcatattaggtaagtgtttaaaataaacaatctaataagcagactggcccaaataaagatcccttcaaaatagtcaccatgaggtgttacacctaaatatccatgttgcccccattgtgccaaatcagtggtagaactcatcttttggaattatcattagccttttaacatatttcctggcttcacatctttatccttttgtggtcattttgatctttctttaaaaatagaaagatcattcggacccaaggcggtgaataaggagcatggtaaaactgtcactgtatatatttgttttatttttgtcaaaaataccatagagtaatgaagctgcctttctcaatttactcataaactggctttaagagcaattccaaaagcaaagttcaacttctctcagcactgctgcgtcatggaaataaacctgtcagctcccaggatgtcgacaggacatgcagcactcatttcaacacacaagttttatttttccaaagtatttccctaaaaggttttttttcaaattcaaaatagagactctctatgcatcctctgtgcttctagaaggttaaaaccaaaagaaggagaataccaaaagggtggggcaaagcgaggggaagaaggaaactaaccattatggaaggctcatgatgcgccaggcaggaagcatcccacaggatgaaggggtaggctgttctctcaaagctatagatgaggaaacatatccagagaagtaataaaaatgtgtccacagccacacaaccagtcagtggcagagacgagtcctggggccccagattctttgaccctgaagccatgttctttctgccatagcacatcgcatggcctggacagttaatataccaggaatgcaatagaaaagtaatatttccaaacaggagtaaagacaattagtgaggtactgcataggcagttgggtgagttctcttttaagttgtaattttaatgatcttctctcagacacttggaatgtgttttcatcaagaggtaaaacttaagaaatattccatgaaatagaatatggcagacagtaatcagtatctgctggtggggcagaatacagaaagaatcagaggcactattggaaggggatgagaaagataaacttacatttataggatacctgtcctgtggttcagccgatgtttgacattttagaagcaatagggtggtggtgaaaggcaaaagcttttgagtcagataaacttaagttcgaaaatcgagttctgatgcttacagcattctgactctggcaaattacttaaatcttcagtttcaaaatctgtaaaatgggaataacaccatctgttagattgaccacactgaataatgtttttactcagagcaatttaagaaaactaaagtaaaagtgtttttaggctatattttttttaataaaaacaaaaacatccttgtcgaattccatgaaaaacaacttatattgccttatttattgaattattacatatatttctctaaaagttgttttatcattgacaatttacttaatgtaattcagaaaatcggcactgccttttagccagtaataaataatatcttggcatattgagaagtagctaaataaggcccatcttatgaagctatggaccacagacacctcagggttcacggcagatgggacagagatgacgttgggtagcttcagcttcaccacaaaccataactgaaaaatggtaaactagagcccctcagacagactgcattcatttaacaaatagttagtaatatcaatagacatgcttcttgctctcatggagcttacaaaccaaacaaaaaacaaaacaaaacaaaaaaaaacacatttcaggtattggtgacttctgtgaagaaaataaaactaggtcgtataatgagtgactggggtatgtgactgaggaagtgacattggtactgagaggagctagccctacaaattaagagagtgggagaattggaaagagcattccagcagtgggtgctgatcttccagtgttccaggaatatgaagtctagtgtggctggaaggttgtaaacaagagaaagaatagtacaaggtaaagggaaggaggtggaacaagttggcaaaatagaaacctccactgattgtcctccctgcagcaacaccaaattgaataagtatccacacaacacaaccaccttcataagaaccaaaagccaggtgagcaatcacacaatacctagttttaactcatattactgaaggaggcactgaagagggtaagaaagacagtcttgacttgctgacaccaccaccccacaccagtcttccagcagcagctgaatggcacagagagagaatctgtgcacttgggggagggagagctcagtgagtgtaggtttttgcattggaactcagtgacctttcacagcagaaagcaacactgggtagaacttagccaacacccatggagggggcatttagaccagtcctagctagagaagaatcttccatctcagctgttggaacctgagttctggcaaatcatcaccaccatgggataaagtgctctggggtccaggcagtttaggccacaaggaccgcaattcctggacaagtcctgctgctctgctgggcttgaagccagtggactcggcagacacatgacatggtaagacaccagccagggcagccaagggagtgcttgtgctacccctccctcaggcccaggcatcacagctcacagttctagtagagatgtcttccttccacttgagggaggagaggaaagagtaaagaggaatttgccttgcaacttggatactaactcagtcacagaaagaaagggcaccaggcagagtcctgaggctccagttccaggccctggttctgagataacatttctacacacgccctgaaggaagcttgcttccttgaagggaaggatccaatcttggcaagattcatcacctgctaccaagattcatcactcttgggccctgaataatcaacagtagtagcaaggcagtacttgccgcaggccttgggtgagactcagagatgtgctggctttaggtgtgacccagcatattcctagctgtggtggctatggagagggactccttttacttgagaaaaggagaaggaagaataaaggggacttcctcttgcagtttaggtaccagcttggcaacagtgggatagggcaccaagtcggcatgtggggtccctgattccaggccatggctcttggatggcatttctgcacctgccttaggtcagaggggtgcccactgccctgaagggagagccctaggcatgaaagcattcgccacaagctgactgaagagcccttgggcattgaatgaacatctgtgatagctacacattacttgccatgggcctggagcagtcaatagtggtcatgggagagaattttctgcttgtggaaagggtagggaaaagtgggaaggacttcattttgtggcttgggtgctagctcaaccacagtagaatagagcaacaggtagtttcctaatagagcaccaggtagattccagattcaggtcctagctcctagatggagccaggctctgtagacccaccagggaccaggggaacttgacaccctgaagggaatcatacaaacttggctagttttgccacctgctgattgtagagccttgagcaaacataggtggtagccaggcagtggttaccacaggctttgaatgtgacccagtcctgtgctggctacaggtctgatccagcacagtcccagggtggtggtcacagaggtgcttgtgtcaccctttccccagctccaggcagctcaacacaagagagagaccccatttgtttgggagaaagtaagggaatagaacaaaagtctctgcctggtaatccagagaattctttgagatcttatccaagaccaagaagagggcatctctatgagtctgcaagagccacagtattactgggcttgggtgcccccatttaatgcagatagcatacagtgaccaaaaacttagatcacaacacccaagttccttcagatacctcaaaagccttcccaaaaaggacaggtataaagaagcccagacagcagcgactccagtaaatacctaactcttcaatgttcagacactggtgggcatccacaatcattaagactacccaggaaaacatgacatcaccaaacaaggcaccagtgatcaatcctagagagatggagatatgtgacctttccgatagagaattcaaaatagcttttttgaggaatcgcaacaaaattcaagataacagagaaggaattcagaatcctataaaataaatttaacaaagatattgaagtaaaaatcaagcagaaattctggaattgaaaatgtaatggacatattgaagaatgcatgagtctcttaacagcagaattgataaagcagaaaaaagaattagtgagcttgaagacaggctatttgaaaatacacagccaggggagacaaaagaaaaaagaataaaaacgaatgaagcgcacctacaagatctagaaaatagcctcaaaagggcaaatctaagagttattggccttaaacaggagatggaggggtggggctagaaggtttattgaaaaggataataacagagaacttcccaaacctagagaaagatatcaatatccacatgcaagaaggttctagaacaccaataaaatttaacccaaaaaagactatctcaaagcatttgataatcaaacctcaaagcccaagaataaagaaaggatcctaaaatcagtgaaagaaaagaaatgaggaacatacagtggagctccagtacatggcagcagacttttcagtggaaaccttataggctaggagggagtggcatgacatttttaaagtgctgaaggattaaaaaaaaaaaccatatttaccctagaatagtatatccagtgacaatatccttcaaacatgaaggagaaatactttcccagacaaacaaaaactgagtgatttcatcaacactggatttatcctaccagaaatgctaaagggagttcttcaatctgaaagaaagggatgttaatgagcagtaagaactcatctgaaggtaaaaaactcacaggtaacaataagtacacaggaaaacacagaatagtgtaacactgtaattgtggtatgtaagctactcatactttaagtagaaagactaaaagatgaaccaattaaaaataataactgacaacttttcaagacatagtaaaataggatataaatagaaacaacaaatagttaaaaagcaggggaacagagtcaaagtgtagagtttttaattagttttctctttgctggtttgttagtttgttggtttatgcaatcagtgttacattgccatcaatttcaattaatgagttatattatttgcaagcctcatgataactgcaaatcaaaaacatacaacagatacaccaaaaatacaaagcaagaaattaaaacataccaacaaataagtcatctttactaaaaggaagacaagaagaaggaagaggaaaccacaaaacaaccagcaaacaaataacaaaatggcaggaataagtccttacttatcagtaataacactgaatgtaaatggactaaactctccaatgaaaagacatagagtggctgaatagattaaaaaaaaacaaaaaaaaacaaaaaaccgtgacccagcgatctcttgcctacaagaaatacacttcacctataaaggcacacagagactgaaaataatgggatggaaaaatatatttcctgaaaatgaaaactaaaaaagagctagagtagctatacttataatcatcaaagtggatttcaacacaaaaagtaaaacaaaaaaaaactataaaaattagacaaaagaaggtcatcatataataataaaggagtcaaatcagcaacaggatataacaattttaaatgtatatgcactcaatactggagcacccagatatataaagcaaatatcattaatactaaagagagagataaacttcaataccatagtcactggagacttcagcacctgactttcaacattgggcacatcatccagacacacaatcaacaaagaaacactggacttaatctgcacaggcttagaccaaatggacctaatagatatttacagaacatttaatacaacaactgcagaatatacattcttctcctacacacatggatcattctcatgatagaccacatgttaggccacaatacaagtctttaaaaattaaaaaaaatgaaattatattatgtatcttctctgaccacaatggagtaaaattagaaatcaataatgaggaattttggaaactgtgcaagcacatggaaactaaacaataactcctgaatgaccaatgggtcaatgaaaaaattaagaaggaaattaaaaatttcttgaaagaaaaaagtgataatggaaacacaaaatactaaaccctatggaatacagtgaaagcagcactaagaggaaagtttatagctataattgtctgcatcaaaaaaagaaaaacttcaaataaaccacctaatgatgcatcttaaagaactagaaaagatcagagaagaaataaatgaacttgaaatgaaaaaaatacaaaagatcaacaaaattaaaagttggttttttgaaaagataaacaaaatagacaaatctttaaccagcctagctaacaaaaaagaagactcaaataagtaaaaccagaaatgaaaaaggagacgttacaactatacttcagaaattccaagtattcttagaggctactgtgagaaactacatgccaataaactggaaaatctagatgaaatggaccaacaactagacatataaagctgtcaagattgaatcatgaagaagtccaaaacgtgaacacaccaataacaagtagagatggaagctgcaataaaaagtaccccagcaggcccggcgcagtgggttatgcctgtaatcccagcactttgggaggccgaggtgggcagatcacgaggtcaggagatcaagaccatcctagctaacatggtgaaaccccgtctctactaaaaaatacaaaaaattagccaggcatggtggcgggtgcctgtagttccagctactcgggaggctgaggcaggagaagggcgtgaacctgggtggcagagcttgcagtgagccgagttagcaccacagcactgcagcctgggggacagagtgaaactccgtctcaaaaaaaaaaaaaaaaaaaagaggaagaagaaaagaaagcctgggaccctatgactttactgctgaatttttccaaacatttaaggaagagctaatagcaaccctgcccaaactattccagaaaacagaggaaggaatatttccaaactcattctacagggctattgttactctgataccaaaaccagaagaagacacattaaagaaagaaagctacaggccaatatccttgataaatattgatgcaaaaatcctcaacaaaatactagcaaactgaattcaacaacacattgaaaagataattcatcatgacccaagtgggctttaccccagggatgcaaggatggttcaacatatgcaaatcaatcaacgtgatacatcataccaacagaatgaaacacataaagattatttcatctgatgctgaaaagtatttgataaaattcaacatcctttgctgataaaaaaaatcttcaaaaaactgggtatggaagaacaataccttaacacaataaaagccatatatgacagacctgcagctgatatcacacagaagggggaaaaattgaaaaccgttcctctaagatctggagcagaacaaagatgcccactgtcaccactgttattcagcatagtactggaagtcctagttagagcagttagacagtagaaagaaataaatggcatccaatttggaaaggaagaagtcaaattagccttatttgtagatgatataatcttatttttagaaaagcttaaagattccatcaaaaaactatcagagctgataaaatcagtaaagttgcaggatacagaatcaatcaacatacaaaaatcagaagcatttttatatgtcagctgtgaacaatctgaataagaaataaaaaagtaatgctatttataatagctacatataaaataaaattcctaggaattaaccaaagaaatgaaagatctctacaatgaaaactgtaaaacattgatggcataaattgaagaggacacaaaaaaaatggaaagagattccatgttcatggactagaagaatcaatattgttaaaatgtccgttttacctgaagcaatctatcaattcaatgcaatcactatcaaaatactactgacattcttcacagaaaaaaacaatcctaaaatttatatggaaacacagaagacccagaatagccaaagctaccctgagcaaaaggagtaaaactggaaaaatcacattacctgacttcaaattataacacaaagtgatagtaacaaaaacaacatggtactgtcataaaaacagacatataaagcaatgaaaagaatagagtacctagaaacaaattcatacatttacagtgaaatcattttttacaaagatgccaagcacatacattggggagagaacagtctcttcaataaatgatgctgggataatggagatccacgtgaagaagaacgaaactagacccctatctcttgccacatacaaaaatcaaatcaaaatggactaaagacttaaatataagatctcaaactataaaactactacaataaaacattggggacactctccaggacattggactagggaaagatttcttgagcagtaccccacaagcacaggcaaccaagcaaaaatggataaatgggaggcatcaagttaaaaagcttctgcacagcaaagaacacagtcaacaaagtgaagagataatccacagaataggagaaaatatttgtaaactatccattatacaagggattaataagcggaacatacaaggagctcaactcaataggaaaatatttaataatctgaataaaaaccggtcaagaaatttgaatagatatttctcagaagacatacacatggcaaacaggtacgtgaaaaggtgttcccatcattgatcatcagagaaactcaaaactacaatgagatatcatcttaagacacttaaaatggtttgtatccaaaagacaggcaatgccaatgaggttgtacagaaaagggaaccctcatacaccgtttgtgggaatgtaaattagtaccaccactatggagaacagtttggaggttcctcaaaaaccaaaaatagaactaccatgtgatccagcaatctcattgctaggtatatacccgacagaaaggaaatcagtatatcaaagaggtatttgcactcctatgtttatttcagcacttttcacaatagccaagatttggaagctacctaggtgtccatcaacagatgaatggtaaagaaaatgtggtacattacacagtggagtactattcagccataaaaaatgagatcctgtcatttttagcaacatggatggaactggagctcttttagtgaaataagccaggcacaaggtgacaaactttacatattcttacttatttggaagctaaaaaacgaactaatggtgacagagtagaacaatggttactagaggttgggaagggtagttgttgaggggtgcagttagtgggaatggttaatgggtacaaaaatatagttagacagaatgaataacatctagtatttgatagcacatcagggtgactgtagtcaacaataatttattgtacattttaaaataactaagagagtccaggcacagtagctcaggcctgtaatcctaacactttgggaggtgacgcaggagaatcacttgaggccaggagttggagattagcctggacaacatagtgagaccctgcctctacaaaaaaaaaaaaagtgttttttttttaattagctgggcatggtggtgtatgcctgtattctcagctactcaggaggctgatgttggaggatcatttgagctcagagattgaggctgcagtgagccatgttcacaccactgcattccagcccagatgtcagagtaaaaaataaataaaattataaaataaataaaagagtttaattggattgtctgtaacacaacaaaatgataagcacttgaggtgatggataccccatttaccctgatgtgattattatgcattgtatacttgtatcaaaatatctcatgacgccaggtgcggtggctcacgcctataatcccagcactttgggaggccgaagtgggcagatcatctgaggtcaggagttcaagaccagcctggccaacacggcaaaaccccgtctctgctaaaaataaaaaaattagccaggtgtggtggtgggcacctgtaatgccagctactcaggaggctgaggcagcagaatcgcctgaaccccagaggcagaggttgcagtgagctgagatggctccactgcattccagcctgggcaacagagtgagactctgtctcaaaaaaaagaaaaaaaatctcatgtatcccatgtgtatatacacctactatgtacccacaaaaataaaaaatactacagagatatatttatttatttataaataaatataaatatattcatttatttataaataaatataaagaaatatattcatttatttataaataaatataaagaaatatattcatttatttataaataaatataaagaaatatagaagagagaggtaggcaagggctggaccaggcaaggactcttcattatggtaaggtgtttgggttttttctggttgcagtgagaagctgttggggagttttaggtttattattgtctgctatgcagagaatagaatttagaggaataagagtggacacaagttgaccacttaggagacactatgcagtaagaatggccatgccttagataggaacagtgcttctgaaacttgagtgtgtgtcacaataacctgcagggcctgttgagcacagattgctgcgttacaacccagagtttctgattcaagaggtttgaggtgggaccataggttttgcatttggaacaaatttccagataaagctgatggtcctgggctgcattttgagaaccactagagtggagtatttcccagactttttttccttgagcaaactaatgaacatgttaattaatagtctttgagaaaaggccatggtcaaatatatttagggaatgcttacattttatagccattcaatgcatgttatcatattaaaggtcatgagatgtttaaaagaatcctctataactaagtttaatccctcagttccctaatgtcatcagtaataaccttgaggactgactgaaataaggttattctgatgattagttaagtcaggactttgcattgctaataacaaaagtgaccagagccattatttctgggaggggggaaaagacctttgtagtgttaagattgtctaagcttgaaattattatgggtccttaaaattattatgggtccttaattcttttcatttcttagatcagtcttatttccacaatatgcatgttagagtgtaacaacattttggtatagcatagtgatttttttgattattttagccagagattcctctacacacatatgaccgagagcatcactgtatagaacatctaagggcagaactgctctaggtaaaatgtacagatgggggactggagagatcccatttcccctacatgaccacccttccccatcattcttggtcaccatgaaaggtgttcctgaatcctggagcttgctcagaatacagcctggaaggcagtcgactagctgaaggagcactgaactaaaagtcagaaggacctcctgtgcctggctgtgcctaagggcaaactgacctctgagcctgtttcatctgaaaatggttataattcatttccttccaggggttacggggtggcttaaatgagataatgtacgtatataaaaatgacactacacggtgaaaactatcatctacctcctaggttagagaaaattcataaaaatataccttctttctccaaaatgagaaataactaaaggcagatgttttcagacctgcaaggtcaatgtttactcctgcaccatgtgaagtggcactgcagtggcctcaagtatagtgagctgggagctgcacctatgaagaccagagatgtcaatcatatcctgaaattaccatacctacctgcatatctacctgtctttcttcctctccccgcacccataattagtgggcaatactgagtatcatttttttactggttactgtgcgcctggcccttggctgagtgtcctgtgaaatgcattctctcattagcttttcccatcaccctgtgtgattgattggtactaccatacatagctcataagtggcaagatcagtgaaatccgtatctctttggcaggttcttaatctctgtattctttggtctcgtgttctttccccacaacttgtaaaaataaaatgtgtggaccacagtaatgtaggaatgaccttttacccataaattgtcccaactaacttttgtgttttaatttaaaaaaacttttggaaaattctacttccatttataaattaaattatgtgaatttcccaagcatcttcctaatgggttatcactttttgaccctgttcaattgtcaacactgtcttttccaagcagaactattcctggacatttctgacgatggtgaatgaggaaccttgctatctgagccctgctgctatgaggctggtgatgggttttgcagctgagcaccaattgcaatgtacagtgtctgtgctgcaaaactctaaaataggagcttgtaaattcgacaggatgtagaccaggaatcatccatcacgttagagtttatttctattccctgattgtgtatatcattttacctgataacttgcagtgattccttttgttttcaggggagggtgaagaaagctatataaattgtgctttagggatttggtttatcttggatcattaatgtatcatgtgctatgaagctatgatactctaaagttattccacagtaaggacacagaggaaatagcccaagtcagggggaaaaagtgaaggaactgcaggaaaagtgaatggttggctgataatgtgaaactcagattcagggtccccaaactgcttgcttattttagacaacatctcatattaacagcagtgctggcaaaataatatgtttatcagaattaatcaattgattgcttgtatattgaacagtctacacacatttgtgcagaaaaatacttctaacatagcatttggctggattttaaatgataggctagtcatgaagataaatgctgatgtttgtgcatttggactaaagaaaaccaacatggtttaatagaaagtaatagaattaatcaagtgttagaaccatggatctgaggcaatcctaatggcagtgctaacaaacaccatatgcttagagggctctggctttggagggagaatgaccctgagttcaaattctgcctctccctcctagtacccatgtgaccttgagtagtttatttagcatttatgagcctcagttgtcttgtatataaaataaggagaataataaaagtagtaatttgattctgagggttaaatgagttaatgcattaaaactcaccacagaataaacattcagtaagcataacctatttatttagtttcaaggaaatctggaatacaggaaactgaatttttctaaggaaatttgcattttatatttgtatctgttattttacctcataatatgagtcagtcagtgttgcagagaagtagcactatgccagggtgactagagagtggttttggtatatattatataaaaggaatgattacagaatttgcaagactcaaaaaatgcataatgtttttactggtagcttatagtaagtttgtgtgtgcatgtgtatgtatatagtgtgtacataaatatcatacatatgcatgtgaaaataaagccaaatcaaagacagtgacatatctcgaactcttccctagggaattggggaatcattgctacctattgtctcccctttcagagcttcgtgttgagtatatgtttgagaatttcttttaaaaattaaatggaatgactctgcgtgatctcatgaatagccaaatatattcctaacttttatttaagcccatctttagcaagtaattgctggaattatgttagaaaaggggaaagatcttgaaaggacatcacattgattaacttgaagctaatataccagagagataatggtaactaatctcttaaaaacacatagagcaaccttctgtaacctgccctgaagttttcagttcctttgatctcagttgatgatcatttaatctcatatcttgagaaggtgggggattagaacattaacttaccttaagtattctttaaccatcatcaaccctctcctaggcatttcctcctatagccatctcctaacatgtcaatcacctttctcctggagtcctgaggagcctcgtgaggtgtgtgtatttgccacctctgctctgccacttttctctgggccctgtgctttctagcccatcctcccaacatggtatttttctttccatccaagtaccatgttacactgttgccatgtactaccactgtaattccccccttgaagtacatttattctgttattagtttaatacatttggattcccttctgactgaaactgtagaagcctctagtggtaagttgtgtgatgatccccttcatcatacaatttaagcttgacaacattaactactgttcaactgcaaatatgttgcttacactgaacacttgaattgtgaacaaaatcttttaattcaaaatgtgctagcttttcacctttaccagctccccagcaggtaattggctacattactaagaaaaagacaccatcagacatttggtccttgaagttaagtccacagaatgatctttatggaggtgaagggtggaaaaggcactcttcctcataagcaactctagagaagtctagttcccgagaaattatactaagccacagttctactcagtgatcacgctggctcaagtccagccgtcctgtggaagcaccacagaggcttaactcttggaaagccagaaggtcatgccagctctgatttttcttaactatcccagtctctcattataatatcttatagaccagtatttattcaaaagtaacatgtatatgaatcacctgataatcttgttaaactacctggcaaactagatctggggaagggtctacaagtgtgcatttctaacagtttccagatgatgccaatggtgctggtctgtgaaccacactttgagtagcaagactgtcatctgctgactctcaatttcgtttgtacattggactcactgcagagctttagcatgactgatgcgtggacccacctcagataatccgatttagttggtatggggtgtggcccgagcaacaggcattgtgaaagctccaccggtgttccccatgcatggtggagtctgagaactcctgtcttatatgtcatcctcccagcttggagtcctccttatgtaccactataaccctacttttccataacgcctctctatcctttcctcattatttctccatcagaaaaccccactgactgcctgtacctcaacagttgaatgtggccacaaatctcaagtgggtgcaagcactcttggggtcatgaactcttcctattggaggttttgaagagctgaagggagagcaagcatatctctcccaattctgtacaaacctcctcaattactagggggaaaaaagcaaacaaatgaattctgtcatctttgcaccaccaaatccgtgcctcctacatctgtagccatagatgtctcttgcacctctcttgcaccctggttccgtgctccctcacctacccaaagaatcgactcctgaaaggacttctttcgctaagccaccagtttctcactctcctagattcttcccatcaccatcgtatctgctgtcacattcctgtcattagaagagcttcttgagcccattttcccctctggtgactgctctccttctctgctctttccagctttgccataacatgacacttgccaagtctgaggagccaccttgttgccaaatcaagtgttccttcttggcttatcttgctggggcctctcacatacattcagtggagcactcttgcattcttaaaatccttgtttcctttcccttccctggtcagggtccctcttctcacacacagactcctcacctctgggctctgtgtatgttcgctactattgcacctgttcatacctagctccctcacctttgtcaggcctctgtttctctctctgccattacctcctgaaagggggcttctctgaatttgctttaaattagccctttccactcatcctcatcacttctgtatctgcttgtcctggtttttctttcatagctcatcaccacctgaaatgcttatactcccttgttttcttgtctgtttatcagatatctcatccagtaataatataaaccacataaaggtacgggctttgcttttttggttatctgctctctgcttggaatttgaacgtgtctaatacataattagtcactcaataaatatatgatgaataaatgaatgttcctgaaaccattttccagttcctcctaagaacctgtaagcccactacctatccatcatagacaagtatcacaattgtaaaatttctgttctgatttgtgactgaatttcattttatctcttatgatttaaagagtatatgtattctaaaaaatccagtaactttttccaccttggttcatggagctggtctgccttctttcttccatgatgaacttgcatatcttctatctttgtgtgcacatgtctacacatatgctacgggtcccaaaagaataactgtttcaagaggttgatgtctttaaaaaacaaaaaaaaacgtccttagtttctttaaaaatacataattgctgcctctccagagatatttttacagtgtgtccctagaggaggaattccagctgatggcccaatgcagggcagaggcccgtagacagacagtctggctccaatttatgctctgtgttcacatggctaataggcgttagtattttgatttagagaactgctgtactggatcctgccctggttatacactggcaacatctggcttagaaccacacatttaaaggccaagagctatttattttcttcatcttcctcttctctctctctctctctctctctctctcactctctctctctctctattcagtaaaatgtctggggaatagtttcagtattttgatagagcagtacacagaataaattggcagtagttcaatttgcttcctattaaactctgttgtagacactttgaaccttttggaactgttataatatgtataatatatatcagaacttccacaaaaccctgttagtgcctttattatcccacttttttcctctatccaagattttgctatcacctcattttagaccctaaactcaacattcactacacttaaatgcaaattaaaaaaaagcaactcttgattcataaggtgcccataattctacaaacatctaatgaaaatgagcaaacatctctgtataaaacttgggttcaatccagaagtatgtttcattctcacatgcctgataaaacagtggaattgcaggtgctggcagctccctcacagcagtttggcaagatggagggtgcccagcattgctaaggctacacccaccaaatgtccagtcatctttctgggattcttggatctgtgagtcctttagctggaaaaatgcagtgctgtaatctgctcacttagaattagctgtcccagtgacttagtaagctggaaaaaaacaaaattaaaattagatatttgaaagtaagcctgccccagacattctcttagaaacaagatcaccacctcttacaggcatggttttccttggctgatggcatgactagccctggcccatctgtgccaagactttggcatggctgatgaaacctctctctttcaataggccttgctctctggaaagcttagtaaaatacagctagttcacactccagcaaaccacaaacctaaactttcccagttacaaatgatattttgccaaaatgcttactaagtcctggctctcacagagtgtgtgatgtggaatctccacagcttgaaaaacaaatgaccagccctcccagtgccgtggggttgcattccagtggagtgctcaactacagtttttatcacaccacatgccatgcttgcttgctagcagattcttgcattttgctttttttaaaaaaaattatgcttgtttgcatgcttatcagatgtacaaaatgcattcttcatggattttcctatcactgtttgggtagcacagagttacgtacttcagaagcatggaattgatcaaagtaacaatcaaaaggaacagtatgttttctcccatccccataaatctgatctgtaaatgcaaagaatgtgaagaatgaacataagaaattcaataatggtatttaaaacttaaaaagaaaaattggcaaatcataggataagagcctaaccaacctggtctccagaaggaaaaccttttaaatcagatatttctgaactcctatctgaaatatatatctttagggcagtaatcatcagaaacataacagactagtgtggagctcagttttattgtcttgcatcagtgaacattcctcagaagcacagagcgtcactaatggaattatatgttttcatgctataattacatttgatttttcctgatatttctgtagactttgttcatggttccatgactaggcagaatagtttcatagaatatcctcagcctagttaatgcctagttcccccaaccctgtcaaaaagacagagactaattataggaatttttcaaccaaaaaagacaaaatgttttttttttaatttacacaacctttagagattttatttcaacaaaaacatgatcaacaaaatgaagaaaaaagaattttatacttgaaggaaacagagcaaggggcccttctgagctctgaaaccccttgagacacaaactggcacttattaatattttttttcttttgagatactgtttcactctgtcacccaagctggagtacagtggcatgatcttggctcactgcaacctccacctccaaggttcaagggattctcgtgcctcagcatcctgagtagctgggattacaagcacacaccactgtgtccagctaatttttgtatttttagtagaaacagggttttaccatgttggccaggctggtctcgaactcctgacctcaaatggtctgcctgcctcagcctcccaaagtgctgggaacacaggcgtgagccactgtgcctggcctacttattaataattttattcttgtttttaatgaatatttgttggctaaaacagaactgatttgatctttgggtatatagtcccaaatggttctgtcactggaagacggatgaatccggcagcacagtcaagctaccggatgacataataccaggaggccatcagatatgtgaagagtcagcatccattactgagaaatgagaatctctgcctatgaaatccacataaatctctaaatgagaagatgcaaacaattagaaaattatgttgaaatccagcgtattattatcttgtctctatcttcactcacatcgtcttagtttagctctcataccccagtgaccccttagcactcaatgcctttttcttagcatttaattcctattctccaggttttcatggctatagaacacaggatgacatctcaaatatgtttacactttagggcttccccctcaaaacatgatgaaaggaaatataggaataaaatggattatcatagtggaggtgtggaatgaagagtggtttctccttgcaaatggaatcagttcagggtgtagatgaatactgcttggcctgacctgggttgcaggttcttatcataaattgagtaaagtttgcattacatttccccaagttgagatacatttcttgaaatgccaactattagaacgttgaaaacacaatttcggctctctcttctcaaatccctgcagtctggctcctggcccagccactcaacccaaatcaccctctgaggtcttccaaaataacttcccagccaaaaccaatagtatccttctagacttgtcagctttattcaaaaccttattcttctccctgctaacacccatctggtctcaaattttaagggtttgtcccttccaggttttttctttctcttatcttcggagttgcacctatgagcagttcttctttagacatcattccaactttgataattttaaacacaatgtttgagcatgaattacttccctattcccatccctatccccaaatgctcctttctttttagtcttatatctcttgatgctaggccttcagctgcagttaattatggtaaagtaacaactctggtcttgattttcgacttcttgctgctgtttaatatcttggtttctgtaaacaaaaattgagtcattttaactctttactgaccccatcacttcccaaagcatatattttttacctggattacacttagagaactaatgttcttttagctattctcacccctcccttcttcaaccttagtcaaatgcaggttagaccaaactctacacatgtttggatagggagattcctcttaccttgttgataaaaatgcaattaaaaattaagtgatggtcgcaccatcctctgccagctcttcctgtttcacctccagataacattctctactcaagtcctataaatacccagttgacctatttttctctatcttttaattcttattatttgtcattattcttaaaaagacatcctttctttttagtaagtttgctccattcttcagcaccccatccaaatacctttctccagaatactttccatagattatatgtaaactgggtcatatgaactagctgatttccttcctccttctctcctcaacatacagctttatgtgaaaatgtatgctgagtcatcgttacgtatgtctgaattcccaggtgtgtctgtgcatttggtatgtctgaaccttctggaaagtcacctttttggaaaactgagaaatcttttgaatcttcagtaaaaacccatgcagtcttctccctcttccaccacagcaatatgtgcttaaaatatttttaataataagcgcttactgaaattttacctcattatgtgtacattttctttacaggatccccccatggctgtaacccttggactccgcatggaagaaatgatttttaatcttgctgatactcatttgttttttaatgatttagaggtaagaattttacaaggtacaaatagttgtatccaacaccagacctcctagatggtttctgtatctgtagataacctcgagaaaacagaaagataaaaattcagctcaagagaagcataaagttcttgtcaagaggaaaaattgtatatacaaatataagcagaaagttaatttgtgttcatgaataatacatatgtagaacaaaaatgtctctgaagaggagattgttggctttgctgtccttactgtccacagctgtacatgactcttggttcttttagtgtttcagcattagctcttccagattattaacccggaacctatctaggttaatcactaaacgatattcacagacactattcatggtgatagcgtggatcaattaattttgtggataatctgaaacttaactttagctaacattatcattccccgtttctttcccttctggataaaacagtgctagaactatttaagcacatttgatgcatttaaatgcatttattttctcattttaaaaattatgtttctattttcaacctcaaatggcaagacagtgtctaaatggcaaataagaggaatagaaaataaaaatcaacagcaaaatgaaacgacccaaggaaaaatagcctcagagtagttgaatgtgtactgcaataaagtatgccatctgtgtgctaatgacctaggttattagacattcagataatagaattcgaaataactaaatagttcaggttcttggcagaagtacttctcagtcaagcataactatgctgaaatagagatttctctttcattttttttcagatggcatgtttaaatttattttttatctcatagtttcataattaaagtttttatctatagtcatattatgaattgagagggagattactactactgaacccctaccttgttctagatattttatgttggactttccattaattacttaacaatgtattgaagtaaatgtgtttatcacattatttatgcaagggagaaactgtatggtccacaacatacaaatcacatctaaagttacctgctatctaaatggcagaactggaatttgaagcagatttgcgtggctccagagcacatacttctgacccatcctttgctgaaaattttacaagtgtgtgagaaagaaaagccaagttattgagttacttaaataacttttttttttaatgctctaagttctggagtacatgcgcagaacgtgcaggtttgttacatagatatacacatgctgtggtggtttgctgcacccatcaacccgtcatctacattaggtatttctcctaatgttatccctctcctagccctccaccccatcacaggccccagtgtgtggtgttcccctccctgtgtccatgtgttctcattattcaactcccacttatgagtgagaacatgcattgtttggttttctgttcttatgttagtttgctgagaatgacgatttccagcttcatacatgtccctgcaaaggacatgaactcatcattttttatggctgcatagtattctatggtgtatatgtgccacattttctttatccagtctatcattgatgggcatttgggttggttccaagtctttgctattgaacattgctgcagtaaaaatacatgtgcatgtgtctttatagtagaatgattaataatcctttgggtatatacccagtagtggaattgctgggtcaaatggtatttctagttctagatgcttgaggagttgccacactgtcttccacaatggttgaactaatttacactcccaccaacacgccagttagaaagtttttttttttaaatgacaaggtcttaaatccagtttgagttatatttgagacatgagagtaaaaatgagtggttcagtacattccataaatgtgtgtgctgaaatctgtgtaatagcattttgctgttgttgttgttgtttttctctatggtgagtcatgtttttactgaataatacaattactgtctgtttaaagcggcattcttttttttctacagtggacagtatgaaagctcatattactaggcaagctttcagttttagataacaaataataatcacctctctaaaacctgatttaaattgatcctgctacttatgaatacagaatgattttatatatatatatctggtaataacaaacaccttaacctttccacaacttgaattttttacatacagcgataacttttggggttagtttttctgttgatcagtatggatgagttgcattgtaaagaggatcttaatattattagtcttttcaaaggtataaaaagaaaaaagaaattttatgtggtagtatccaagtaaaagtgcttatttcatttggttaattattttttactggaaataagtggaataaatgaacttttagcttttgtagtggcacattagaagccagatggaataaatttgctacccaacttttaaaagaacactgcagtgagaaggtgaaagtagcatataatgaatttgtaactaactagcaagtttgaaatgaatattggtatatcaaaaacatgttgtagtcatgtatggcacttaaagacatttattttagttcaggtactatgttatatgtatttcaaaaatacctggcaggatctttggtagaagtagttcatgagaaaatactggtattgactttctcttctctgagtatatagctttttagttgtgttttagaatgtgataagaatttcatttgactcaaaccctagaacttagctattcaacaatactgtacttaatcaataaaataattgagtttctgcagataaattgaactctcactgtatatgcgtgccacacaaatgcttgcacatccagataaagtgcccaaggaaacataaatgatttttactgacttgagtaaacaagcactaaaaccaatagaatcaaaacagtagctttcaaaagcattcagtacagttacatacatagcgccctatccttctgcatctgactttgaaaggcagttttactttcacacaactttttatttcaataaacctcttacagccaaaaattgtcttgggctccataactggaattaaatgatttctactcttgttgacaaaaagaattcctcaagagagtaactctaacattagcttattatgttgtcattgttgatgttgaatatttaagctctcagggtgcttttcttaaaaaaaaaaaaaaaaccgaaccatctaatttgacactccattctttcagtagatactgcaacatatatagtagcagctgttcctcacataattccttaaaagatacaaatttaaatcctcctaatagacacttcactgcatcctgcccaactgcagagaaggcagatgcccaaactaccctcccccaacagaagagaatcctgtgtgtttaaataaagtgctatttcggttagaataacctccagaaaagaagtctcaggaagtttgagatggcaaaggtgagaaaagactgctgtgaattataactgataaatatcagtgaccactttttggtcactttgtgagacaaaattaaagtatttaaagttagttctagaatattttcaaatgtttgagttttattaaaatttgttaaagccaaaacattacagtgtttttagtatttcactttttggtcaaaatgattcttacaaagtttctcagagtgaaaaataattgaaggacaattatttagctttttctaaaaatgtaaataatggaagttcaggtttctttcactggaccgtaatcctcaggcaaccgtccagagtcaacaggcatagttaactaggcataaatttaaagaaaagttaaatttggaaaaacctcaaatataacctcaattatggagcttatggtccaataagtgtgatatactgttgtcctcaggagtaaaagataagtttttgggcaacctatgtacaaattaatcatgcgagttaatatttaatgtcagaggaatttctctaaaaattacaatgagaggatattaaatagagaaataacttctgattaccagggaaatttacaaggattcctccacttttttgaatgtcattaatttattataaaagagaaacacagaagttatttacatgtggaaagatttcagagcttcaatggaatgggcaacttcatgtgacaccatttcaatagtgatttatttcagtctacggactttccaagtatgtcaccatctctaaataagaaataatctcatcatttagaactactttggtgcctccatattctgggagaaaaactttatttccaacccttatgctaatgggtaaaatctctccactcttttccttaaagcccagtccagcagttactatcattgcttgcaatgcctttactggatgtttttcaggaagcataatgcctcctttggttacagtttggactgcactcctttcagccaatacttggtcaaagaggggaagacattttctaaatacctgtccggccaggccattccttgggcagtctctgcactcttctctctcccttccttccactcttgacataaatatcttcttactctcctcaccatttagaatgcttttattttatatcatcgtaaccttgtgttagaaaatttaaatgattgtggtaatcctgtaaagaattagcatttgtctagacttctcccatttatttaagaaagaattgtggagtgattattctatgctagattgtgccgtaagtggggatgtaacctggtgaaccaaatgccgcactccagggcacttccagtcagattaaatttggggacccatacgtgtaggtggagatttattcaaaacttactaaccctgtaatttctgtaaattatatgaacttttaacttacctggattttcaagttacatactcagaaggtactgattgggctagtcactgagttttgtatattaaaggaagcctgagtcaactatacctttaaactggaaccggattaaacactttctgtgtggaaatctggagactaggtatgaaatatttgactgccagatactttcaagcccaataatgaatataaatagtagctttcaaaaaacctttgtttagtatggtgtattttcaaatttaatgattttttttaaaaattaattttgaatgctaagcactatgtatatagtcagaagctgtaagtatgagtaaaatactttgagggggactaaggaggcccaagatgctaaaccatacttactctgaggttaatatgatgtagttatttattataaataatttatttttatttattatatatttattattctgagaactaggcattttaaatgccctcaccaaatttcacctttagatcttgtaatattgcgctggaactttgcagattatttgaagatggactaagactcagaacagcaaagaaggatcaaatccttatccacataagttaccatttgttctgagcacacagtaacttacaatcaggtcaactgtggccgggcgtggtggctcacacctgtaatcccagcactttgggaggccgaaacaggcggatcacaaggtcaggagatcgagaccatcctggctaacacagtaaaacatcatctctagtaaaaatacaaaaaacacaaaaaaattagccaggcgtggtggcgggcgcctgtagtcccagctactcgggaggctgaggcaggagaatggcgtgaacccaggaggcagagcttgcagtgagccgagatcgcgccactgcactccaacctgggcgactaagtgagattccatataaaaaaaaaaaaaatcaggtcaattgtgtgggtatacttacataaagtttattttgcttggaattttgtagcacatttgagatgataaatcgtcattatttcccttttacttaaaagtagtctttttgatttgaaaatttaaaaacttgacaaaaagaaaatgtcaatatctatgatcattaccctttttctgtgtcaaaagactaggaccttgaaataacaccagcatggttctttcatggttctggtccagcaggaagtcatggaaattccacaggacaccataatctgaaggcaagcccctctgttgccactcaacaaatgataaataatagtaaccatctgaggtgttcagactaagttttgtgtatcttcagattagccatgcttaagtatgcacaacagaaatggcctggaagggaactcaaatgcttatgaagattcaagagaatttcttatcaataattttaagattaaaatttttaaattgctctaaagaaactctcatgccgtatattttctcacccctcctttctatggaactcttctggatttaaattttgtggggtagaaatggtgccatttcccaacagaagaaaacaagagtgaggcaatgagatggacgggcacatgctgccatcttctggtggtagtctgatcagatgagaagatgggaaaaccttcaagcatggtaacaagcatcatttagaaaacaaataacttttccaatgtttttaacaggagtgtgatcaagttcatatagatgatgtttcctctgatgataatgggcaggacttaaggtaagctatgcctttcagtatgctgtttcctacagaaattcggctgtggagttttgcacatgtaattatttctttttaatgtattttgggtgttacagtacctacagttttgcaactgatggcttccatgcagctgcaagtagtgcaaacctttgtttgccaacaggtgtaagaggaggggttgactggatgaggaagttggcttttcgttacagaagagtaaaagaattatataacacctacaagaacaacgttggaggtatgtgtggctttttcaatctaacaaaggtactctgggtataggtagaattcaatctgtagtttcatgttaaagatgattctgctgtaaaagaaacaagcaaaagctcatattaaaccacattgagccagaagtttcttagaattggtgggaaaaaatttaactacaaaataaaacatgcaccaccgtcacataaattgggaattctttgtgtaaccttgtgcccagatgtttggtcaagatttataccagggcatttagttgaccctttatcagctggtgcttggagcattatcagtgaaaatcagacagaggaactaaccgaggcaacagaaagaagtcctttctcaagtagagagcctcaatcattgaaggacggtggttagcaagcattatctttctggaatcccatcaaaaataaatataaacagttattaatgtcatttcaaagactttcaacaggtttattttatcttttaaaaaaatcatgttttatgtcagtgtatcattctcatgcatagtgtcaactatgattatcatagtttttaaaagttcaaataatctgtaggtaatatcaaaaccattttataccccttcatatattttacaggtgatatcaaaacctttgctatcaaaactgtgatcctggatgtgcttctatatataaaataaaccttggtgatatcttattagaatcaattttaggtaaacaagattcctaaaatttgctattaggtcacatcagattaatctcccaggattttgtttctttatgtgcttctctttttttctaaaaaggaagagtaattgaggaacataaactagaatccaatatactaaatatacatgtgcatactatacatacatatattcacatatatatcatagaatacaatatagtaaataaaatgttcatatatagtatataatcacatatatccatatacatcatgagggtggggctatgtgtctggtcaccttgtatccccagtgcctagcagtgaaacacataagagatgctcaacagatacataataactgtaagagaacaaaaaatgtagagccaaagaggataataatgttagcaacaaaagggagcttagatatggaagacattcatttccaaaaagaaattgacccctgcaagctgccgacttgcatggggtgctggggagaatctctgatttcctgatttgctctagtgctctgtacatgatgcttttgtaaaatcaaataagtagattttctagttaaaatcaatggtagataatatgttttaactttaaaataaatatccccttgggaaatctgagttaatttttatcattcagatgtcatcatttccttcttgcggtgtattaataaaattattttaagttaacaagaagactaagaagtaatcttgtatcttagaaactttaaacaaccacgagtctactttctgtcatacgtgagcatctctctattataatgaggacaaatgagacttgctagaaactgtaaattttgattgaaaaaaccatacaagtgtgtatgtgctcccgatattctaaaacacaatttcaataagaaaccttcctttttaatggatttacatgatcttgttttatcataaaagcaagaactggatcttttaaaataaaaaattagcacatctatcttttttcttttaacatcaatattataattcatgattgtaactgtcctacacttcatgattttaaacaaaattattaattttttacatagcaaagtatttatagtagcattagcagtagtattagaaacattttaacagctacatatgatgatgccattgttactgtttgaaagtggaaatgattgtgattattaagaagctaaacgttttcagacagtcaaaacatttgggatttgtgtccctaggttggtgaagcccaactattcctccagacctcaaatatcacagtcccttggaataagatccaggcaggggcatgttcaaagctctttagatgattgagatccactgcgctagattgtaggatcagtgagggcagagactggggccacttttcagtggcactacctgagacctagaagttcagtaaatattcattgacggaatcaatggatattcaattcagaaacgaaggatcaatatggacataaatctgtatctctctgcatttctgatatatactgaaataaaaatgatctattccagacagaagggaatctaaactagatattctgagacaatattcatctctcgactctgccttggttttttggtgttgcaggactccttggccctgccaagagggatgcctggctacagttaagggcagagattgaaggtctgacagattcctggctaacaaatgcacttaagtctttatcaattattagcactaggtaagtggaattgttacctttctatgtgtatcgtattgaagatttagttctaattgtacaacatagaaaaaatgttttaattcctagactgttttagactttaagggacctaacaattctgagttcagtgattttttcaatttcagtgcatgtgcatgagagagagagagagagagtgtgtgtgtgagtgtgtgtgtgtgtgtgtgtgtgtgtgtgtgtgttgggatgagagaaggttgctgcttctcagaataaacaggagaccctatctcaccacccatctcttctcatagcaactgataatccccacagaatggttacatgacttctaatgaaaaaagaaagagaactcagttggtggcaaagtacaagggggtgatggcaaatatgaaacagtactgttgatacaaaaaggcatgttttaggtgttaggccataatggataatacacataatgtaagcacatcagaaaagcaggagaaagctcttgaaaaaattctaaccattttgttgtttgaactaaacagtgaaattctgacttgtgtcagtatacagagcagaattaaattgatttgtaaccagttgtacaaccaggtgccaaatatgctaattcataaagtgatgtaagtaagtctggaacgtgatagctggtaaggtagagttgaatctctgtactgtccgcttccattattttatatctgagttaggtgaataaataaaagcatgcttaataagtgggagctaaatgatgagaactcatggacacatatagggaaacaacagacactggggcctacttgagggtgaagggtaggaggagggagagaatcagaaagagtaactgttaggtactagacttagtacctgagtgataaaataatctgtatagcaaaaccccgtgacctatatagcaaacatgcacatgtatccctgcacctaaaataaaagtcaaaaaaaaagaatctgtcagcatttccattaagaaaagattaatgggtcaggcgcagtggctcatgcctataatcccagcactttgggaggccgaggcaggtggatcacgaggtcaggagattgagaccaccctagccaacatggtgaaaccccatctctactaaaaatacaaaaaaaaaaaaacaaaattagctggtcgtggtggtgcacacctgtagtcccagctactcgggaggctgaggcaggagagttgcttgaacctgggaggcggaggttacactgagctgagatcatgctactgtactccagcctggagacagagcaagactctgtctcaaaaaaaaaaaaaagtaaagaaaagattaatgagaacgtgcagtatttgcttttttgttcctgtgttagtttgttaaggataatggcctccagctccatccatgtcctggcaaaggacatgatctcattcttctttatggctgcatagtattccatggtgtacatgtaccacattttctttatccagtctatcattgatgcacagttaggttgactccatgtctttgctattgtgaatagtgctgcagtgaacatgtgtgtgcatgtgtctttattataaaatgatttatatgcctttgggtatatacccagtactgggattgctgggttaaatagtagttttgtctttagatctttgaggattcgccacactgccttccacaatggctgaactaatttacactcccaccaaatgccgcatgttctcacttacaagtgagagctaaatgatgagaacatgtggacacatagaggggaacaacacacactggggccttccagagggtggagaatagaaggagggagaggatcagcaaaaagaaaaatgggtattaggcttaatacctggatgatgaaataatctgtacaacaaccccccatgacacaagttaacctatgtaaccaacctgcccttgtacccctgaacttaaaataaaagttggaaaagaaaagatcaatgaataagatgacaaattgttagttttaaaaaaagaagaaaaaagcatgcttaataaatgtatggggaacacagcattcagagaaagatttatttggactaattgaatcagaatgcagaaaagcctgacagggcaaaaaaaaaaaaagttaatattaagaacatgaaagtaaatgaatagttgtcacatcctgcacagcttctgactcgtggcacaggcagagctgcatggatagcagaaagtccaaatggagagcggaggggaagtagcttcctgtgtctgactggggaagccatggcagcttagtttgtcagttctagggaccatattccagtgggggctgtggcagggttgaagcagcctgtgtcaagtgtggcagtcacgggtttggactgtgggaaccacctaaaagaaacagatggaaggaggagccagagagcttagtcagaagagtcatgtgcagaaccaagattaccaatttcacctgtttcagacgttaggctgaaaatcaattagatttctccctgtgtctggaaaggaaagaactgggaccaatgagtaggaatcctgcaagggagattctggctctatataaggaagaaatgtctaaaccagttgaaatgggacttgctatctcatgtcctctgtaattggtgacaagagagaccaaatgtcagggacgctggagcacgaggacccctgagccactgacatgatgtgtaaaatgtagtggagtgtgcatttctctgagaaggaggttgatagctttcattatttctaaaagatgtcttctatataagttaaaaaagatgattacattattagattatatatactatataatatatacagattaattattaaacagatggctttaaggcaactaaaggaatatgtgatattccagaaataaataaagatataacaaggaagggaggagaaaaagaaatcaacatacattgagtagttacatgctatggaatttgctgagttatccacatatattaccatattgatacaattgcagttttgccattacttttaatggcaaaaaacaaaattgcttttgcaccaacccaatagttttcacaaaatgcctggaatgtcagaaaaacagatgctttgttgaattatgtagtagaacccctagcaaaattaacttaccctctgaccctaattattctgtgaatatagtctcagaataacgaaagatgtaagaatatattttggtagcattacttgtaatatttagaaatcaaaagccacttaagcaactcaatttaactctaaaaaattctggtgcatcccacaccacacctattccaaaattgaccacatacttggaagtaaagctctcctcagcaaatgtaaaagaacagaaattataacagactatctctcagaccacagtgcaatcaaactagaactcaggattaagaatctcactcgaaaccgctcaactacatggaaactgaacaacctgctcctgaatgactactgggtacataacgaaatgaaggcagaaataaagatgttctttgaaaccaacgagaacaaagacacaacataccagaatctctgggacgcattcaaagcagtgtgtagagggaaatttatagcactaaatgcccacaagagaaagcaggaaagatccaaaattgacaccctaacatcgcaattaaaagaactagaaaagcaagagcaaacacattcaaaagctagcagaaggcaagaaataactaaaatcagagcagaactgaaggaaatagagacacaaaaaaaccttcaaaaaattaatgaatccaggagctggttttttgaaaggatcaacaaaattgatagaccgctagcaagactaataaagaaaaaaagagagaagaatcaaatagacgcaataaaaaatgataaaggggatatcaccaccaatcccacagaaatacaaactaccatcagaatactacaaacacctctacgcaaataaactagaaaatctagaagaaatggatacattcctcgacacatacactctcccaagactaaaccaggaagaagttgaatctctgaatagaccaataacaggatctgaaattgtggcaataatccatagcttaccaaccaaaaagagtccaggaccagatggattcacagccgaattctaccagaggtacaaggaggaactggtaccattccttctgaaactattccaatcaatagaaaaagagggaatcctctctaactcattttatgaggccagcatcattctgataccaaagccaggcagagacacaacaaaaaaagagaattttagaccaatatccttgatgaacattgatgcaaaaatcctcaataaaatactggcaaaacgaatccagcagcacatcaaaaagcttatccaccatgatcaaatgggcttcatccctgggatgcaaggctggttcaatatatgcaaatcaataaatgtaatccagcatataaacagagccaaagacaaaaaccacatgattatctcaatagatgcagaaaaagcctttgacaaaattcaacaacccttcatgctaaaaactctcaattgatgggacgtatttcaaaataataagagctatctatgacaaacccacagccaatatcatactgaatgggcaaaaactggaagcgttccctttgaaaactggcacaagacagggatgccctctctcaccactcctattcaacatagtgttggaagttctggccagggcaattaggcaggagaaagaaagaaagggtattcaattaggaaaagaggaagtcaaattgtccctctttgcagacgacatgattgtatatctagaaaaccccattgtctcagcccaaaatctccttaagctgataagcaacttcagcaaagtctcaggatacaaaatcaatgtacaaaaatcacaagcattcttatacaccaacaacagacaaacagagagccaaatcatgagtgaactcccattcacaattgcttcaaagagaataaaatacctaggaatccaacttacaagggatgtgaaggacctcttcaaggagaactacaaaacactgctcaaggaaataaaagaggatacaaacaaatggaagaacattccatgctcatgggtaggaagaatcaatatcgtgaaaatggccatactgcccaaggtaatttacagattcaatgccatccccatcaagctaccaatgcctttcttcacagaattggaaaaaactactttaaagttcatatggaaccaaaaaagagcccgcatcgccaagtcaatcctaagccaaaagaacaaagctggaggcatcacactacctgacttcaaactatactacaaggctacagtaaccaaaacagcgatatagatcaaaggaacagaacagcgccctcagaaataacaccgcctatctacaactatctgatctttgacaaacctgagaaaaacaagcaatggggaaaggattccctatttaataaatggtgctgggacaactggctagccaaatgtagaaagctgaaactggatcccttccttacaccttatacaaaaatcaattcaagatggattaaagacttaaatgttagacctaaaactataaaaaccctagaagaaaacctaggcattaccattcaggacataggcatgggcaaggacttcatgtctaaaacaccaaaagcaatggcaacaaaagacaaaattgacaaatgggatctaattaaactaaagagcttctgcacagcaaaagaaactaccatcagagtgaacaggcaactgacaaaatgggagaaaattttcgcaacctactcatctgacaaagggctgatatccagaatctacaatgaactcaaacaaatttacaagaaaaaaacaaacaaccccatcaaaaagtgggcgaaggacatgaacagacacttctctaaagaagacatttatgcagccaaaaaacacatgaaaaaatgctcatcatcactggccatcagagaaatgcaaatcaaaaccacaatgagataccatctcacaccagttagaatggcaatcattaaaaagtcaggaaacaacaggtgctggagaggatgtggagaaataggaacacttttacactgttagtgggactgtaaactagttcaaccattgtggaagtcagtgtggcgattcctcagggatctagaactggaaataccatttgacccagccatcccattactgggtatatacccaaaggactataaatcatgctgctataaagacacatgcacacgtatgtttattgcggcattattcacaatagcaaagacttggaaccaacccaaatgtccaacaatgatagactggattaagaaaatgtggcacatatacaccatggaatactatgcagccataaaaaatgatgagttcatgtcctttgtagggacatggatgaaattggaaatcatcattctcagtaaactatcgcaagaacaaaaaaccaaacactgcatattctcactcataggtggaaattgaacaatgagatcacatggacacaggaaggggaatatcacactctggggactgttgtggggtggggggaggggggagggatagcattgggagatatacctaatgctagatgacgagttagtgggtgcagcgcaccagcatggcacatgtatgcatatgtaactaacctgcacaatgtgcacatgtaccctaaaacttaaagtataataataaaaaaaaaaaggaaaaaaaaaaattctggtgcatctacatggtagagtagtttttttttttttttaattatactttaagttctagggtacatgtgcacaacgtgcaggcttgttacatatgtatacgtgtgccatgttggtgtgctatttgtttatatctattaactattattcccacctcccaacaaaacaatgtataaaaactactctaccgtgtagagtatatacatgtataaaactactctaccgtgtatgtactctacattgttttgttgggagaggggaataatagttaatagatataaacaagtaggctcatgatataaatacataaagtagaatacaaaattgaatatacagaatgttcccaatgggaaaacaaaatctgtatatgaacagaaacactgaaagtaaatgcatgaaatggagaaagcagttttctccagatggttaaataatagttaatgttttttgttttcttctttatatttgtcttttacaaattttcctgttacaagtatatacagtgtttgtaatttaaaaagaaatgtaactctgaatatcacacagtgcaagtcacaaaagttcatatccaaaccacatctcgaaactttaaaagcctgtgctttatttcattctaccatgttttcattctgtaacattttgtaacatttgcctacgtatgacttttaatagcatattgttttgacgaaatattttgtagaactttaagcatcacagtatagtcatgggtttgtatattcttcttaataatctgccattattggaggagtgtctgtctgctgataggcaatagtaatgaattttgaaagggaccattaattaaggaatttagagaccacagtgacaattttaaatctattagaagttatttagtattagaaaacaaacatgtatatttcctccctattttaggagtaactgcataaatgtcttggtaacgacaactcaactgatcccagcacttgcgaaggttctactctatagtttaggaggtgctttccccattgagaatatttacagtgcaactaaaataggtaaggaaattattttaaactctgtatggaatgtgtccacatctgtgtgtctctgcctagttccctttttcagcaatttcacttagtacatgaaacaaatttggataaagttcaaattacaaagtcccctacaactcattgtacatgtatgaattttttgagaactgttgcctagtgacattaagaactcagtatctgagtatagatatttcattcttgtatttcacagaatattacagcccatgttatctaaataatatgtaatacctctagccatagtatttaatagtttaattagtttggcttataatgttgcatccttgcatatgcagtaatctagatccaagataaaaatacaattttggctttgcaggggattctttgatggattgaacgagtgcccttaattacagaaaaaaattaagagttttatgtatcagaaaacataataggaatattcataacacatgagcgactggaaatctgcatttccaaaaatgtgcagtagcaatcaaagaaccacaaccttgtttatttagatgatatctgcttgtggagccatctttgatttttaagtgcatttctcgcagactccaacttctaataaacattcaaaagcaaaacttcatcaacttctgccttattgaaagacttaaaactgatgtattccactgtctgtcaaggaaatacttgggaaaataaatgggttgtgtaatatgccttgaaggtcaacaaacttaggctctggcacattgacaagagaagttcaaaatcctaaaatcccccaccaaaaataacctgccctgggctttgaggaggtctgatgttggccctggcaaaaggagcctccagtggcagctgtttcaagagtacagttaaggagagccaagcttccgtagagtaaatttcacattgtcataagcactacagttcagagcctggatatcaataccatacatttttaatctaaatgtgtgtatttatgtcagcaggactaatagaaagaaggtaattttgcttttttgatgaatcaaataattttacagcagaataaacatttattttagtaaagacaatattctttctgttggcgaaatagttccttatattctttaatctgaaacaaaatcatttttattttttccattaagctagtattttttggacttctgaaccatcagattaagaaaaaaggcagaagtagccatggctgcatgaacattctgggagtgaaatttagagaataatgccaatgttttaaaaacaaagaatatgtagaaattccacggtgatgttcccgtagtgcaataagaggataccagtgttgtcagtactgtggcccagtcagacagcacccttagcagaagttatttgagcaggctaactctcacccacttgaagaaaggtgttgtttatcaagataaattcacttcttagtatttcctctttttttagcggtgaaccttcagtttttctctagaacacatttagctgacttgtctatgctacttaaaattgatttacagaattaaacaaaggttaaaacttatagttgcttgtaaagttaccccaatactctgttggtggagaaaaacatactaatattttctctaggtcaaatgcttatccctactgatgtttttggagtgtgaaacacatttgtttaatcatctgtccgaagtaacgccttaccttattcaaatatatgttgatttcataaacccagaggttgtgagccagttcaagtgatgttcaagaggcattaacttaacactttatgaatctttaggttaatgaatgcagtggctggaagaataagcagtgcattgtttttcaggcaaggaaagctgttttgagcgtatagtgtccagatttggcactaacataacttatgttgtgattggagatggccgagatgaggagcatgccgctaaccaggtaacttcactctgaactttatctcatttatcttccaggaaaagaaagttgctttgaacgaataatgcaaaggtttggcagaaaagtagtgtatgttgtaattggggatggtgtagaagaagaacaggcagcaaaaaaggtaacctgtctcaaacaatgtcggtgtgatacttctaatgcaagcctttttgtttgcatttctgtagtttggcccaatggcagcttgacaaatgatttaaatttatagatgcaaagcaataagagcatgagagggtcaatacttacattcaaataaaccatttggagtttagcattttttgcctgaaatttgataggaaatgcagggaaatttagttatatttatttatgtgtttgaaagtatatacatatagtaaatatatatagtaacatatatatttgtgtgggcatgtatacacatgcttatatagatgcatatgtatatattaatacacatacaatgtgcacagatatagatgagccaggggatctgcaagaaagattgggggggagaataaccattgttaagcacatgaaatttagcaagatagagattaatgagctccatacaaaagtcatgtgagtagttcatgagacctgcatgccatatggtcctcgtgagtgcctggaagtaggcatgctccatgataaggaatgctgagggcagatttaatagctgaagaaaaactgctacaagagattttaataagtgctactgaaatgggatgtattgctcagatccttttgcaccaacttgtcttagccgtaatgtgcctcacatctcctagaagagtttcatctgttttggtgagccagtggtacttgattgaagccaagcagctggctttgaacacattcagaagatcccatgggccctaagtattttaataagccttttcatctggcccgtatttctgaagaagaaaccaaggcaattaaaaaccattaaatggttggttcaacatcaaaagaagaatgatatcaggattggcccccaccaccagactgtcaactccaccctaagatctactgctgccttcaccgaatgatagaaaaatatcatctacccaagataaaagtgatagaatttacaaaacaaagccagatgatgaattagtatttttaaaacaatgacatgccagcctatactgttttacatagaaagaatgtcatctgtatcaccctaaggagattttaaatcatcatctaataaagcctttgccatttgcatgtgctggaatgtttacctgttttcaaaaaacagtcaacatagacagttttatagaaaagtttatggctataagagaaagagaaaggaaatgatgtatgtttctagtcgatttaaatcaagcaaaatggagaaaaggaaagcacttccactttagaagttttggtgacgtattggcagccatacttgcttttcgattacatttaagagagtaggctcaggctctgcctgccacagaacacctcagccttcattagcagtgtcaatgacccaagacagcacactagccccaagcacgtcctgtatgaggtcagggctgcagcctcaagaaatacggctttcattgctgactactacttcaaatgcttccagtcacactgaactgaaatatcttctggagtttgtcaatgtcctgagtccatgttgtgatttttcttattggcaccatagttatacacaacaaagagcagccaatgattagtaatacagccccactcctgctaaatttacatgtcttttagcctatgcaaattaaattcacgtatatttaggtaaggactaatataattcagttttccaaaccagtaacacaatatgcttttgacaattaaaacttagccgagtctacctgttttccacagcattaatgtttagattcggtttaccagttgttatacctaaaacttcaggagggaaacgcataaccctgaatggaaaacaatctcagatagaatgctatttccaaatggttgtttatgtaggtacagttttggtgatggtgaaggcttattattctattttaaaacagaggtgattggtttctctagtacccagaatgcatgcttttctttggatgtagcggtaatcgcatgtgcagaaatgttaagtactgttttgttgttacaaatagatctgagctgaatgaaaaaatgttacttctatgtgaatttcagtgacttaatttgacctagacatattttgtctgagaaatttaagaagaaatatcaaagtttaggaataggaatgtctagctgcgctcttccatagaaacatgtaatattaatacaagctgtatatgtagtttgaaattttctagaagctacattttacaaaattaaagagaaacaggtagaattaattttaataacatgtcaacccagtatacccaaaataattgtcttgatatctaattaatgtaaaaattattgaagtcatgtttacattcttttttgtttgtttgttttgtcctaagtctttgaaattcattgtgtattttaaactggaccaaccacatttcaagtgctcaatagccacatgtggctggtggctaccatagtgtgcagcaaggaattatatagcaataaggattattatgctacttagttcttaaataaaatatcttttgcatgttttatatctatatactcatttcccttatatacatgaatattttatacgtacatattctagaagatgtcatcagcccaaacttaacaaatcatgcttttgttttgtcagttcctgtaatgcagtgttttttctttttcattatcatcgccagtggggactctttagacagtttttttctaattactccctttcatgaaattttaatgtcacatatgtactgtatactattatagtatatcttttgaaggccacaaaccactgtaatgtctaagattttctgccccacaagagctcatttgtgtccctttggagatatcttccccattgaaaatgtatgctagagtactttctctcaattctacgccagtgaaataaatcaggtcgactctactggcttaagttattggttgtcccagacaagtaagaaagttataatccccaccttttttttctactttatgtagtcctgcttcaaattatttttatacagaaaggaattcaccctcttttcttcctagattaacaaaattaagaagtttgtcattttgtttcattttatttttaattgagaggcccgtaggagtgatgcactgattaaaacttgctttccattagccaggtaggattttgatgcccacttgctttcccagatgttgatgttggtagcgatacttccagaataaatattaaactatctaagaaatgttaatatttgctattattctcattaaaatccagttcagatctatttctctgttactttgacagtgccatattggtgctgccaagccttcacatatgatcatcccgcctttaaactctctcccctgaacttgggtggaccacacatccctgtgtgtgctgctgcttcattgagacaatggttgtgatctctctccatgcctcattccttccccttctctctcccatccctccttctcctaaccacacagcacaacatgcccttctggaggatatccagtcactcagacctcctggctctccaccaagcactggaattagagtatttgtaactgtgttctttagccggagatccattttttatatttcaagtacactgaatttttatgtgtgattcaatgcctctggctctacacatataaattgtcttaatggatgaaatcatatttggaataaaaattccagaatgaagaattcagattgctgaatggagttaaactttagtgctacagaaaagaaactctatggtcttatatttacaacactttaatgggttttttaaaaatctgtggaggttgctggtacacaccaaatgagtccaaactggaatgagcagctttagcaaagaactcttaccctggcaaagcagcaacacacatgctccgtctgacaaggtggtcaacaacattcctcaaaatgggagatcttctcagccctgaggtttgaatctgactttagcctacctaacccagaaaatctgaattggaatgcactcagactgtataaggacagtcctatttagacatgtaatttgtgtaaattattgatgaaaataatttactgtgactttattagcagctgactttcaaagtggatgcaatttttctttcttttgttggggaggggaatgggaggggaaatgggaatataatattgtctcttttttaagtttggcaaacagaatgttcatactgatgtgttgtgccttaaagacaagacagcatttgtgtgttacaatgtaactttggttaaaatctctgtagataatgaaaaaaaacaaaaaaaaaaacctttgtgatgattcttaacatgaccaaatttaaaagtcaagctctcagagcttaattaccgcatcagcaagaaactgagtattttttgcaataagaaaacaacaataataaaggaaagcttgtgtttcatttgggttcttaataattccaataattgtatgaggcaactatttgcgcatccaaccatgagtggaaggtttgggaaagactgtgggacctttacttagaaagtgaaatgtatgtagaagtctcaagtaccccttctacagttttactggagaaaactaagagccatattcatgacaacttgcacagttttgaggttgagacttttgatatgtgtaagttgcatagaggaggatattatcatgcaaatcatgagcaattatcacataaacttttttagaatgtgccatgaacatggcataaaattcacattgagtgcacagggcttaaaataaagctaagtatgtttattcccaatgccatggcaaaaatgataatatcatcagaaatggaaggcagttctcccagatggtgtctaatgaaagcaatgagtctatgaaaattttacctagaatatcatcataaattaaattagcaagtgcgctggatcttggcagcgctgctgaaatgacaacagtaaaataatacctggttctccatctgaatacatcaatgcaggttctcctcgtaacagacttgcatatgtttgttagtttctgcctgtattgtcactgcgcaacggatggcattcattacaagaagagcccatcatcgttgtgtttgcatggtttttttccttgtgtgtagcccatgttgggaacacgatacaggttctcctcttatttcctatgacacgatttcccttgtggaaatttaagactttaagaactagagtatttttatggtgtctgcacctgcagttctgtgtttaaaatgtcataatgtggatcctggagtcaggctactagtcagtgcccctagccagaggctggttcatgagttcatcaactgaggcctctgtggcttcaataaagtctacattttgctcacagatcacaacattcactgtggaaatatgatttcatttctttaggctacaaacctgtatttctttactgaatgctaaggccatgtttatattgggtagaaagatattgagatcccaattttgtacaagattgtgatttcattatctaaaccttaaacttaatcctttaaattttgtagcttttggctgcatctgccccaagtactattccaggcaaattaaagttggaatacctttaataatataaaaataatgatagtaaatcttatacttctgttggcccttagcttgaaaatagcagttaaaaaaatttaaatgttgccttgattatcagtacttaattatgttgtgcactaaaaccttaaatatttattactgtgaataaaaacaaattatctttactgtatagctggtttctttaaatgttgatagaattgtggcattacatctaaatttgtaagtcttttcatatcaaacaagcaaggctttttatgctgctaagtctgtgggtgcagaaagaaacaccccttggaagggcaaagagaagccggctggttgcatcaccccgtgcagtttctcacacacatctctttttctgattctgtgttcagaagaggctgccggcataaaacctaaatgcaaggttgacggagaacagcttgtctggcacaacaatggtgcaggcccacgagccagcatcacagcttggccatgggacgttgagtatgcacaaactagaactcttcccttcccaccttaggaatagaaaatcctcttcctttctaatctgaaaaacgaaaactgaacaaacacaaaaccaaccccttggcagttcccacctcctattgacatatggaatattgtgccttattgtaaaccagtttgaaaaatgttctgtaactaaagtgggttttcggctattatgtatacagcttggtatattactacgaaagataaccaccttgtgttgcaccttaaaaatatcaagaccatgtaatttccataacaaaataggtggcctggctatggtattatagcatacaattaggacactatgcccctgcaaaattttgtaaatcaaattcagaggcaaaaacatattttagaatcatacagtttgcacacgacaagtaggtaataactgtctctaaaaatgttttctccttagtccgcaatgagctaagattcagaatagtgtcaacagcatgctcctatatgaagttgttttttttaaagcacatttgtttatgacaagcctacattctcagtgaatatggcatttagtatttcttttgaaaacaaacttaagcatcatgagccaaagttgcactttgactcccaactacggtagcattatggacatctcacaatgtcaagggtttctgttatgtattagtaaagtatagattattggggcctacataatttaaaagaaatgtaaattaatattaaaagcttgtaaaaatatgtatatctttactatttctcaataaatacctttgcaattgttttcatttccttcaccctcccatgttgtagagtttttgtgtgtttatttagcttggttctaaatcatgtgaaatttgtatttaggtttctggtcttcataacttttcttttttatgcctaagttgcataatttccagttaaagcaaaatgagatgtaacacagtaaaacgtcactaattatgactaaaagtgagctgctttactgaaaagatgtcagttgcataattttttatacacaggtagctacattcaagtaagtataatgcataatgtagccacaattcactaatgataaagtaattaaaatatttagacctattagaatatttaaagcaagtatcgtttacgtgaatatgggacatagtttataagtatcttccaagaggataaaaaggtagttttctgtaacagatttaatagctcctttattgtctggtgtatagtatttatttatttgtgaatctgttgttcacatgtaaaccaaatgcaaatttcagataaacctctgctcattcacaacctttaaaaatgttagcctccaaattaatggtatttaagtggagctatgtggcaacattctagtaagccttacaccatccaaaaatcaatactgatttacaggaaaacaatggaaatgtttaaaataaatttaatatgtaaacttcttttgttttctcttatatccagttgccattgaaattgaatttatgagaaagactaaattatacatatcgtattccagctccccactgaactccaaacaaatgtatcttgtttgcctatttatatacctgcttggaagaaacgacctctcaaatcaacatgtccaaatctgagcttgtgcttctgcgccggcctcttctcacctctcccacgactaccaccccagctgaaaccagcatcctttctcacatagataagtacatcagcctctagcttagtctcccttctctggccctcacaccctttcaccatctcatcacactagccagaaacataccgtgcatcagaggatatctctctcctcttcttggaaaccaccagctcgcttggcacaaacaccagtgacctttgcaatggcctgtaagcccacaggcagcatccctggtgagctctcccttcctctgtctcacaactcactgccaaactggcacctccgtgtttggcacatacctgcacccacccacctgctgcaggccttttgcactcaccattccttccacttgaaaaggttttcacccagatctttgcatcacctatgccctgggtttcttcagttcttaaagaacacctttttgctgtaaaggtcctcctctctgaaattgcacctgcttcccaacacctctagcattttccttctttactaagaaaaaatacttagttcttagattaatccagcatgatacacatttattttttgtgttgttgattcatccattacaatgtataaacttcaggaaaacacttgcatgagcatgatctagaattgaagagatttaaagtggtagaggaccatgtgtgatggctcattcctataatcccagcactttgggaggccggtgggaggatcacttgagttcaggagttcaggaccagcctgggcaacatagagagaccctgtctctctctctgtctctctttttctaatagccagatgtgatagtgcgtgcctgtagtcccagctactcatggtgccaagacgggaagatcgcatgagcctgggaggtggaggctgcagcgagctgtgatcacgccactgcactctagcctggaagacagagcaagactctgtctcaaaaaaaaaaagaaaagaaaagaaatgatcgagctagatttgaaagggaaaaggagagaagaaaacatacacaggacctgtgtaagtttttataccttagctggagtatttgctggcctaatttatggaaataaagaacaaggatggccataagcaaagatgtaattgaagaaaggttgtatgtgacctgagaatgatcgtctggataaaaaacgtttacaatgaatcagcgattgcctcctttatactccctttttccctttcataaaagaaaaagtatgcaatattagtaggcttaattgacttacattacttaaagccacacacaaacaaacatgtaaaaatcagatctctctgcaaactgtggttcatgattctgagtccctgaaacaaacaacaacaaaaaaaattttaagtgtcggatgttgtttagttaccaaaagagaaccatttattttttgatccagggtcttgctttgttgcccaggctgaagtgcagtggcaccatcatagctcactgtaacctcgaactcctggactcaagcaatcctcctgcctcagactccgaaagtgctgagattacaggtgtgagccactgcacccagactaataaccattatttaacatctctgcatggttttgtatattctttaaaagttattggatgtaattctggcaaagtatgcatgtgtgctaatacacaggtcgctacacaaagcagtctacatttgactgtgccagagtcaattcttgagatatactgcaatcaacaaagatgccctctcagagcctcaaggggaaaatgttcattgtgcccaagttctgactttcaatggaaatagtagccattattccttagcttttccttcatccacagaaccttccaggtctgtgttagcacacagtttgaaagatctccaaatgtaatatgctaaaggatctctgacaatgcatataactccatataagccagatgactattttccctcccaacaaaatgccttttgattgcagcttgcagggacagtgtctctatggctaaagggcaatgcattgtcctttgtggtcatgaaatcttagatttgtgtgccttatgtctgctatgatgctgccattttagttttctggtgagccttcagtgaaaatacatagaattgaaagagggtgtactggaaaaggtagagggaccaccaagtaaatcatcctccacagaaccacagcagagtactgctgaccctaaactcatcacagtcctgacccttaaggttcttatgcttttcaatcggggtgactcttaagataacgaatgaagggtgttagcaggggataagcacaggggcatggtgagtcacttgcagagaaacctaaccagcccttaaagggaagattcttggagaaaatgagtccaaagctgaagccccaaggacaaaaccgagaaggccagagcatttgcaggactggattggaagcatataagcaaagtggaaaatatgtaagagaatgcaggtaagagggagaagggtagaatggtgtagtcagggaactgcaagtaattcttgtttctgaagcatggagtgaataaaaggaatagtaagaaatgagactgaaaaaaaaacaagggccacttggtgaggatttttaatacagcatcaaccaatttcagttttactcgggtatcagtaggtactgaatgaaaggtttgttaacagaggatttatgtgtcccagtttatatcttataatagttactctggccaggctgaggagagtgagggatctaagaggctggtgcaggatcctggagagattcctgaattaggtgatgggcatgaatatgagacagtgcatagattcaaagaaattagggtattaagaataccttagtacttcgcagtggttgcttcttcacctcatgtcctcaggaaaatccagcctgacctctaggtttctggctcgggcagtttggtagattgtagtgcagtttgccgagatgagaaacacaaaagaagtaaaaagattctacttgctgtttttattgtagtgggtgatgcttgttgttggaacgagatactgagaccagtttctggaattgttaatttgaaggtggtggtatcctcaaatggagttgtccaatgcaaagttgaatttgtagtaacttcactattgtctgttaaataccttgccaagtcataactgaattactcggagcacagtaaataaaaccctaagtaatttgattatgtcacatcagttaatgatttaaaatcacttacaatttgtgcaaacttgagacagcatagtggaaaagctaggaatgatgacagtaatacagtgtgtgcatggctgatgaacaccatggaaaattatttggggtcaccagttgatttaacatcatgctttcccatctcctgcattaccccaatttccagtagataaagtagtaacatacctggatttacaaccctgaagaaatccaaatgcctctatgagcttttcatcagtaacttttgtacaaaaaagtcatcgccagcttatgtctgcttggaaaccaatatggcattctaatttatttcccaaagaaaacattaaagagcttcacagcagaatgacagatgatttaatcacctatttttagacagattaatgtattccaaaaaaatgtggtgatcattaaaacatacatttatggtggaataaactatttcataagagcgggcagtaatatctggtacgtgaataggaaataaagttaatgccaaacacacacgtataaaaccatcctgtttggctcatgaaattatttctacatcagttatgagaacagcaggagggtgggatggagccactgatgagggcagtgaagaaaaagtggtataacatcatcttttaaactttcatctacagttttacaaatgatgagtgcatcttctaaattttcatcacccactgattttctgaataaaacctactaccacaaactggccacttttggcaacacatattgttgccatgcatgactcaagaattcgttttaaagaagagaaaagggaatgtttttcttatttctgtctaggcagaatggggatatttatccatgttccttcttcttatccttgaaggccctgtaattgttttattcatccaaccacagcaccatcttctgggcacagaagctggtaccactgtagcaagatggggaatgggagcatgtaggatgtgatgctttgattcagtcactcgctctgtagccagcttttcagcgagcatactgaaaagaggaaggaaactaacgtttgaagagactaatcaaactaacatttgaagaggctaatcaactaatgaagagactaatcaatgcttaccttaccatatattacctgatttaattataacacccacgagagtcagtgttcttagtccaattgtatagttgaagtgacctcccaagattatacaacctgtaggtagcacagacagaattggaacttagtccattaggtggaaattatctggactgcaaaataggctcattgcaccatatcttctgtccattgacttcagttgagttgtttagcacttgaaggggtatgatctgagggaaagtgccatcaagagcaggtgagattgcaagcaatggagttaactgtcactgttttttctctctgtgaatataattgccatccaagtaactcctgtgttgcctatgtgagaaatggcctttatgtagtaggaatgttagttctgcagataagcagtaaaaggaccctaagctgattatttgacttgatgattggaattatatccagtcctatatgaaggcccaagagataactattcaattaaagctgctcaattaatttgcatttaagttaagatacattttgcagattcctcccttttaaaacacctttaagcatgcatatcaactgctcttaatacaacagacttacaggctccctaacctacagcatggttccaagaagggtactggacaggcttctgattagagtggggaattaggaaggttctggggccacctaatataggaaaaataaaccatgatggagcattgagtcagcatgatttatgattttaggagtatctgaatggaagatgttcagaagcaagttcctaaagggtaagtggagaaaagctatgtagccaagtttacctcttttctgaaattctatagtggagatgattttttttttttttttttttttgagacggagtcttgttctgtcaccaaactggagtgcagtggcgcaatctcagctcgctgcaacctccgcctagtggagatgatttttttttttattattgtggtaaaatacagataaaggtaacgatcttaaccatttttaagtgtacagtcaatggcattaagtacatccacattgttgtgctgctgtcaccaccatccatccacaaaactcttttcatcttctaaaactaaaactctacccattgaacaataacttcccattctcctctccccttagtaccttgtagcaactcctccactttctgtctctacgaatttgactacttgaagtacctcatataaacagaatcatatagtatttgtccttttgtgactggctgatttcatttaacaaaatttctttcaggttctcctgttttgtagcctatgttagaattttcttcctttttaaggctgactaataatatgtgtgtatactatattttgtttctctatttttccattgatgggcatttaggttgcctctaccttttggctcttgcaaataatgatgctatgaacatgggtatacaaataactgggtccctgctttaagttcttttggatatgtacccagaagtggaattgctggatcttgtgtaattctatgtttaattttttgaggaactaccatacttgccatactttctatggcagccacaccactttacatttctaacaatagtgtgcaaaaattccttttcttcacatcttcaccaacacttgttattttctgtttgttttttatagtaaccatgctaatgggtgtgaggtgatatcttattgtggttttaatttgcatttacctaatgattatggcatattggccatttgtatatctttggagaaatgtcaattcaatcatttgcccatgttttaattgggttgtttttgttgttgttgttgaattgtatattctggatattaactcctcatcagatacaagatttgcagacattttctcccattccttgggttaccatttccatagtaaacttgacttttgtgtgtatacaaagcatccctctttttagggaacaccatactcctgggcatatggctgaaccctagccaatcaacatattccaccctctttgtcatatttatttgcccaagaatgggctcaggacccaagctaagcctatgaaaactcaccccaagacttttctccaaagtcattatgaaagatgcactgtctttctgggattaggatctctggtgactatgtcagcctaaaatgccagaaccatctttcctaccacattgagagagaatctgaatatgaagccaacatgtgggaaacagctcagaacccatgccctgttgatgctgtcagagaatttggttttaggatgtcaggagacagaacttcaactcagtgaccatgcctggaatttctagttttgtaagcccaaaacttttttattcttttttccttgaacttgattgactttagtttctgtcatctgtggtcaagagagtatgcatgaatgtccagttggaaatgttaattcttggaaccagcagctcaaagcatgccctctagtcagtgcttaggattgattagaataaaagatgttaaagaagaaaggatgttggagtcgattactcaaattataaaaagtgagtttgggactcctgactgtgttattccctaggtcttctgctctttccagctatatagtggccaagacatgtgagactaggaagagatggatagttatttataaggaaaggggcttcaaatgtctcacaatagtttaacattgttactttaaaatattttcccctctaaactgtggtgctttggatgaatcctggcacctcactctgtgtcaccctgcgatttggccacacctcttaagaacacagatatccaggactagaattgcagtgctccatctgtttcttgcattccagcgccatcccataaccacatcaaattatctgtgaaatgcaatttagaactcacttagtgaataggatgccacatcctatgaccactccttaatttttcttctttggaaaaatgtgtgacctataaccctgacctatgacagttccacccataggcaagcaatgtgttaaatagaaagggcactgctgaatcacgttaagcctccaacattctgcttaacaggactagcgtagtagttaggagtgtataggtgttccttttctcccatttctaatgtaactccaatacacccatactggcacgcatactgagagcttatttaccatgctttttgatcaactataacttttttttaaataactaaatgataaattctaaaaataagagtttctattgcaacaacagacaagaccttagtgctagaaagcacatcatcatgtcaatggaacaacaaatcatgagcttgacagtaatgaagctgttgctgagacatttgtctgtctttttacagggcaataattcaagtttgaaggcacgtatttatttaacgttatgtctaggaataagttgccttcctagcctgaaatttctttctttacccaatgacaaaattgtacataattaatgagtgcattcattgtgttttgtttttttaaaaaaatggtctagcaaaatttccttctgaacatttagtttaatcatgtttattaactacaaaccgtgaggtacttgccaactctgaccataaaatgttctattctgaggctgtctctctgtttctgaggagaataagaagtcaaatgtcttgaaaataaccaatcccatcctgagaaaaccttctagttactttctctcctcggattttgtttttttaattaaaacaagctaaagtgaaataaataaaacaaaatgatctgtaatggtggaggcaagtggaatgaaagtacattttccattcaaaacaatgtacacatgaatgtttaaattcatcagcctttcactgtgtaataatgtgacatgtttacagtgttgaaggaaatcaggtgttttcatgctaaatgaaaataaaatttatgtactgttattaccatattctttgcctggtgtttctcactctattcatcattaaaggctgctcaataaatactgtgctaactgcctgtgtggatgttatgcagtaataactcagaataaccataaataaccacccaccagcgccttggggagagtcaaggctttaagagggaatgcttgctccccagttgctagatggtgtaaaaaagatccctaagtcgattttctctccatagttgatacattagaagcaaggcttagaccccagtattccaccttaagacaaggtctttgtccatcatcatctcaggagctgaggcaagcagtgggctaaatagtgtgattttagacatctgaagttttcttctacgcaactgttatcagaaaacctcttggaggattacttgtctccttgtgtgttagttctctattgccgcataatgaatttctccaaaatgtagcagcttaaaacatcaaacatatattatctcacatagcgttagagggtcagggagctggaagcagcttagctgtacagttctggctcagggtctcttagaagattagaatcaaggtatcagccaggactgcagtcacctcaagtcctgatgggctggagaattctttcccaagctcacataagtggttgttggcaagaatcagttcctccctggctctttgctggagtcttcagttgcttgccacataggcctcaccgtgagaatagtcacagcatggtagcttgcttttcacaaaaagagatccaagaggaagaggtggagcaagctagcaagagagcacccaagatggaagctgcagtcttttaccctaacctcagaagtggtgtaccttttgccatatgccatttgtcatatagctcaagcatggtacagtgtgggagggggctacatgggatgttaataccaggatgcaggggatcgctggggctactttggaggctggccgcctccctctaggatgaagctggcactgacgcaaacagattgaaaagtgagatgaatcggcgcagtcaattggaaagagcacattcagagtaggatgtacctgagtcatccaggtagcaagagagcactcttgctaccttgtggtaattacctcactgagccttaaacttcccatccctaaccattacccatctcttgtggttggctgtgagagttaaatgagataatatttaaagagtctgccttctgtggaggttcctctaaaggaaattaacaataaaacaaataacaataaaaacaaaaaaaaatgtatttttttgtaagatagaagaaatccaaaaatagcatgccactgtatttggaggatacagtatcctcaggaatggggagacatgagcgtgctggcaatgttccagaaagggtaatgctttcatattgtctctgctcctattgttttctactgaaaagtaaggtaatggtcctgcttcactgtgtcagccagggtgctcaggaagtgcggttgagtcacttcccaagcgtttattgagccccggtgtgctgggcactactaagactcagctcctgacatcatgttgcccctcatcctgcctgggggtggagagtagatgaggggacaggcacagagacaattctcaccttaggtgggagtttgaagaaagaagtgtgtgtgtgcagaggaaggagggcctgaccatctgggcgaaagaggcaggtcttcaaccagttctgggcactcaagcaagggaatgcctgctagaaggggcagtggcaatgtgggcagggaaaggggtggtggcctgctccctggaattcttcttagggttcattgccaggttagcaaatacaaatgcaggacatccagctaaatttgaatttaaggtaaacagtaaataatgaaatatttgggacatttactaacaaaaatattatttgtgtatctgaaattcacatttagctgggtattttgcattgtctctggcaactctatcctggggcaaacatttaatttgcctagagtagtggaagctgaggctccagaagaaggcagcagaaaagattaggaaggattgtgaatgcctgttgtgaggagtttgcatgtattaataaaccaatattggatacatgctggagggccagtaggttttcagtggaggaatgtcatggtcagattcatttcgggtaagaccactctggtagctgtgcagagaacagagggaggtggtgggaatggggttgggggctgcgagaatggttaggagacttgcaataggacaagacgtagaggaaatggacttgacccaagccaaactttggtagagcagagaggcaggtagaatcatgtctaagggcagaaattggtgatggagcatttatttagtaggacacatcttttaaagggttaaatgaattattccaaaccttggctgtacattagaactacataggaggtttaagaatactgaaaccattcttactgatactgatttaactagtttatgttgggacctggacaatggtgttcttttattccctggatattttaatgcaaagtcaggatcaacaactattaataaactatcttcttatcttttgttattccaaggaatgtccaattttcttgacagtacacctgaatgacagcacactgtcatcatgaagcagcttaacacaccctccttgacagagcaatgtcaggcacttccatgtgccttgcaggtgaaaaactggctattcctgcccaagaacattaaaagcctatttaatttattttaatcattttattaagaaacgaggtctcattctgtcaccccctctggagtgcagtgggacaatcatagctcactgtaacctcgaactccagggctcagatgatcctcctgcttcaacctcccaagctaggactgcaggtgcacaccaccacacctttaatttttttgtagagacagggttttgctacattgcccaggctggtctcaaactcctgacctcaagtgatcctcccgccttagcctcccagagaattgggattacagacatgagccactgcacctggtcctatcacttgcttttaaaaatatattacctcattccattgaaaagtaggaggggaacagactcaaaagacttggacccacctaaacatccacatgtgccttctctgccctcaagcagttggtccagaaactgcaggcatcacactcttaatttctacttagacacaaatctccggagaaaatatgttaaaatgtctgagttggcacagttcacagttcattaaatatccttcaggagaactacctgcttttcactaagctcacgttgatttgttatagtgtctacatgtaagtaccactgcctgttttcaatgattggattgtttatggcaggtgtccccaatccctgggactgttaggaaccaggccgcacagcagcaggtgagcggcaggcaggcaggcaggtgagccagcattactgcatgagctccacctcctgtcagatcagggtggcattagattctcagaggagtgcgaaccatattgagaactctgcccaagagggatctaggttgtgtgctccttatgagaatctaatgtctgatgatctcaggtaaaagagttttatcccaaaaccatccccccgcccccatctgtggaaaaattgtcttccaggaaaccagttcctggtgccaaaatggttggggactgctggtttagggcaatggaatgtgagctgtcctttagttctttccaggtcaggtgggtgttccattttaaggcaaaaagagagtaaaggagcctgatacttggtttcatatcagcagcctggtgtctgcctttgacagagatgcattgtggacacttacatttgtatcttagggtttgtttttgacttatacaagatttttcccaagattttttagcaataggaatgctccaatttctataaagtgagtttcagttcatgaacaactgtaaaagccatatattccaatatgttctagcttatttccttctgcttaaaggcatgcccttctttttgcctctcgaccagatcgtccctgaggtcaaaggttgtaatatgtgcccttgcctgaggaaggaaggaatgagtgatttgaacatgtgagattgtaaccagtcaaagagaaccaagatagttccctgttacacataggaccatgggtttacaagatgttttgatgtttaatcaaacctgaaatggatattaaattatacaatttattttttctttcttatttttttgtcattagaattcctttctttctttggagacattttaatgtcatttgtgtaaaagaagaagctgagagtagtagcttgaagtatccagtgacaatcattgtgaaaatgtttaagtgattcagtattggcaaagagctgatcataagaactctactctccaaacttgattctagtgaatatatggagattaagtttaaagagttcaatgaactttacatacaaatgatgcttagtaactgttttggaattctagaaaaaaaataaaaatagtgtaaaaataccagtaagtggtgataggaaaagcactggattcggaatcaaaagacctattgcctgatcatattgtactctctctctctctgtgtgtgtgtgtgtgtgtgtgtgtatatatatatatatatatatagttacagaagtggaaaatgagcataagaaaaggaatatgttacttctgtttccacagaagaaatatctgacattaaaaacttactgatcagtttattcaacagacacttattgagtacctattacatgtcaagccctcgtacagctacccgacccaaacatcaaaggaagcaggcctggccctctagggactttggagactgtggagggatacaattaggatcacaggcaacctcaatgacctggagtaagcgttataataaaagttacatggggtagtatctggaattgaatgttatttccagttcaataatgtttgaggtggattctctttcagccatgttaggaaaaaaaaactaaaacggcttccacgtcttacatcacaatataaacagtgtaatggattccaaaaaatgcaggccttctgttgatcccgtgcagagaaagcatatgtgcttagacatatgtgtttagacatccacttagcaagcattctgtcagcctgtcaggaccagcaccacagctgaatcacatatagccccagacatcagctgtaagggaaccaaatggtgccttaccaaaaattgccttagaattcaaagtatttaaacagtatgacaggcacaaccaatcgtttacaagagaaaacccacagcacataggcatagcccctaagtgcagtaaggaaccattctgaatttaaataacttcagtactgaatataaaatcttccacgtaggacaaaacagtgcataatgccatgaaaataagcaaaatgaaaagatgtattaggtgttagccaaattatggtagattaattagtcggtaagaccacacaaattaaaagcatttggcaatttcagaaatctttgattgaataattatctttctattgttatgagaagttaaaaaaaacggcgacacttttattttattttatttatttattttgagacggagtctcactctgtagcccaggctggagtgcagtggcgctatctgggctcaccacaggctccgcctcccgagttcacgccgttctcctgcctcagcctcctgagtagctgggactacaagcgcccgccaccacgcccggctaatttttttgttttgttttgtttatatttttagtagagacgaggtttcaccatgaaaaaattgagacttcaaaaaaaaaagatttccagagaagtaatgcagtgaaatagctcattagattgttactgaattggtcttgtatgtattgagaataattaaagaaaaactgaagacaccatactcccaggaaaagcccaatagttctatagctttgctagccagtaaagagtagaaactagttttaatcctgtttaatcaataaatttcagttcaagggctgtggtaacaaataaacaccagagctgattttaaacttacctaaccaattagtgacaacttgctgcagagaacacaattctcgaagccagccaatcaacagcagccttacatatttaaagtcagccagtgagtggcacatcctctctagagaatatgcttctaaggctgaaatcaacccaccctgtcacccacacaaaacattgcctcccagactgtggcacccttctcctgcttctgccaccaacacaacacaaaacaactattccccaaatcctttgtaaggcctttttttgctcagtgaaactgtgcctggaccagcaaagctcttccaaagttcttccttcctcaggcaacacatttagctttgtatatttgggattcagtgtgttggtctcttccttttatgctatattcacattatttgaaattataagatgaatctttatttaccactttatacaggcttgtttttctacatatcgatctaggttttaatggcaaaaaccgcaattactattgcatcaacctaatattatgttaaaatagtttatttaggaaacattctttattaattatagggtcagaccccagggtaatatctgtcagctttttacaagtttatcttaaaatttttttctttcatgtctccataatttagcatttcacttgaaattccaaactggaaacatctcttccccttcctatctttgtttatgccatatgatatctttgtttatgccataccatccacctagttctccaaactatcaaactttaacttagtattgaccgttacttttcccttttctttccaggcttatcaatattatatgtaaaatgttcttcaaaacttcctttaattcactcccttggccatatctctaattaaagattttaattcctgtttgccaagatgattattaatagagttaaattgtttcctgaagtccctgtccttctaatacatcctgcatgagcccactagggtgataaggaacagaactgagcttgtctgtctgtgtgatgccaggatcttttaacagaccaagtggaaacttcttagcatggcactgtgggaccaacactctctgggttctattgaccggaacagaagataataaattcccagtaaatgttagttttaaaagattttgtttgtatatggcctagtttctacatgtagacctaaacgtattcacaggacttgcagaatttccctatagaaaactcttcatcctgttcatccacttgaccctgacctttcagcactgcctaaattaaggtctgtacatttctatgagcaaatgttagcctctggtttcattttcctctctgctgggctctcactgagctattcttatgagagaaggccaaggcattccacagtggatgtttgcatgtgtttctggaggaatgtttcttggactttcttatcgtcactggcattttagaggaatgacttcttagatggcaagggaaccacatgattacagtatgtttgccttggcagttgttagcatttctttggcaggtagtttccccacctcctgattggggaagtggtagttcaaagaaatagttattgagcacttgctatatgtcaggtaccatgttagaagataaggatacaaagacaattaaaacacaatgaaccctcacagtttgcactctagtaatgaatgaactgggtataaaagcaaatagtaaaggcactcgaaggaatgttgtactacggaagcacagagggtaaggagggcttgctggagaggtgctatttgcatatgtatgcatatatatatatgcatatgagcacatatgaatgtacatgctgcctagagaacacacccatagaagggggactctaggaaggctctgccactaggaaatcttaagaaactatttcaagtcaacagttttgatttatctttaaaatgcctgtctcaataggccgttcaaatgcacagatttgtttgtcttgctttgctttgccagttctatacagatggtgtactatgctaccacacttttttgatctcttcaagccagggtttatgcactataaggatatgtatgtttgcaaaagcaaacatcagtaatcatactgaggccacgctcctaagaaactccaggttcttcccttggacagagaggtggggttcagacaacagaccagtaaacacggtaaagtcaaataaataacagagcgttgtgtaagcctgctggtccctttctctagtggtggcaaccctttgaattgctgtctcttgttgacagtgcctttgtgtccacttgacttttacacgcccaactccctgtgtcagggaagggcactcta

SEQ ID NO: 5660 - DNA, 156655 bp, Homo sapiens
  SYNJ2 gene - 158373323 - 158489977 of chr6; NCBI Entrez Gene ID: 8871; Build 35; sequence includes 20,000 bases upstream of initiation codon and 20,000 bases downstream of termination codon of the gene
tctttctttcttttcttttttcttttttttagatgggggtctcactttgtcacccagtctggagtgcagtggtgtaatcttggctcattgaagccttgacctcccaggctcaaggaccctcccgcctcagaccctgagtagctgggattacaggcgcaccgcaccgcacccagctaatgtttgtattttttgtagacggggtttcgccattgttactcaggcaggtctcaaatcgctgggcttaagcaatccaccctcctcagcctcccaaagtgctgggattacaggtgtgatccatcacacctggccttaaaataggaatttgtcacctgtggtccagataattctggggggttgggggaaggtgtaccaatgaaccatgtgagactttaggcaaattgttcaagtgcatattttacattttttctggggaaaggatttgtacctgtcatcagattcttaaagatctgggtgactcaataaaggttaggagccactgccttaaagacaaagtcaggcccggtgcggtggctcatgcctgtaatcccagcactctgggaggccgaggtgggtggatcacttgaggccaggagtttgagaccagtctggccaacatggtgaagccccgtctctattaaaaataaaaaaatttaaaaaaaaaccaaacgggcatcgtggtgtgtgcctgtaatcccagctacacggcaggctgaggcaggagaatcacttgaacctgggaggaggaggttggagtgtgccgagatcgcatcactgcactccagccagggtgacagagtgagactctgtctaaaagaaaaaaagacaaagtcagtttccataccataccagactttcatttcatatttcatatttcatcaaccacatcctgttatttttcttggaactgcttctcctcctctcctttttctgactacacacgcgctgaaggagtgtgtcatggagaagcagggatggatactttcacaggtcaggggaggtcagtttcctcttagtcctcaaaggtgcgggctgattagcaggtcagctgtctgagcaagacagtattgaacccaagccaccactgtgaagggcgcccggaggatctttctggcgcagaacagctccggcaagcgacagccaatccaagatctttgctcaccctctggcgctcaagaaggggagagatggcaagtagatgagcctcaaggagaaaggagagaaagtctgtgctgaacaggtgtgttccctttcaaagccaattgccctgtttggctcagtgaggaactttaggtttttggatgaagggttttagaaacaatggggaacgttgtggtggcaaagaggatgaaaagtatagccaacagcagaagtagtgagatttctataaacatcttggcactgagaggcagagaaagctgatttaactaattatgagcaaacccttccggaagtaaagagagtgggaaaattctggctgtctggtcaacattactgtctaaataaatccacgcaggccagcagtgggccactgggtatcgctcaggcaggaagcaagttggccttaaaaacagctgcagctcctgaaatggggccaggcctggagtcttcctgctcacatgccaccaggtcttttttttcttttctttttctttttttttttctttttttttttttttttttttttttgagacagagtctcactctgtagcccaggctggagtgcaatggcgccatcttggctcactgcaacctctgcctcccaggctcaagccattctcctgcctcagcctcccgagtagctgggactacaggcaactgccaccatgcctggctaatttttgtatttttaatagaggtggggtttcatcatgttggccaggctgggtctcaaattcctgacctcagatgatccactcacctcagcctcccaaagtgctgagattacaggcgtgagccatcgtgctcggcccactgagtccgaatatatcaatttacttaaaaacacacaccgtgggggcacttttataggacaaaagccatgctctggttgaagattgagcagaatacctttttaaggtgctacagaagtgaggactccaaagacggaagggaggtggctgacctcggacagagctctattttcctctttatcgtgcacacgaaaccgcggcagatccttttttttgctctcatttttattatgtcttacaaggattcgtgttcggttttgtggttaaaatagtcacatagcttgatctgcaaaagtgctgtaatattttttcattgctattggctttttatttcactctccctttttttccacatttgctgtagaaatctatccacgggtacagtggttaagttgctgtttctagagctatggtgagaggaacagcgatctgtgcattagtcagcaaatgaggacaccctcttaactctgctgaattagacagcaatgcagtagacaaacaagttgtctcaaagagataaaatatgaaaccagagaggcagtgtggccaacagaaaaaacaatgggtgaggctgggtgcagtggctcacacctgtaatcccagcactttcagagcctgaggtaggaggatcacttgagtccaggagttggagaccagcctgggcaaaaaagtgagacctcatctctacaaaagataaaaagttaggcacttgtggtcccagctacctgggaggctgaggtgggaggattgtttgagaacaggaggttgaggctgcggtgagccctgttcacaccactgtgctccagcctgggcgacagaatgagaccctgtctcaaaaataaaatgaggccgggcgcagtggctcatgcctgtaatctcagtactttgggaggccaaggcgggaggatcacttgaggtcaggagttcaagaccagcctggccaacatggcgaaaccccatctctactaagaatacaaaaattagcctggtatggtggcgcacacctgtagtctcaactacttgggaggctgaggcaggagaatggcttgaacccggaaggcagaggttgcagtcagccaagattgcgccattgcactccagcctgggtgacagagtgagattccatctcaaaaaataaaaaataaaataaaacaacaacaatccactaggcgagcagtttggagactcagtgcctcacagcaatcctatcaggacttcagcattctacacaaatcagaaataactcctgtcctatttactttaccatgattgccctggagaggaaatacgtggaaaaaaatgaaaataggaggtatattttcataggaatacattttaataggaatcatagtattatcataaatttggagaaagaatttataacgaagtttctaaggcagtgctaagccttacactaaaagaacaagactgattatcagatattggctgcactagacatggaggacattgttggccatctgacccaaactcattcattcctaactgctttctctcttgtccatctcaactgaaaaggctgcaaaagtttcctttgtgtctaatggaggccacatgacaccattctggccgaagagtcttaagtagacatttgttgtggacttgcagagagagaagcttttgcctttttcttataaaagggacagatacagttggtgtgaattcctctcttctttctaccttgaatattgctgtaatgtctggagctggagcaactattttgtgatcgtgaggcaacaagccaacatgctaggtatcatgaagagaaagaaccagcttgcttgggtctttgatgacactgaggaggtgctaccccagctctgggtggcctacctggagacttcttgtttatttaagacttttttggtgagcggaggcaggtgggttttttttgtttgttttttgtttgtttcttttttttgagacagagtctcatcttgttgcccaggctagaatacagtggcaggatcttggctcactgcaacctctgccttccagggttcaagcgattctcctgcctcaggctcctgagtagctgggattacaggtgcctgccaccacacccagctaatttttgtatttttagtagagatggggtttcaccgtgttggccaggctggtctcgagctcctgacatcaggtgatccgcccacctcggcctcccaaagtgctgggattacaggcgtgagctaccacacccgcctatttaagacttcaatagttgagttttctgttacttccagccaaagcattctaaagtacacctaattccaaagtacactttgttcctgatagtatgaagcgctataatatgttataggctatatatttagacttaactaaattgatttttcttaaaaggaaattaccatatagtaatttgcaattttgctttacttttcaaaactatatgatgaagcaaaatgtaggaataattttttttaatttctattttgaacatttttaaacatacataaacatcgtaaaaggactcctttctcagccgctccagccacagtcacggctcagcctgtctcctccctccagggcaggcgagcttgctcccacccaaggcactccctttctccatggcacacctagaattgccagaaaggtcttctggatgttccatcaaacctttccgccctgtaactttttacttcggtctctgaagtgacaatgtgcagtgtgcaggcctttttataaaatagtcatggcattttctccccatgtgaatcttgcaggccaatcagaaaaggggtatttctggagaaggttaaggacagacaggaaggaggcctgccagcccccgaatcgagggcacattgggagtcctgttcctccttctgcgagggaacgctggggaggaggcgctcggcagcggtgccctcccttcttccctgcccgtctgttggcccagctcccatgctgggcctgggggttcagggacagacctgcattgtcagaggtcctggtgagcttcctcagttgacaacaatggaacagccagaccccagcctgaaaactcatcctgtccctagtaggttcccctccaatgtggaactgatttgaacaatgtttctattaaggacaagcacaccttgctgttcttggcatgtgaaagcccccttctttcccacatacctgggacaggtgtgctttgggttgtttttccagctgtgatgctgggttggggcctggggcctggccgacaggctggcacacctgtgtggggagcttggtctcggccacggaggtgaataaagctccccggtccccagagcccacaggcacctgcagtctctatagcaacccaaccaacaggcttgttgactttcagcaacagaccaggaggaaggaacatgcagggacccagggacctggacagagggaggccccacactctccaaccccagggcctagagtttgcagagtgtgaacggtagcctgtggctgccaggcacactctgagcaggagtagagaagataatttgtgtctggaaagcccctgttcctgggctgactcgggtacaatcctctgagagatcagtctctatatccagtcgtaaggctgtaagtcaagtcttgcgtgtgtgtagatatggacagatagtgcctcatatgccttttttttttttttacaaaaactaataacttataatgaacttccaaacctacccttcctattcacagctgtccagcacctgtcccacccagcggcacccagactggctttcccagggagctgagcagagggagctcagtcctcacctgtgccccatgggtcttcctaacacctccaggggtgtgtggggtggggattgtgggggggtgatgttggcaaagcgccccagctgcttcactgatgactgacaccagggaactcgaaagggacggacttgctttcctcctgactggtggctgttggcgcgctctgatggacagcccctgtttttcctggccttagactgcctaggctcacgagtcctgttgtctctttgaggcttctaaacgccaattaaaataaaaatcccattctctttgcagaatttgggaggcttgggcttcaagtgcacttcttagataaatggtcttgttcatctagaacgttccacagatggccactgcaattcctttttttttctaattgtattttattttacttcaagttccaggatacatgtgcagaatgtgcaggtttgttacataagtcgatgtgtgccatggtggtttgctgcacccatcaacccatcatctaggttttaagccccgcgtgcactagctatttatgctgaagctctccctccctggccactgtaattctaaaacatttttcgtaagatcttttatactgtaattctaaaatgtgatgacaccgtgactctaaaatatcttttgcgattttgtaaatatttgcagcttctagggacatattcttttttttgggtggggggggacgaggaacgctatttcctgacatggcagaagggcaaaagagagtgaatgatgcactctcttaaagcctctttttttttaattattatactttaagttctggggtacacgtgcagaatatgcaggtttgttacataggtatacacctgccatggtggtttcctgcacccatcaacgcgtcatctacgttaggtatttggggccatattattatacatggaaaggcaggcatggccagaaattaaggatcccgtttctggctcatacaatccttccacagtgtacttcattgcatgaacattttcttgcagctggtgggtgacctaatatcaactagcccattccatgaccagctaagcctttcacagaagtcttattctttttcttttttttttctgagacggagtcttgctgtgtctcccaggctggagtgcagtggcaccatctcggctcactgtaacctccacctcccgggttcaagctattctcctgcctcagcctcctgagtagatgggattacagacgtgcgccaccacaccagcttatttttgtatttttagtagagatggagtttcgctatgttggccaggctgatttcgaactcctgacctcaggtgatccgccgcctcagcctcccaaagtgctgggattacaggcatgagccactgcgcctggcaggagtattgttggtaagtgctccaatagtggttaagtgcctgaaccatgcccaccaaccaaattatggctttggctctgagatacccttgatcaacttagccagtgatttcccgcaacctaagcatgcaagaaaaagaaatgaagaggatagaaacacaaatacctgtagattctgaaagtcagatttcttggcccctgtaagaataaccactcactgcaaacaccgctagttgcctttaagactgcagctcttgccagtgagtcatcagccacagcaacctggaggacaagtgccctctcacagcgcaaactaccctggggatcctttccaaggtcacaaactaatccttaattcaaaagccaaaaagatcaggggcttcattgcaaaaagagcaggtctaatttgagaagaactgacatccctctggactgcataaggacaggagacctcaaacagggccagcagggcctcttctgcatttcttaagggatcttgggagttgtcagtagtctcttttgggtccctttgcagtcgccagaactgtcaaaagacagaataacaaccaatttagatgtagatctaattggctcttattcaggagtcatgaatcagggaaaccacccttatacaaaataaaacaaggccgggtgcggtggctcacgcctgtaatgccagcactttgggaggctggggccggcagatcacctgagctcaggagtgcgagaccagcctggccaacatggtgaaaccccgtctctactaaaaatacaaaaattagctgggcatggtggtgggtgcctgtaatcccagctactcaggaggctgaggcaggagaatcacttgaacccaggaggtggagattgcagtgagccgagatggcaccactgcactccagcctgggcgacaagagtgaaactctgtctcaaaaaataaaataaaataaaagctttcactgggcaatagcagaaaactgggttttataaaatggcaacaaggaaacagaataggaaaaaaaactggttaacttttttcgttactttttttttgtaagggttaaagcagagagcagctcctcgttacatggactcagatagactggaatctcctgttttcaggaaaaactggtctggtttgggatctatctgcctccttaaagcttcatttgactttgtggcatttagcattagtgacttcactttggttttgtctggtttgttgggacctagtgccagagctcaggctgaaacaatgtcttccataaattttttttttttaacaattccaacaccccaaacagtgttgggagaaaattccacagtcctgcagattggcttcatttgacattgacaaacaatccttgttttattattgtgtttgattatttatttatttttagagatcgagtttcgctctgtcacccaagctggactgcaatagcacgattttagctcactgcagcctcaaactcctgggctcaagcaatcctcctgtctcagcctcctgagtagccaggactacaggcatataccatcacacctggctaatttttaaattttttgtagatatggggtcttgccatgttacccaggttggtctcgaactcctcgcctcaagtgatcctcctgccttggcctcccaaaatgctgagattacagacatgagccactgcacacagccaaagcactgcatggtcgatgagaaaggtatagtgggaagagtgtagggggctgtggggtgaggggagggcttccttttttggtgggagccactagagcacatttgtaccctgctgggaatgagccacccaggagagagggagagatgagtgctgtgggcactgggatgaaagaagggacacaatcctcagggagggagagagagcaaatggctggggtgaaggaaacagggactttggaagaagatgatgggaaaatgttggcaccctggaaaatatcgtgaggcagttcttttcggttgactctatttctcaggaaagtatgaggcaagacagattgctgagatgaaggaggtagagggaaataggaaatgtgaggaaagaggaaaaggttcacatcatcattctaaaggaaacgagcttaactgtaaaacttctgagattaaaaggcagttacattttgagatcctgggggtaaaatgagtagatgtcataacaccaactgtggtcttgaaattcctttttccaccaaaaagaatcaagacttcttgtaaaaatggtcgatttcatgtctagagaaaaaaaaatgcacaagatgaggttgatactgctataccagaaggcaaggaaaccatcaaaggccattgggtcatgtcagaaggacccaggagccacctcaaagaggctctcactggccaaagagggaacatgtgagcatcagtcagaatagtaatggcgatggactgaaacacatcaaatatgtttaaactctgagttcagaaagacaggaaaacaactcattattctgaacaccaggaaacagaggaaaagagtcctattctacctgctttatttttgtttgtgtcaccattgggtaaacaagtagcagaagagaatttttccatttatagaagaattttagctactgaatgaagaaggaatgacagaattggaacataaccatttcacaaggattaaggcattgatgattaatggctgctatatcacaaagagaaaatcagacacaggcttcctggtggaggaacacaccaccacccatgaaacggaatctaatgaagcttctagatccagccaccgagctacagatgaaacacagggcaaaggaactggctaaacaacatcacagcgacatgctcagcaaaatccgggctggggaggatggctggacacacagcttcgtttttttcaacaaataaattgcaaggagattaaaaaaaagaagtagaggggaactagatattaaaaaggacatatcagttattttgtgtaagcattatttcagttctgattcacacaaatttatgacatttatgaaataattagaaacatgaactctaactgataacattaaataattactgctttgaaaaatgacaccagcctgcaaagctatgcaatttctccagtaactttaaggattcagagttcaaggaggctactaaagaaattcattggaggttgaagtttggttgaataaatgaattaataagttaagaatattgggatgttttgccttaaatattcatgggtttttaatatctaatataatatttatattaaaaagtactttgaaaaactgcaaagttttattcaaaaattagagctaaaatcttggagcgccagaaagacagagaggctgaatcaatccgttctttgctgatgcatcaatttactttgctggcataattatggagatcatatttttctggttttttgtttgtttgtttgtttgtttgtttgtttgtttgtttgagacagagtttcactctgtcgcccaagctgtagtacagtggcaggatcttggctcactgcaacctctgcctcctgggttcaagtgattctcatgcctcagcctcttgagtagctgggattagaggtgtgtgccaccacgcctggctaatttttgtatttttagtagaaacgaggtttcacctgttggccaggctggtcttgaactcctgacctcaggtgatctaccccccttccccttggcctcccaaagtgctgggattacaggcgtgagccactgctcctagccagagatcatacttttctgaacctccaaaaggaacatgtggtctgacaaaaggatgttttctagtttatgaatgtatttagatgaaaactcttattaaggtataaaaacttaatcataattagttgtacatttaatgaatctgctttaaggaaagtgcaaagttacataaaattgaaatcaactcagaacatcacatgaattatcgccttcattatgttctgcatgagttagaccttagggaactctttggtgacttcacatttcagaagtgggggaactcaggatagtccaagaagagcaagtgtaatgagagcagtggatgctgggagtctgaggggcctttacaggggtcaccgggagaagccacggaggagccagtcagaatcactgtctccaagttggctgcgtgcttttcttcttttttcttttttttttctttttttctttttatttttatttcgagatagagtctcacgctgtcgcccaggctggagtacagtggcacaatcttggatcaccacaacctctgcctcctgggttcaagcaattctcctgcctcagcctcccaagtagctgggattacaggcgcccaccaccatgcccagctaatttttgtatttttagtagagatgatgtttcaccatgctggccaggctggcctcgaacttctgccctcaggcgatctgccctgcctcggcctcccaaagtgctgggattacaggtgtgagctactgtgcacaggcaggctgtgtacttttcgcgatctcaagttgataactagatcctcacatatacagagggtcaagcaggaagaaatgggctgtgaaaaagcactggtgccccccagccttccttcgagactgctcttatagggtcagcaacgacctccacgttgccaaatcccaaggacaattcccagacctcgtcctcctggacccctcacagccttggccatcactgaccactggctgctccctgaaatgtttccttccattggatccaggacactgggatcctgctggtcatcgtcctccttcaccggtctcctactcagtggccggtgccggttcctcttcctctcccacttgtcagagcgcgccagggcacgggcccgggcctcttccctttctgatcagcatttggcccttggtaaactcacttaggctcaaggctttaaatgctgtctgtgtgctgatgttgaagagaaatgggggctatggtccagatggacccccaggccaatcacccataaccgtataactaaaactgaagtcatcccgatttccccaaacgctagctctaaccatagaaacacaaaacataagctttacaaccttgtcagcatgattcaatgaactgttgtgaatggggcttcctaccatgtttggtttgcaaacaatttgcaacccagtttgcaaattattgtttagtatgcacagtacacttctaaaattgtaatattttatctgattttatttttgacaccgatgacctccatattttcatctctgtccagatctcgcccttggacctcaggcttgcatactctactgtccactcaacacctgcgactgaatgtgtaatctgcgtctcaaaaccagcctgccccaaattgcccgctccacccccagccacctgctcctccccatgcaaactcgtctctgctgatgcaacgccatccttccagttgccctgaccaaaatctccatcttccaaacccctgtctttcccttacatcccacatctgctgtaaaagcaactcctgctgactcacccttcaaaaatctagccagaatccaaccgtttctcaccaccccgccaccatcagccttgttctcccaccctgggcaacggcagcagcctccttcctggtctcacctggtctccctgcctccacccttccactcaagtttcaactcagcagctagaatgcttggtgaaaacataaatctgagcatgtctctttctctgccctgtcactcagcataaaggcccaagttattatagtggccaacagcctgggcccctttcctcctctggcctcctcttcaaccacctccccctgctccccggggttcctcttcctcctcccagtttttccctgacatgccctgccctcagatgcccacacggctcgcccctcacttgtttcatttttcactcaaatgccacttccctgcaaggcctcagctgtcccccatttagagttctgcacccccttttccccactcatttgtcttccatggcactactgccatgagcacatgatgtactttgtttgatttctttgtttgatttcttctccgtaccagggatttttgtctgttttctttgttcctgtatcccccagcacctggaacaatgcttgccgtatagtaggtgcctagtaaatatttattcaatcaatccagcaagcagcataagaatctctgcaatggacagccccagaaggttgtgaatcctccactcccacagagatcagatggtaggaaggagatccacttactcattgcacaaggactcctggctgcctagcaggtgccaggcactgttctaggcaccagggatacaccacgaacaaataggactaaacaaagcaaaacagaagaaaccctgcacaggagcttacctgacagggggagacctggatgacaacagggtaaaccagtcaaagatttattataatagagactaataagcactaaggagagaaatcaaacagggaaagacatgaaaagttgggggtgaatttgtctgctcaggctgccagaacaaagtaccaacaactgggtggctgaaagagcagacatttattttctcagttctggaagctggaagtccaagatcaaggtgctggcagggttgctttcttctgaggcctctctccttggcttgtgcaatatggctttcttctccctctgtcctcacatgggcttccctctgtgggcacatgtctgcgtccaaatttcatctttttatgttttatttttagatttttgtttgtttgtttgttttgttttgagacagggtcttgctctgtcagccagggcggagtgcagtggcatgatctcagctcagagcaacctcatactcctgggctcaagtggtcctcctacctcagcctcccaagtagctgggactacaggtgtgcaccactgccccagctactttttttgtattttgtgtagagatggagtttcactatgttgcccaggttagtcttgagctcgcaggctcaagcgatccaccctcctcggcctcccaaagtgctaggattacaggcgtgaaccactgcgcccggcctttgttttttgttttaagagacagggtctcgctctgtcacccaggctggagtccagtggtgtgaccatagctcactgtaatgtcaaactcctgggctcacatgatccgcctacctcagcctcctgagtagctggggctacagatgcatgccaccatgcctgcctatctttcttttaattttttgtagagacggagcctcaccatgttgtccaagctggtctcaaactcctggcctcaagtgatcctcctgccttggcctttcaaagtgctggattacaggcgtgaaccaccgcacctggcaaaaatttccagtcctgatagattagagcctaccccaaagacctccttttgacttaaccatctatttaaagatcacacctctaaatgcagtcccattctgaggtactgggggttaggagttcaacacatggatttggggggcaaaattcagctcataacggagtggatggggggaggaagtttagatagagaggctcgggaaggcctcactaagaagctgttttttgatggttgtgaaggaggtaagagaagtagcgtcgggcctctggggcagctgccttccacatgcagaagccctgtgtgggggctcacctggtgcaccagcatgaggaccacggcgagcctggctggacaaggcagagagcagccacatatgggacgggagaccggccagaccacagagcgcctggacttcagcctccacagagtgagctgtgcagattgacggtgtcagcagggccactctggctgccagcgaggttggggagaagaagggtgactagatccaagctaaagatgccagaccaggtggggacagtgggtgtctgccctgacctcaaactgtaggtcctggagggagcatctattcccccagtgctgcgagtgttgctcccggctggggtgccctgcccaggtcgcccctcttcagaagccaggaccgccggatgcactcaggcaactcgactcctcatcctccccctccccgtccatctttctccccagcacagaccccgcaggcacatcccctgctcagagtccctgccacagggaaccaaacctgaaacagtgagccagtgaaccgtgctccgagcctggatatgattttcagttagaactggcaggcttgaggctttctcctcgttttgcagaggaaccagagagccggtcagccaaggctacctccagtacttcagtccaccctgggtttaggcccagaggatcttgactatgacttctagattgtgtgcaccgtggccagcgtcctgggcctttcccactctcgctaactcccattcccaccctcgtgtcctcatggggagctcaccaagggccagttcttgggaggatggcgcctcctcctccagcttgcccacagccctgtcccactgcctgctcccttctgcctccatacctgtcctcccaacctcctctccctccctctgaagatcctgccacctccttttcaggggacttcctttctcccctctagagacaggtgcctctctgtgctggggagtgagctctcctgctctgctctttgctatttgccttccaccatgtgcaggtctggccagtcctcgagggtctctgctatcccgtctgccccccattctgttcatcttgtgtttctcccagcctggcttccagagccagcagactacactcacagcgccatttcttccttatttctttgcaagctggcttttttgcccagccctctagtgaagctgccccctcaaaggtccccgttaccttctcaccaaaccaagtttcttttctgagtcctgattcttggataccttcctgaggtttttaaaccagtcacctctcagggcttttgcatgtgggaggctgtagccccagatgcctgatggctgtttctcttacctccttccggtctgttaaaaaatgcctccttttctgagagggaggagccctcaggaatggtttagcgccatcctctagacgatgagttttcactcagttcatgtgagatccagagctgtccaggtcacgcccttggcccctctgctttctcggggtacttcttgatcgtcttttcctcctgcccctgccttctacccctgtctgtctccactcccctttgatcgctgccatactcatttctggcccctcatctgtaggcatttcccactggacgacctgcccacccggtctctgtctccaattaaactcgcctcctcctcactctgggatggtatcgctgctgtcccattctcaaaatgccagggtcctgtctgacttcccactttcctttgtgcagctcatatcatacaatcaggcaccaaatacagatttgtatttcctttaaacctctcctgtcttactcggctcgggctctgataggggttagatgtctgtccactccaaatctcctgttgaaatgtaatccccagtgctggaggtggggcctggtgggaggattgcatcatgagggtggacctctcatgaatggtttagtaccatcttcttgatgataagtgagttcttgctcagttagttcacgggagatctgagtgtttgaaagagtgcggcacctccccccagctctcctgctctaatctcaccacgtgacatgctggttcctggttgccttccaccatgactgtaagcctcctgaggcctccccagaagcagacgccagcaccatgcttcctgtacagcctgtggaagcgtgagccaatgacatctattttctttataaatacccagtctcaggtattcctttatagtaacacaaatagactaataatacaggcttccgcaataaaataccacaggccagtggcttaaacaatagaaatttatttctcagttctagaagctagaaattctgagatcaaggtgccagctgatgtggctcttgctgagggccgtcttcctggccggcagatgctcaggcccttccctctgtgtctcttctttttttttttttttgtttttccttctttgagacagagtcgtgctctattgcccaggctggagtacagtggctccatctctgctcactgcaacctctgcctcccgggttcaagtgattctcctgcctcagtctcccgagtagctgggattacaggcacacaccaccacatccagtgaatttttttgtatttttagtagagatggggttttgccatgttggccagggtggtctcaaactcctgatctcaagtgattcacccaccttggcttcccaaagtgctgggattacaggcatgagccaccgcgcctggcctgtctcttcttctaaggacactaatcctatcattcttattgagagggccccactggcatgacgtcatctgaccctaacgagctcctaaaggttccatctctaaaaaccattccactgggggtcagggcttcaacatatggatttggtagggcaacagggggtggggatagggtggctcaaacgttcagtgcatgtctcccctacttcccctctttgtttcctctgataacctgttggggttcctgactccctcacccacaccacgctgagctacatttcctgctgtggcttactctggggctggtggagttggcttttgcttccttccccatctcctccccttcccaattccctaccctccaggcattatacatctcagagaggggaagcgcccaactctcctgccgcagatgggcccacccctttgcccaaacgccgctgggggtttaggtgtctgagccaaccttttccttgaaggcctcaaggtcagttgctccatctgcgaaaggtgcctgtgcctgggtacccttggtctatcaagccagtgcgcatgtgaggaagctgctccctctgccacccaggtgggctgtcccacctgaaaccagacagcagaggccccaaaacccagcaggctcttggctcacccagccatttctcagagacggaggaacagccactgtagttccttgagtctgagacgtgcattttaacattgtctaaatcagggcagagatgactattggtggcatgttctagtttaattggaagtttttttttttttctcagtggtacataaaatagtggttcattttacagttgatggtgacttggattctataagctgtgaggctcaactgctggtcctgactgcaggaaaatttctaaaataggtatggcatgccactgtgcaggactttagactatatgatgctagttaggaaagaggagagagagataaatggaagactgggtcccctccctaaggccttaccactcaatttgcaaaacagggctaagagaaaacataaaaacacttctcaagcaacatatgagtaggtgagaactgaagtctgtaaatctgggtgttatataagcactattatctgggacctcagcattccaggaaagcttcctggaagaagtgagtttcaggtcaaaaagtgggccaaaggctgatctgcctcactgaatgggcacactgttttcatgaggtagtaatgtttccatctacacagaaagaagctgctcggacagctgatgagcatcatgcctgggatattgagcacatcatgcttgacctgggcagagtttgtgggcaaggaaaggggctaagggtcaagataatctctgctggggttgttcaaatttattacccaaccatcacctgagaggttgtcccctgaggatggcttgtctggtcattactgaatgtctgcaggggcatggcagtgttctgcttggctctgggggctctgccctttctaggacaagtcccagagacaaacagcttggcccagtacagcagaatggggtgagagaggaactgagttcgtttgcgggcaggatggaaacagctgatggaggcttctcgggccatcctcacgtacccatcacaagcgaagggaattaagccgccaaaccaccccaaagagtgactccaactcagccctaaacacccatacccaccccacctcccctgcagctctgacaggccaagcctgggcgctagaaccccgcgccagaaggccgggccacacactccagcgtacacgcgcggacacgtgccggtgtccagagccggtgggagaggcgctgtcaccatctgacaggagaggaaggtggagcgcagagaagtcagggtcacgtggtaagtgggggtcgtggtctggggatcacggctccaggtctcttcgcgacaacgcaccgttgacccccaacacctctccctggcggggtcggtgaccgcaacagcctccgggatagaacgctagtgaaaggtaacctttctccagcccgctccacgcgctccgcacccgctaagcgcctccgcgaattaactcaggcctccgcgccgaagtaggcgcagttatgaccccgcttccccgcagggagaccgaggcacgcagggtcgaaaggactcgtccagggtcgcaggagccgaccacacagggaggcgcagcgcccccggcgggaacagtcagcgggtccagcctggcggactcccgggccgggctgcccatataaggctgcgggcggccggcatcgcagccaggctcccggggtcgccccgcgcggggcatcctcctccgcagcgaggaatgcgtggcatccgggaggctcttccgctccacgcccgcctgcggggagcctcagccccggggcgcggcctcgcgcagctgcctggccgctggggggagcgcggggccgggcgggaggcggcggcgcgccctcacctgccccaggctggggaggcgcgagtggggaggaggaggaaggggaggaggccggggaggagcctggcgcggcgggagcggcggcgcaaagtgaaactctggcaagttgcgggcgcgcggggagctgtcgcgggcagcgcgccctcgggaggacgtggccccggcccccgcccgcagtgggcccgaccctcatggccctgagcaaagggctgcggctgctggggcgcctgggggccgagggggactgtagcgtgctgctggaggcgcgcggccgcgacgactgcctgctgttcgaggccggcacggtggccacgctgggtgagtccgggccgggggcagcgacgcccggaggagagggcgcccgcattcgcccagcctcgggaagacgggtacccccccttcccgaggggatcgggcggcgctgggactgccggggcgtaggggtcgcgcgcagaggggtggctgtttgaatgaagtggggctggggactcgagagagcactctggctgggccggtggcgcacggaggccggccgcccctccacggggatctccggcccgcgccgccagaggatatggttgctggatagccggctggggcgctttgcgtattcatgaggatcccggggtgttgacttagccggcctgaccctgtgcctggcgccttttcttttgcacctgttgatgaaaccagtgattgccctttggtttgtgttggcggctccactcctggaggggatggggacaaaagccccaaaacataggctctggagaaaccgctgatggcagctttgtcccacgtaaatacttggtcgagaagcatcggtgctgcaatttatagaacttgtaaacaaatataccatgacctttatgctgtcttagatcctgccaagccagcgaatttcacctatggacttcagaagccttgaaactggcattgtgctatgggctttagtacgtgatctcacttaattctcacaattctactaaaaagctattattatccccattttgcagatgagcaaactgaggcctaaagaggctaagttgcttgccaaggtgacaccatccacctgacttttatgtggctgtttctgtaatgtcattcaatgcgtggcttcctggtatcgctaacctgggtcccttgttttgtgctaaccattataaggaaaacctgggtagcaccaaagcacgtgaaaccaggtctgattgttagacttctaaatgtggacacccgagagtaagctcccaccactaggcgtccagctgtaacagcttgccggtattcctagctaaacaaggtgcagcccggggtcactcgtacttgaggtggtcggcaaatgcagcaggctgctttgtagatgcctctagccttcttttcacatttgtatgcatcgactcccgttcggatgtatgtcttggaaggactatctctcctatttctgattccctaatcatttcattaacatgcatttatccagcttgttctcagtcacttgattactgaaacaatgtctccagtagtctcagcatcaaaagtaggcagtgaattgtagattaagttattttcagattattctaatttgtgctgtcctgaagagtctaagtttggttatttggtgtggccttgaaagaaaaccacagaaatttccattccattttagatgtctacttcataccacatttatcggaagcgaaagagtaatttcatggtacaaaactactgtttcatcaaatagattaagatgtccttcagttggattacggcaacattaagccaagttcatacacattcaagaattctttgaagcagcttagaaaaaagagattttattttttcaaaagtgaagatttaaaaatgattaatgacagtaatgtagtgcatattttccattaggagctgaagtttgggctgagatttacatcacggtggtgattacagtataccagattttagaacagagaatgtaagaaaggaattggctcgtcttcaactcatgtgcagtccacatttgtcatttaacctagcattcatttttcagtagaaaactttaaaaaaaaattttttttttttttgaaacagaggcttcttctgttgcctaggctggcatgcagtggcacagtcacagcccactgcagcctcaacttcccaggctcaagcgatcctcctgcctcagcctcctgagtagctgggactataggcacatgccaccatgcctggctaattttttctctttcttttcttttctttaaatggggtcttactatgttgcccatgctgttctcgaactcctgggctcaggtgatctttccgccttggtctcccaaagcgttgggattacaggcatgaactacttactgcgtctggcctgaaaacttaattttttaaagtctgttttgtttaagtaaaatgaaactatttttaaaaagcagctgtagcatttggtggctttgctggtccagagaatgtttgtaggagagagccttatgttactagaaagttgtttaaaactttcaacatatcctaaatgcatcactattggataaaatggctctgaacttgaaattcccatctgtgttccaaagggctagctagctgttttactttcctttcttggagaaagtgattattttttttcttttttttgagatggagcttcactcttgttgcctgggctgagtgaagtggtgcgatctcggctgactgcaacaccgccacccccacctgggttcaagtgattctcctgcctcagcctccccagtagctaggattacaggcacacgccaccatgcctggctaatttttgtatttttagtagagacggggttgtgccattttggccaggctggtttctaactcctgaccttaggtgatccacctgctttggcctcccaaagtgctaggattacaggcgtgagccaccatgcctgacccgagaaggtgaatttttacaagaaggctgcaatctctacttttgtatgggacaggacacttgtggcagctggcgtagctggtggtctaatcttgacctttcaccctttccttgaagttccgagtcgggggtagcttccttttctcttcagctgtggttttcctgtgatgggtccctcccagttagtaatgagaggctgagagacaagttgtggtaactgcttcgtgggtagtggtctttcccggcccctgagtcattctaacttccatcctgctccgctgcggatgcacatagctgctttcctaggggcgagaggagatgaggggactgggcctgatgaccacaggcgctgccccttcatagcacattttattcctgaaggatcctaactggaaaagtacctctcgccgaaggggctgggtggttccttatcattttcaggcaaggcctggagacaggggcttgaactgggctgtgatttttaggaaaaacggatggtccatgattcgttgattgctggactccttccatctgaacctgtcttcacctgtcttcacctgtcctgctctaaagtgaactcttcacactagggccgtctggcctgctagcaggattgttgaaggaattattccaaattcctgcttctaaaagaattaggttgtgaatctgaatctgtcttttatgtagatcagtgggagcaaaaattccagaggcagaaaagccaaatgtattggcactgatttaaaaggcttttatgaagtctcgggaacctgactggagggtagttggccttctcagcacaggtgggaagccccgtagccggtaccagcatccctggccaacaatccacaattagcaaacagatgttcccttatttgcacatgggacaaaaacctactcctgtctctgtctcttgtaaacttagggaaaagtgcttattgttaatggattttgtgtattttcagagtaagcgacagtgttccaaagttcaaggttctccaacagcccccaggaacggtggcctgagggtgtccctgtgtttacagtgcgggctgtgtgtgagtgaagtcgtgcctcctgccgcccagccgggctttgctgtgaacaggcagcagggagggagggatggggcaggagacttgagagaattaattaagttaattaatgggtgtccctaaattactttgagcttctggggggaaaggttctgtgtaaacaccaggcccccaggttctcccagctgctgttgtgcgaggccacgtctcgagtttagctttgtttgaattggtgagatggccccagggcagagcaggactcagtctgaactgttgcctagatcactttctcaggcattatggccagatttatttggtcacggactggaattttgatctgctagagaggaccacagagaatcaaataagtcaccattttataaatgctcctggacaaagttgaaaccacaggtaggaccaggcaagggttccggggcccctgacgtgggaaactagagcagcgacccgggaccacagtggtctgtctgcctccaggactggtttgcctcctctcctagccggaggctgtctcagcgtagtgtttacaaaatgcaaactgggatggtgtgtgcttctcccgcgggttttgtttgtttgtttgagacggagtctctttgcccagctggagtacaatggcgcaatcttggctcactgcaacccccacctcccaggttcaagggattctcctgcctcagcctcctgagtagctgggactacaggcatgcaccaccacgcccggctaatatttgtatttttagtagagaaagggtttcaccatgttggtcaggctggtctcaaactcctggccccaaatgatccgcccacctcagcctctcaaagtgctggggttacaggcaatgagccaccacgcccggccttccccgtgatttttgtagctcacctgtaagatcgtgatttcaaatcttaccaggctcttgttttggctgtgtggctcaaaaacttggcttttagcctttaattgtgaaaacgttcaaacacaaaagtagagggaaaaatgaatcccctgtctacctgccattcggcattgatagttatcaatatattgccatttttatttcacttgtccctgtattttttatgaaaacgtgaatctcctaaaatttagtttgtttaaagccaggcaagattctaatttgttgggttggcttttttttttttcttgcatttagatatagaagttcaatttttttattttattgtaaattgacaaattattatcgttttttgagatggagtcttgctctgtcgcccagctgggagtgctgtggcacaatcttggctcactgcaacctcttcctcccaggttcaagtgattctctggccttagccttccgagtagctgggactataggcgtgtgctaccatgcccggctaatttttgtatttttagtagagatggcatttcaccatgttggccaggctggtatcgaactcctgacctcaggtgatccacccgcttcggcctcccaaagtgctgggattataggcgtgagccactgtgctaggccaacagattaggatgattatatattatggggtacaaagtgatcatatatgtgtacaatgtggaatgattaaatcaagatgattaacgtagtcatcacctcaaatacttctttgtttatttatttatcttttttgaggtggagtcttgctctctcacccaggctggagtgcagtggcaccgatctcggctcactgtaacctccgcctcccaggttcaagcgattctcctgcctcagcctcctgagtagctgggactacaggcgcgtgccatcacgtccggctaatttttgtatttttagtagagatggggtttcgccgtgttggccaagctggtctcgaactcccgacttcaagtgatccgcccgcctcggcctcccaaagttctgggattacagacatgagccactgcacctgaccacttattgtttgtagggagaacatttgaaatttactctcctagtgatttcaaaatatacattattattaactatagttaccatgctatgcaagttcgaaatttacttggcagatttcgtgtggccagcagcagaaatggtggcatgaactgattctgagacattggccaagacacatttttaaaagcaaagtgaccacttgggaagggtcgaccacagcctggaagaacagggagcgctctgctggtgagctcgggaggacaaggtctgggccctttgacggcactgcctctagccccgggcaagagagggccgagggccatgtccagtggcctctatgctcccctttctggatgacattcctgctgctcaagaccctggagtgtgctaagcacatagtgcagcctgctcagccccctcccagggcctcaggcagactgtgcagccgtatgtccaccccaggcccgggcgttggggtggcaagggcatgttacaggtggaacgggacacacactagctgggactctgtgtgtgtatgcacgaggctccctgcaggggggcatgaagcccaggttgggggaagtcggggaagagaaggtggccaggctggggccgccctccccactggctacataatgaacctggccttccaggtagtcacggtggcatacttttcgaggtaggaggatagaacctattttatttaactgttttactttgttagcttgatttaaaactgaacagctgggcatacaggatgcagcactcatgagtactctggccccagaccctacagatattcaggcagacctgtcctgggcacctgtcccagcccgtgtctctctgctgtgtctctcttctggagcgttcctggggtgctcagggtcccctttgtgctttttggctgctcagtttctgttgctgggctccttcggccttcccactgaggatggggaatatattctgttttctttccacttgaattgtccttaaagccatgggtaaactggttcaggctcagacttgggaatttgatcggagtccctttagcatttctgggcagggcttgttggtgtcgtggccagctgtcctcgaggtgaaaaccaaattgggttgggagggtgcacatgacacttaaagcccccagagctgcggtgccatcaaccacacactgtggacaggaggctgtcagtgggcaggctgggtccaccttcaaagtccatacgaaacagcccagttcagggtactgcttcttttcgagatctcacgggcaggagccttctggcactgttcatgtaaatgtaagtcattctttctttctggaggaaaatttagacaggtgaatgaaaaccggagtgcttaatccgctattctacatgcagaagtttatctcaggaaacagtcccagatcactagcccattttgcttcaaggatgtttattgcaagctgttttgagtttttcactggttaaataaactttggttcaacttgatcataatagctgacatttgtggagtgtttaccacctaccaggtgctgatccaagtggcttacatttattaacttacttcatccttatgtcaaggcaagtactagtaatctccattttacacttggggaaactgaggcacaagaggcctaagaacttgcctgaggctccacctccagtggaaggctccagagaacaatatgttcagtaaaatctcattcttatgtaaaaaaatgaatatatatatatatatatatatatatatatatatatatatggaaaaagactccctttgtcctgttgtctctggcttatcttggttttcatctgacatacacttttgatcgaggaggttcccacttggggaaacagccagcccctttctgagcagagggtgtggcactacaaaggcgaaacatgatctctgggagaaacatgcttgaagcccacgctcctgggggcagagctgagcctccacacggatgtccccagcactgggagcagaggctgatgcggccccaaggtgctgaggaaagcgccccccagtgcaaaggatgctacaaggccccaggcttctcaaggaacatgaggcctggcaaacccagaacgttagactgggtcggctccaagatgcccctgggtttgagctggagaagtgtctgcgggagggtgctggggctcctgcagagcgtgtcttcctgaccctgtgggcttttctggggggggctaggaggctctgccaagttggtggatggaactgtgccttgccctggggggcactgggcaggagccagcctcggagcgtgagtctggtgctgcgccaggaggctagatgccccggccaggtcctgtgggctgcgccgtctgtgcccttggcccgcgaggctggcaggctgccactgcttgtaaagcctcctggttgaaaaggtgactcggagcagcggattcactgggagcctgtcagccacagaggcagcttgtgcttgtgccccaggcccaggccgcaggaggtgggatcaagttccacggctccagtgtgaaggtctgagcttcattctaaggcaggtttttgaggacatggggctctcgggcacctggttgtattcctgcatcctgcattcctgcccactctctcatgccttcttctccttctccttggcgtgccccaagccagccttccatctcagatggagttgtatgtttctagtgagcccacacaccccctgaggacagggcctcacccccgcacgcctgcttcttcatcacagctgctaggaaatgaagatgcatgtccccaggggcctttgaagtaggatgtggtctccctgagcagaactctgactctaaattctctcctggctctggcgttggtgtgggacttgggttgcgggagggggcaggttgttagcggctgctgctcagacccagcggaggaccgggctgctccaggctcccggcaagatgtagcaaaatggccaaatttaaggtgagcacgggctcccgtgcagtttctcacccctgctgctggctgcctgtctgtgaatgctaaggcgaggggtggttctacattgacttcttactgactggtgggagtaacccggaagaggcaaatgacttccttccctttcctcggctctgaacctagaatgttccagtgataccacctccaaactcttcacctgtgtcctttcccacctctctgccctgaggacagggaactaagtggctgctcacggtgggtaaaactgaggcttacaagacaccttgggcaatgggacagccagaccccagccctcagcacctgcctctcccatcccaagccccagtctctttttcagctgcaaagtcaatacctttgctttcagagagggagcatgtgccacgccaggagaggctttgggtgtatcacagatggagactgcctagcttaactgcgcagtctgaatgattctaaggaggggaagagagaacgcctctggagcctggcacacacatttgccggagaaagtggtgagtgcgttgtgaccaggtgagggacgaaccttaaggagattggctgagaacacctcccctcctcaccctaagtcaacaaacccgggacagcagtgcttccaaaaccttacttgttcacctcacctggagattcttgtggcaaatcgggttctgcctcgttggctctggggtgggccttgagagcctgccgttctaacaagctcccaggtgatgctgatccacgaccagctttgagtaccaggatctcgcatcagcttgggagggaggagacctgaatcctagccctggctccttaggctcttctttccagtgggggaatttagttaattgctccgggccccaatatcttaatctgaaaacaaatgaatgacaacctagttgcctttcctactctgagattccatgcgtcttaaaagaaaaaagttttaaaactaaacatgtcactgtcaccatcgctacttcacacacctaaagttataaaccactcagaaatgcaaatcttaggagatgtgatctggcaaggcaaaatcgaagatggctttgaggtctcagctaaacctagaaatctgatgctctgcattttttatgggatgcttatgaattaatgaaaatacatgagattatctctccttgagtctaccctttcctacaaccagcaaaaacttataaaaagcaattgaagcttactttgggaatgccaagggattgattaaaatatggactgtgctgattccatggctggtttagcagattcttgttaaaagccatgactttttaaaatttttatttttttgtgggtacatagtaggtatatatatttatgggatacatgagatattttgatacaggcatgtaatatgtaataaccacatcatggaaaatggggcatccatcccctcacacatttatcttttgtgttacaaaccaattatactcttttagttattttaaaatgtacagttaaattatatagtcaccatgttgtgctatcaagtaccagttcttattcattccttttatttttatttgttttactcattaaccatccccacctcctccctagacccccgccgctacccttcctagcctctggtaaccatccttctattctctatgtccatgaattcaattttgatttttagatcccacaaataagtgagaatatgcaatgtttgtctttctgtgcctggcttgtttcttttttttttttttttttttttccttttttttgagacagagtcttgctctgtcacacaggctatagtgcagtggtgcgatctcggctcactgcaacctccgccttctgggttcaacctcccaagtagctgggattacaggcacccaccaccacacccagctaatttttgtatttttagtagagacagggtttcaccatgttgtccaggctggtctcgaactcctgacctctggtgatccacccgcctcggcctcccaaagtgctgggattacaggtgtgagcaggtgtgagcaactgcactcggctggctggcttgtttcacttaacataatgacctccagttccatccatgttgttgcagataacaggatctcattcttttttatggataaatagtactccactgtgtatatgtaccacattttctttatccattcatctgttggtggacactgaagttgcttccaaatcttggctattgtgaacagtgctgcaactaacatgggagtgcagacatctgtttgatatactgatttcctttcttttgggtagatacccagcagtgggattgctggatcatatgatagctctacttttagttttttgaggaacctccaaactgttctccatagtggttgtacgcatatagtacatatagtacataacatatataacatatgtatactacataacgtatatatagtatataacatatatagtggttgtactaatttacattcccaccaactgtgtacaagggtttccttttctccacatccttgccagcatttgttattgcctgacttttggatgtaagccattgtaattggggtaagatgatctctcagtgtagttttgatttgcctttttctgacgatcagtgatgttgggcaccttttcatatgcctgtttaccatttgtatttcttcttttgagaaatgtacattcaaatcttttgctcattttttggatcggattattagatttttttcctgtagaattgtttgagctccttatatattctggttattagtcccttgtcagatgagtagtttgcaaatatttcctcccattctgtgggctgtctcttcactttgttgattgtttcctttgctgtgcaaaagctttttaacttaatatgatctcttttgttcatttttgctttggttgcctgtgcttgtggggtattgctcaatacatttttgcccaggtcaatgtcctggaggtctttcccaatgttttactgtagtagcttcatagtttgagggccatggcattcttaaaaacataactttcattcttgcatagctttttttttttttttttttttttttaagtaacctggactgtcatttggctagggaggcgggagtttgtgtgtctggaaatgtgtgggtttttttttttttttttttttttttttttttttttgggacggagtctcgctctgtctcccaggctagagggcagtgcagctacctcggctcactgcaagctccgcctccctggttcacaccattctcctgcctcagcctcccgagtagctgggactacaggcgcccgccaccacccctggctaattttttgtattttttagtagagacggggtttcaccatgttagtcaggatggtctcgatctcctgacctcttgatccacctgcctcggacttcaaaagtgctgggattacattacaggtgtgagccaccacacccagccagtgtgtggtcttttttatctgtctgtttaaactgtctgttttatatgttgcatgaaccccgctttaccatgaatcttatcaatgactgataaatattgtctattggaaacattctctttaagaggaggtgaccgttctctgcagctcctgctgattcagcaaagctgaggtcaggtggagccagctgggcagagatgagtgattagaaggctgtcattggcagtgacagtccacgtgctccagggcagaacagtgacactggctgtcacagtctgtttcaacaatggaggttgtttgtttttatttaaatgatgtgaataaagaaaggaatctttgaaaactaaggctggagctgcccaggcctgagccaggcccttgtaacaaggcccttctgggtgggggatctacctctcttttcacctggaccacctggcggtgggtggcgagctcagaaccacagctgggtggaaaatgggagggccagcagcgagctgcaggaatggaattccatgatggcatctcatgtctccagagtggacagacagaagcttgtgttttcatttcaaagggcatctgccacgccctccaggcagaccacataaatggcatttttgggtgaggcctgagggattctgtctggtggtatacactgattttaaccagaagcaatagatttgggctctttttgacaggggaagatagatgagagatgatttccatgaggatgttgaaaatattggcaattctgaagaccccagggagtcccagggggttcctggccaggagcgcccctccattgccctgcaccaccttgctttccaggctgtggctctgtgtgtctgaatctacggcatgggggcacttccttctaattcacagaagaagctatatgggccccagactgcccatcctgctaaaactggcaaaggccttttcccagcctgagcagtagtgattcagccaactgcagaagtggtatttggagctcacccttaaaacataaagcaagttatgttcagactatatacaggcaatgagaaaatatgatgaaatatgactgcgtatgaatagccccagacttctagggcctttgagtgtgtctgtcttgggcaacatcttctccttttagatttcaggctcagtttactgtcaggaaaattaagttgctgagagcgtctcagaattttggcttaaaagagaatatacacctggaacaaagacttgaggggtgctcctattaaaaaaaacaaacagtgtgtgagcttcaaaggagcaccttgaaactccagttccatcacatccactctgctgggccctcctagggcagctctctgtcttgtgcctgccttctcttctgaacactcctaaggtattttgagtgcggaggataggatcatacactcaggaaagccgagagctagatcctgaagcatctgtgcgggaaatgcccatctgtgcctgaaatgagcatctgcgagtgaagtgatcccatgtctgggatctgtttggcatgcgccaggagacagacggacacatgcatgcacacacacacacagcggggacggggagttggtgaaataagagtgggaaaatgttgacacctccgtgagccgggtgacaagctgcttggtggttcactagacagggagttataaattggccgcttttcaacatcgacagataaaaatcaatagccttcccataatgccatcattaatcaattagagtctgtaatgggaaaagcagatgccactcccccacagtttctgggaataaacaaagtgtataaggcctaaaagaagaaagctatagaacttgactgaagcccacatctgtggaaaggcatactatgttcttggagtgggaacatcaacactatagagatggcagttcctctccagttaatctggaagtgcaagtatcgatgagtaaatccaattaaattccaacaagagcctggtctaaaatgtaacaggctgattttacagtatcgctggactccccctacatccaaacttattcttaccttcattctcccattttggttaatggcagcaccatccaggcaactgctggtaataaaagcctgtgagtcattctgacgccccttccttcctcagcctcatccaacctaccagccagtagtgaatcccaccccaaaacagatggtgaatcccaccgagtcccccggtcatcgctgctacatcgagagtgcagccactgccccatgtgctttcctggtctgcttggcagcctttgaactagtctcctggctcttcccctgctccccgtatagggatctgcttgaagctcacacagccctgatcctctgcccctgcctctttctccaccctcatctcccaccatttcctgggctcactgcattcagcagcctgacttgttcctgctcagaatcttcacacccacctgcatgcactccctcccccaggtgatatggtttggatctatgtccccacccgaagtcatgttgaaatgtgatccccagtgctggagatggggcccagtgggaggtgattgggccatggtggtggtttctcatgaatggtcagcaccatcccccctggggttatcattgaaacagtgagttgccacaagatctgattgtttaaaagtgtgtggcacccaccccaccctcttggtcctgctcctgccatgtaagttgcctattcccactttgccttccaccatgagtaaaagctccccgaggcctcccaagaagcagatgctgccatgcttcccgtatagcctacagatccatgagccaattaaatctcttttctttataaattacccagtctcaggcatttctttatagcagtgcgagaacagactagtacaccaagggttggcctggctgctgctgcctccgtctccccacctaccccacccccccccacccagcttcgtgactgcagtaagaccttcctgacctctgtggctggaataccctgcagcccccacacaccaactgtctctgccccatgcctggtttcctttcttcttggcgcttatcactgaaattaccttatgtgtgtgcttacgtgggtgtcttctgttgtccactgcaaaaatgcattgtgggttgaattgtgtgccccagaaaaatacattgctgtcctaacccgggataccttgcaatcttatttggaaatagggtctttgcagatgcaatgaagatgtaagttaagatgggatcgtactggtatagggtgggcctttaatccaatgtgactggcgtgcttataagaagaaaagggacacaggcagacgcacgcagaggggagaatgtcatgtgaaggcatacagggaagacagccatatgacaatggaggcagagatgggagtgacactgccgcaagacaaggaatgcctgggctaccggaagctgggaaaagcaagggaagatgctcctacccacgccttgatcttggatttctggcctccagaactgtgagacaataaatttgctgttgtttcaagccccccgttctgtggttctttgttacagcaacccaggcaactaatacaggggcattgtgtatctcgttcagtaccttaccttaacactgcctcgtgtggaaatgaggcttggcaaacactgttgaatgacgaagcattggcaaaaaaaatagccaagattttgaaaaggatccacaaaggcagactgatttaccaggtagcacaacatattataaagccctaaccatcgtggaggctgtcagcacaaatcaacacagtagagtggaaggctcagaacagacttgtgtgagcagtgttactttgtttcttataaaggtgatgacttcagtcggtcagagaaaggtaagggtggatactcagcacctgctgttggtgtggttgatcagtgcagtgcctaagaggcccctgctctattcaactggatattcacgcaggcattcttggccggtctgctcagagaggaataggctggaaaccttggctggccagcaggatgctgcctgctgctctgcttccaggggagcgaggggtcttcctggcagtttttgcaggtggctgcacacacaggtgtccttctggtcactagctcctcccccagctgaaagccctgggtccccaaggagccagaatcccttataaaattaccagccttacagagccctgggttcacacaggggacattccatgttacaagagttaccacacctaaggaagccccatgcctggcttcttcaccgagtggttataattcacttatgggtcttccctgtccagaggcaatttgccaatcaaggtcatttttaccatgagcaatgttgtctagtaacagagttgacgttccatcttgattggggttcccagggaaccagagctagataattaaacattaaattctcatacagaagggaagaaagattttgctaagcctgtgaccaaaactatccatatggacactaagtgagagtcctatgttttatcatacattaaaataaatgcagaggtatttaagtgtaaaaaaacaactttcaaagtattagaaaatataggctatgctttcacagtgttacggcatggaaagatgttctaaggaaagcatcaaactcagaagtcataaaggaaataaacctgacagatatgggaaatatttttattgaagtgtaacatacatagagaaaaatgaacactcgaagcgttgagctccatgaatcttcacccggtgaacacacccacatagccagcacgcagatctggagagagaacgtttgcatcccaggcccctgcctcccattccccctgtgtccgaatgatagatttgactacataaaaatggaaaactccaatatatcaaaagacaccataaacgtagtgaaaagacaagcaacagcccagaaggaaagtttgtgcagccttttgtaacatagaaaaaggccaaagatggatgatcatagcatataaaagaactcctatagatcatgaagaaggaaggacaaatagttcaacagagaaattggcaaaggatataatgagcaattctccaaaggaaaaatacaaatggccaaaacaatggagccagtgtggccggctctgcccagcacggccatttgcacatggtcactgttgggtgggtgagggctgcttgccccgtctccagccccactctcttgccatctccccctgtgattcaggcatggagctcaggccccaggtggcaggcagcgcactctgctcagttaccccagctcctggcttcatggccatgccctggcacctgtctccctccccttagcctgctgacctttttcccatgggatgtttggttgtctctgtacaggctctgagccagccctatgggcttccagacaagcccagattgagcctgccctctagggagcacccctgtgtagcttccagctgagaccttgagacacaggcccagggagccaagctcagggctgcgaacatccaggtggggctcaggtgctagaggcggacaacagcctggtgcaggacccagagtggcaagaggtagtaagggggccatggtgttcagaaattggggcaggtggtgggtaaggcatcctgcttctaaaggccagggtttgggagggcaaggaagcccctggcaggagtcagggcaggcatcccgggcaggtagtgtttgttctgtgaagcaggcttccccaaggaggggccctagagcagaaagctgtgatgtgcaggtgactgggagacctgttctctttcgagccgtgcagctccggttagtggatgacagatttcaagccctgctcaggccagtgtttttcacacatgtttgacctttggttgacagcacacagcacaacagcttatggtccaggagtgcacctcggcatgcagtttgggaatcctggcgatgatgtgattaagattctggggccaggttctcaccaagccaaaaggctttttttttttttttttttttttttttttttttttttttgaggcaggagctaattctaggtacagaaaaccattggtaaagtggaggaagctgtttccagatccacggaatgacggtaactagcgtcacttgagaaggtttcttctgcccttttgtaaaaaatagcatgatgttttctcctagagacagacagggcctctgtacgtaagagcagacatgtatggagaaggccggagagtcacaaaccatatgtgcctgagatgtgccacctgtggggctgtgaataaggaagcagaatcagtgtgtttactcagagctggatttggctgtttgttccttcatctttcttggaccacatgtcctggtgttcagaggctcctgagagcctggggctcagtaggccgtctcatagcccctctaacccaggtgagaaaacaggtcccagtgggtccctaacccatgctcattttctcaccaaacaacaacaaataaatcagaaagtcctgaaaaatgaattctggcctgttttctggattctggattgaaatatggagtaggagctgacttttagtaagttgatcaactctccccgccgaccccctagccttctggaactgtcttcagtaaacacaacccccgccacccctgacctacccgcaccgcactgtggtcggcctcttctttgaacacttcccttacagcacgcactccccccaagctgggccttctcttgagaccactctgctgtccttgggagtgatggtggaggcggggtagacaccctgtccctgtctcgtggtgctcctttgggccacagctcctcttccctccgtaggaggaaccatctggaatccatcttcctccttgaccacacctctccattcattaaggagcagagttccctgctcactgggtctctctacccctcctctgtccctgtctgggtgaggtcacagagagcctcacccgcctgctctgttggcctctcacttgccgtcctctctgccccgttccctctcctgcacacctgtccgcggtatccccagctcttagtgactctagccctctcccgccctcctctgcaccctgcatgcacttgtgttgctgaatgtggccggagaaaaacacagccatcttgactgttctgtgagacttcatagatttccagggctgtgtggaatcaaaaaatcttcctgcatttccccagccatctggcctccaggatgactatttcacatctcctcaagcctttcacatctcatccccctcacacctgatgattttgcttcctatttcactgggaaaatgaaggtaactgagaactttcttttttttttttttttttttttgagatggagcctggctcttgttccccaggctggagtgcaatggcacgatctcggctcactgcaacctccacctcccgggttcaagcgatttctcctgcctcagcctcccaagtagctgggactacaggcgcccgccaccacgcccggctaattgtcttgtatttttagtagggacggggtttcatcatgttggccaggctggtctcgatcttctgacctcgtgagccgcccacctcggcctcccaaagtgctgggattacaggcatgagccaccgcgcccagccaaaggtagctaagaactttcaacagcccccacacctactccctggctctggtacagtggacagcctcccaggcttgtcccccctcccagtgaccttgacccctctcatcttttaagacctcgctcccgcagtttccccctttccttcctaactcggtcatttgcaccattataccaacaggctgtcttagctcacattaagaaaccctctcttgaccctggcctccacctcatctcttggttttcccatgtgacgaggttgtctacacaccttccctcttcccagtctcccttgaagtgactccagccaggctgtgtcctcccactcttctgaaacctttcctcaaggcctccaggaccttctggctgctcagtcttccatccaacagcatcccacagatgaagcattttcttcgcttggcttgtcttacgctctgttctcatcatattgcttcctcactgcctgtttttctccagagcctagaaccatgcctggcacacagtgggcatctagaccctttgctgagtggtgaaattgaagtgtgacagggtgcgtggcttccctgctcaggctccctcagttcccaaagctgtgctccttcctggatctcatgtagcacaaggaggcatacgtgggtcgcaccacatggcttctagaggagtatgtgtgaatgtgttcatgttcatgtggaaatagggaggcggccctgaggtgggaggagccttcccaagaggaatcacctgagagaggaagaagagctggggaggaactgaggaactggtttggcaggttcaggaagaagtgagtgaagaaactggaaaagtagccaggatcagaacctgcagccgcaggacctaatttgttaggacctaaattaggggtgattgtgcaaggcagtgcagcatggaagccccactccaggacttccctggtggctaggaaacattgctccacccctccctcttgtcaaaagagaaggtgcacacacttggagagaaatgggtatttttgtgcttctttcttgttccctgttgggtaggagggttggggctaccaggcccagtgaaaacacagcccagccctgcctgttctgcctcatcctgaagtgtaaggaactgcccattgtgctgggccctgtcactggctctgcccgaggcatatgtggcactgggcctggctttttaaggtgcaaactgttttcctggatttcttatttttaagggaaaaaactcaactacaaagactcagtggccagtcctgtgctcaagccctcttgttaggggagctggcctccctctttggccacagctcagtgcagggaggggtgtggaaagtgctgggaaagggggaggacccaccctccccacagatgggtttctggctctgactgcgggaaaccaaactttcttgtattttctctggctgggttgtgatgtgggcatggcgttggtgggaggtagtgcatttgctgagggtgatgtgttctgagtgtcccctcactccgtggctctttcatgtggcctggactttttggtgagggagcagcagtgggaggacaggagagtcctttagcgggctgatgtgtgtctgccagttggctttgtcttggctcgcagcttctgtttcagacagatgttttgatccccctttgcttagcaaccagctgcagccttgctctgtcttgggaaaaccactgtctttctgaagagctgcttcagctccaaaactgataactctggaaggagcagccaccagccagtcagaactgagctccgaattaacacatgaaggagactttggcctcttgagaccctgaaatacaagaagatggtttcatgtcatgtccaagaatgtggccacaaatgctacctcagtctcgggctgtctgcattgttaaatgacctcattatttttctgacctgtgggccgggcttcgttggcatttccttaaggcgtgttattgtggaaaatattattcaagaaagaagagcatgtggtttgcttggttactgagctggactggctctgggtgaccagagctctcacgcagagccgtgcacggctgctcccactgagaccagcctctgcctcgggatggtctgacccacggagctctgttttgggacccagaatccatgagccacatttgctgtgctgtgggacaaaccacagtttccttgggagcctctcaagtggtggctgtttctcttccacacccttggaccactggagctggagacggggagttccccagcctcctccaaggataagcctattccttaagcctccacaagccccatcattatttatttttatcataagccatgttgttcgagtagcatagacaactttctcaggttaccagggaaacaggactagaaagtcaacccacgatcaaattaccttgccgaaagggaaccagctcagttaacccttgaccccacacgccattgtcagaggcgtatgaaccagagcgactccatcttgaataggggctgggtcaaatggatctgagacctgctgggctgcattcccaggaggttaggcattcttagccacaggatgagataagaggtcagcacaagatacaggtcataaaggccttactgctaaaacaggttgtggtacagaagccggccaaaacccaccaaaaccaagatggcaatgaaagtgacgtctggccatactcactgctcattatatgctaattataatgtattagcatgctaagagacactcgcaccagcaccatgacagtttacaaatgccatggcaaaatcaggaagttaccctatatcctctaaaaaggggaagaaccctcagttcctgggaattgcctacccctttcccagaaatgaataatccaccccttatttagcatataatccagaaataatcataaaaatgggcaaccagcagctcatactgctgccctgcctatagagtagccattcttttattcctttactttcctaataaacttgctttcacttcatggacttgctctgaattctctcttgcatgagatctaagaactctctctcggggtctggatcgggacccctttccagtaacaccacgagactgcgtccctcactgcccctcgtttcggcagttgcatggttccttggtgagttttccctctttctcgctgtcatttctcactatgagtctggcgcttgttcttggtgtcttcagtggccacgtcgttgatccttcggaggaccttcgccccctctcctccagtgagtgaccccacccctgcagccactcgctcccatgccacgcccctgacccctccagcatctgtctcaaacatcccactcttctttctccactttcaccttgtcactcatcctgcaattcccagtcccagtgactattttttttttttttttttgagacagtcttgctctgtcgcccaggctggagtgcagtggcgcgatctcggctcactgcaagctccgcctcccaggttcacgccattctcctgcctcagcctccctagtagctgggactacaggtgcccgcaacgacgcccggctaattttttgtatttttaatagagatggggtttcaccatgttagccaggatggtctcaatctcctgacctcgtgatccacccaccttggccttccaaagtgctgggattagaggcgtgagccaccacgcccggcccccagtgatctttgaccccactgggatggcgacccttagaacccatggccttctcatagcccctcgtctgtctcacaccttccctctttgccatgtcagtgaccagccctgccttgcactcaccctccccacccgcccttctcttgctgggtcctccccacctggtgaaacctcagccctggttacatcctgcactccacgcctgcaccagccgctgtgcagtagaagtttctggagatgccccactaccacacgggcagagcgtaccatcaggtcacaacccctgagccaaggtgggcctttcacttgcgtttctgtgctctgtccactcccccaccctcccagatggcaactccaccctcccctttcctcagctctgctgtgcctcctccccatcctcactttcagctgatggcctcgtcctctcattccaccccaaaatttgaagccactggaagagaattcccgctggctccctgcaccaccactacccgcccaccatgtctgtcccccttcccacctgctccccgcagtgcactgtctacgtttcaggccagtgctacctgtgtgcagatgcccatggcctgctccagggcatggctttcggagctccctgctcctgccacatccgtcctgacctctctcttggctgcattggtcctgacctctctctcagctgcatcaatcctcgcctctctcctggctcatttctgccagcacaaaacttggtataaatgcccctggcctaaggaaatcttttgacccactttcctctccagcagcctctccatttctctgcttgccacacgcacacatgcacatatgcacacgcacacacatgcgcacacacgtatgcacacacgcacgatccatgcacacaatgcatgcacacacaggaaattcctcagagaatcatctgttgccactgtgtccattttctctctccctccccattcaggtttttgcccctcaactttactgaaactgttcctctctgagctgccaaagtctgactaaagtgacaaattctcagtcctcaaattatagatgcagaagcagcctctgacctgctgactgctcttgcttccttgaaacgctttcttctcctggccgccaggatgccacgcactgctgggttttcttgtatcttcttggtcacttctcagtccaccctgaccttcaaacatgctgcacccagaagtcggtgccctccactcactccctaggggatcccctccaacctcatgattattttattttattgctgggattacaggtgcacgccacactcccagctaatttttgttgttgtttgagacggagtctcactctgtcgccctggctggagtgcagtggtgcgatctcggctcactgcaaccttcgcctcctgggttcaagtgattctcctgcctcagcctcccaagtagctgtgattacaggcgcatgccaccacacccagctaaattttgtatttttagtggaggtggggtttcaccatgctggccaggctggtctcgaactcctaaacctcaggtgatgcactcacctcagcctcccaaagtgctgggattacaggcatgagccatggcaccgatctgtttatttttgagacagtgtctcactctgtcaaccaggctggattgcagtggcgcaatcatggctaactgcagcctccacctcccaggttcagatgatcctctcacctcagcctcccaagaagctgagaccacaagtgtgcacaccttgcccgactaatattttttattatatttttagagatggagtctccctatgttgtccaggttgttctcgaactcctgagctcaagtgatcctcccatctcagcctcccaaagtgctgggattagaggcaggagcccccacacccggccccatgattgtaaataactctgtctgctgggacgcctgggggatctttccaaccagatttctctgctggactccagacttgcagagctctgtcgtcagcctccacgcagggctgcaacagagccacggcatgtctggtcccagcagatgctctgcccagacctgtcctctcactctttgctgtcacgccagggccactccatcccttccattgttcaggcaatgaacatggcatcatccttgaaccctgtctttctctcatatcccataaccaatctgtccatggttccaccttcaaaatatacccagatatgtgatgatgttgaggaattgctggtaacttttttagatgtgataatggtattgtggttgtgttttgtttttgtttttgttttagacggagtttcgctcttgtcacgcaggctggagtgcagtggcgtgaccatggctccctgcaacctccgcctcccaggtttaagcaattttcctgcctcagcctcctgagtagctggagttacaggcatgcaccacctcacctggctaatttttatatttttagtagagactaaaaacagggtagtggtgtgatcacagctcactgtagtcttgacctcttgggctcaagcaatcctcctgtctcagcctcccaaatagctgggaccacaggctcccaccaccacgcctggctaatttctttaaaaatttttatagggatggagtctcactgtgttgcccagtcttgtcttgaactcctgggctcaaccagtcctcctgccctagcctcctaaagtgctgggattacagggagggagataccatgcctagctagtttcatttgttatctgcctggtgtgtgtagacatctgctttgtcacctccattgtggagagcaacatggggtttcaccatgttggccaggctggtcttgaactcctgacctcaggtgatccattccccttggcctcccaaagtgctgggattacaggcatgagccaccacgtctggccatggttgtgttttttaaaagagctcttatcttttccagagtcttactgaaatatttacagatgaaataatgtgatgcctggaatttactcacaataacctagggcagtgcttctcaagctttggcatgcattcaagtcccctggagggctcattaaaacagctttctaggtcttgagcccagagcttctgattcacaaggcctggggtgggccccgtaacttgtatttctaatgcttggtgctgctggtgtgaggagcccattttgagttgagctgatctaaggtataggagagtgagtagcctgggcgtgggctgggagaaggtggagttggtgggtacgtggtaatgaaggtacaagggtttattatgtcaccctacttttctttggaaagttccgcaactaaaaagcacgtgtgtatgtgtgtctgtctgtctgtctgtctccagaactcttcagctcttccattgctgcgccctggctcaggctagagtcctctcttgcccaggtggcgctagcacctcctaactggtctccttccttctctccttgttcctctagagtcagttctcaacagagcagccaggatgatccccagacccctgcagtggcattcagagtgacacccaaaacctttctgtgacctcaaacttctgtgcagtgtgttccccacgccacttcctccatgaaccttcagtcacactgcccgcctcgctggggcttgcactggtcaggagtgcttctgccgcaggacctttgcacgtgcccttctgggcctacagtgctcctccactctccatgcagccatctccctggcttccttcaggtccgcattcagatgtcacccttgcaatgaggccttctcagacaacaccatctaaaatgtcacttccccttccccactattcataccctactccctgctcactttttctgctccgcgcctgtcactgtctatattgcactgattgatcttatctatcctggcaggaagcttgagcagcgcccgcctcttcctggctgtgcctcggcagtgcccccaccccagcctcccaccccatcttggtctgcaccccctgccatcactcatccattcattcctcctgttcctcttggccactgccaaatgctggatggtttccatctgtttggttcactgcagtgtctctgtccctggaagggtgccagccacagaaggcacgaagatgtgtccacagagccggcggctaaaaatctggcaagaggagtcgaggaagggggctgaggaggtagaagggagggctttcctcaaaaggccagaaattcgtggccagccaaaggggaagcaaagacattctcgtgtaggaaaacttacaggaaatgcaactaaaagcgtgggagacaggaagtctgtgtatttctgagattatcaagaaaggggggatggaagttgcaaatgggcaggccaaattcagtctgcagaggtgtgcttccagcccacgcagtgcttaaaataaatggagatggttgccagcactggaaggtctggagtgccctgtctcctggaaacactgcagcctggcaccactgggctggtgagcatgactggcacctgcagcagctgcccaccagctaatggcaggtgtgtgttctctgctcacccaaagcccttccagcagcttcattttgttgttgttgtttatttgtttttgagacagggtagtggtacaatcacagctcactgcagtcttgacctcctgggctcaagcaatcctgctatctcagcctcccaagtagctgggaccacaggttcccaccaccatgcctggttactttttaaaagaatttttgtagggatggagtctccctgtgttgcccaggctggtcttgaactcctgggctgaagcaatcctcctgccttggcctcccaaagtgctaggattacaggtgcgagccaccatgcctggctagcttcatttgctaccttcctggtgtgtgtagacatctgtgttgtcacccccattttggaaagcaaaaaggatttcttcttccttcaaacataattgagaaaatacagttgtttgggggcaagtagggtgcggggtgactctggaaccggcctcctgggaagccaggcctctgggagtgctggaggtgggcagtgaggctgccaggcccctgccttctggggtggggtgcatgctcctgatacatcagaagggtcgggggaggacttggaggtgaaggcactgcaggaagagaggaagcttactggagagacggtcaatggggcagtcaggctttaaaaggacgggcccaccaagtgaaaagatgaccaagtgtttgggctgaattgtgtcctccaaaaggatatgttgaagcctaacccccgggacctcagaaggggatcttatttggagatagggttgttgcagttgtaacgctgagatgagattatactggagtagggtgggcccttaatccagtgtgactgctgttctaagaagatgtacatgtgacaatggagggacatgtggggagaggatggccacgtgatgatgggggggacatgttgggagaggatggccacgtgacaacagggggatgtcaggagaggatggcctcgtgacaacgggggaatgccaaaagaggatggcctcgtgatgacaggggacacatggggagaggatggccttgggacgacaggacatgtggggaggggatggccacgtgatgatgggaggacatgtggggagagaatggccacataatggtggggggacacatggagagagaatggccacataatggtggggggacacgtgaggagaggatggccacatgacaattgggggacaccacgcggggagaggatgaccacataacaacgaggggacatattgggagagaattgccacgcgacgacggaggaagggactggagtgaggaagtcataagccaaggaacgccaaggacagaacaagcagcaaacacaagacacagggccaggtaaggaggtccccggctccaggtatcagaggagccctgctgatgcctggatttcagctctctggcctctggacccagaagagaatgaagttctgctgcctggggcctcccagtttgtttacagtgagtctgttcatggtggagaaacatcttctcatgatgttcctgtccaccatggtcaaggcctgttttgagctcctgcattgtataagtcagaggtaaagctgtttttctcaaggggtcaataattgacagtattggaatgggacaaggtggtcctgttgggttttgtttgtttgtttttaaaatatgaggatagaaagtcgtgtttttacttgtgcttaattttcccagtggccgggatgtgaagtccacgcctgtcatctgtaatgcaccagggcaaggggtcggttttgtttgcatagcttctcccagggtcatcttcccacccctcaagtgtggatttggccacaacactttgtttagcaatttcctgtcattttgttttatttggtcaggcttatttgcatagttgaatgaatgcacaaaggcctccttgtttcgtggttcacaaagtcagaactggatcataccagggcatacgggttctgtttcaaggctttgtaaagctgctagggttgaaataggtatttttggtgtcggaattattttattgcatttatcagtttatctactgagatggggcactgagaactgctgatttacctctctgcagccctgtctgcagtacctgaaggctgggggaagacatttggcaatgcacacagcctttgtttctgcctgtgaagttggggtttcataggccacctcccaggagggccctgtaggtgcatgacagagtccgagtgtctcaccagtgggtttgtcattgcacccaagcagatgctgggggagaggatgcctcttccttctcctcacccttcatcagtgtgtgagcagaggcaggagacctgtgggctggaaggcccacatcctccttcccaggctgtgaatgtggcacttacatggcaggaggactttgcagatgtgatcaggaccttgagaggagacattatcctggatgatctggatgagtccatcgcactcacagggtccttaaaagctggaagagggaggccaggcagggagagggaaggaaatgtgaggatggaagagggatccgattgccgcgattgctgaatttgaagaggaaggaaggagccgagagccaaggaatccaggcagcctctgggagctgcaagagacaaggaaatggattctgtcctgcagccttcggagcagatgcagacctgccgacaccttcctttcagctcagcgaaatccatttcagaattttgagtgcagagctgtaaggtcatgagtctgtgctgcttaagccactgtgtttgtagtcatttgttgcggtagtaaaggagactaatatgctattttgccaccattctgagcttttgaggcaggctgatggaaaaggtgggacagtggcttcccagtacttttctaagtgatcctgagaacctaatatcccaggcacttcatattctgtaactctccaccctgctgccagcagagtctgcttagtcctcaagacgaggggcttctgctgctctcagaggttgatgatttcattgattatctttaagttactctgcactctcccttccccagagaaaacccagtcaaattcaagtgagcattggggaaaatattcattcattaaactggttcttaacctttttgggggcaccgacctcttgagattctgttgaaaatgggattttagcccccataaaaatacatatcaaaaatttgcataaattttggccaggcacagtggctcatgcctgtaatctcagcactttggaaggccgagacgggcagatcacttgaggtcgggagttcaagaccagcctggcaacatggcgaaatgccgtccctactaaaactacaaaaaatagctgggtatggtggcgcatgcctgtaatcccagctgcttgagtggctgaggtggaagaatagcttgaacccaggaggtggaggttacagtgagctgagattgcaccattgtactccagcctgggcaacacagcgagactgtcaaaaaaaaaattgcatacaattttgagaacaattttgtatacagattcccccaggagctaccccttgaagctccaatggctgccaggggcttcctctgtcaccccaggtgaagagcccttgtacagattaattcacattaaggctgatgaatggctgttttcctagtaagtctcctcgctgtttgccaggtccttaaaccatgttcagtggatcctcattatttgtggattccatatttgtaaattcatctgctctctaaaatttgtttgtcaccccaagatcagaactcatagacaccagcagagtggcaaaaatgtgttacccgatgagccttttcccagctgaaaaggatgctctgccatcttgtttcagcctcttggtgtaaacgagtgtggttttcatgatttgtttagtgccatgttttccatgttttgtgctttttcttcgtggtttcactgtttgaaagtgctgtctagtgtttccaagtgcaagaaggcagtgatgtgccttatggggaaaatatgtgtgtttgataaactgtattcaggtttgtgttctagtgccactggttgagtgttaacgaatcaacactgtacagatgattcctgacttacgatggttccttccagtatgatttttcaacttaacaacggtgtgaaagtgatatgcattcagtagaaaccatctttcaaatacccatgggaccattctgtttttcactttctgttcaatagtctatacatttcataagatattcaacactctttcagaaagtaggctttgtatttcatgatttcgcccagctgtaggctaacatgtgttctggataggtggaaggcaagctgagacatacctctatggtgtttggtaggttaggtgtattgaatgcattgtcaacttaggatattttcaacctatcctgggtttatcaggacatgaccccattgtaagttgaggaccatctgtttattcagtaaggtgtcttttaaatagaaaaacacataaaacaaggttagtattgattgattgacaaaaatgttgcaacctgaggctttcaggaacctaactctgcatttcctttaggagtgctgcttgcttcagtatctgctggtaactctatggaacatagctactgtgaataatgggaattgggtgtattttcaagttgttggcctctccagctacgctggtaatcagtcctgctctttaaatcacatcttaccatcagtcctgcctagagaaatggaggaagggaggtctctggtcttacggtctgtcccgactctctgccccaccagctatgtcccgagaaccagcctggacagagccatctgattggtgggtggtagcaggtcatgttgtgaggccctggtgcctgccttctgtcctcctgtgctcgctagaggagcatgaggcaggagcagccagtccatgctggttcctgagcgaggcagctctagggctgccagcacccactcctggggggctgagggtaggaagagcttcagaggggaggatgggactgtctgactatatttccaatcccagttgggacttgtggtctgatgaggacaagtgcctttgagggggatggggatggttgagaggaaccaggaaatcaaatgtgtcctggaaaacatggcatggtggatcttttgagttggggtgttgggatgtgtgtcagctaaaacaaggttcacctgcttcaaatgttcatccaagctttctacacttgcctctctgagtcaacatctttagagacagcaggaagtgatgaaagtcagttcacagtccatctgctctgagggcttggtatgaggggctgatgttttctgtcattttctcctttctaacatttcactttgggatcttagttcctggttgaaattccttaactgtgggagtcgaggcagcctaagaatccttttcggctgcttaagacaatgaggtagagagggaaccagctgccccttttcttacctccatgatgatgtagaaatggttccatccagcccaagggttcttctggggcccaaagctccttaagggctctgtgcataggatttgaggattagttttcttgggtggggagaaaagtccatctttatttgtataaatcctacctgaaatgcagcatttcctctaattaggaaggcaggcaacaaaaccagtatgttagctatgtctgtgactctgtcaccaatgtgggttagccgtatctctgaccctgtcaccaattgcaattacagatgtctccacatcacattagtgttgtttcagatatcttgaagtagcatttgttcccattactagttttaaattaaggtggttaatagaccccactggattttgcgatttaatatgctgataaggcacatatattgctatactataacattttttaaaaattttgataactagatttcaataagattggtatttgtgatcatatttattttcttgatttttataacagctttattgagatataatttctgtaccatacaactcattaaagtgtacaactccatgtttctaaaatatattttcaggattgtacaaccatcaccaccaccatcaccataatctaattttagaatatttttgtcccccttaaaagaagcttcgtactcattagcaattatctacattccccctttccccactctcagcccctggcaaccacaacatctactttctgtctctagaaatgtgcctgttctggacgtttcatagaaatggaatcttgtttttgagacagagtctcactctgtcacccaggctggagtgcagtggcgtaatttcggctcactgcaacctccacctcctgggttcaagccatccccctgcctcagcctcccgagtagctgggattacaggcgtgtgccaccacgcccagctaatttttgtatttttagtagagatagggttccgccacgttgcccaggctggtctcgaacttctgacctcaggtgatccgcctgccttcgcctcccaaagtgctggggttacaggttacaaagtaagccactgtgcccggccaaaatggaatctttctgaggtcttttgtgactggcttttttcatgtagcataatgttttcaaggttcatctatctttgtattttgttctgtgcacttaaaacattattctgagaaggggtctaaaggcctgccccgtcgtcaccagaagggcctgtggcatcattggagaggttagggctctccctaaccattagggctccctgcgcctaatggttcttccctctgtcagttttgcattaaaactagtacatgccttggcttgagcatggacaatcactgccaaagacccggcaggcaaggcacgcagctttccttgggatgggttggacccaggccctgggcactcagaggtactcaggcacctctgcccagtctccccaagttaccacctccacaggtgccttggagtgagtgggcatctccaggatgtagcctctagtggatgatacccgtggacagggacagcaaggtagagtaatagggccaggccccaggtgcctgcccccagctggacgccagaaccccaggaccccagctcctccagcccccaggaagctgtcagcacttccagagagcaagctgttggtgggaaggtctgaatccttgcagctctgtgattcgcgaatcataaaacctccacacttggtgtttgtgggccgagctattgtctttgtgttttctttttggagtgggtgggaagccagcttggcaagccgggtgtgaatgaacaggaatgagcaggagacgctcgctgatgccttctgtgatgtgtttcttccccagctccagaagaaaaggaagtcattaaaggacagtatggcaagctcacggacgcgtacggctgcctgggggagctgaggctgaaatctggtgagtagccgctcgctggaggagcaggcgccaggctccccggtgggcaggagcctctgtgtcggaaggggcctcagtgcaggcattctgtttgaccgctcttctctctctcttcttttttttttttttttttttttctccgagatagagttttgctcttgttgcccaggctgcagtgcaatggcgcgatctcggctcaccacaacctctgcctcctgggttcaagcaattctcctgcctcagcctcctgaatagctgggactacaggcatgcgccaccatgcccaactaattttttgtatttttagtagagacggggtttttccatgttggtcaggctggtctgaaactccgacctcaggtggtccacctgcctcagcctcccaaagtgctgggattacagccatgagccgccgtgcctggccgacctctcttctcttttaagatgtttctttatgcctcgggacctgctcctcctgcaggaacctgcaggtggggaggtcaaggtgagtgttgcctggttgtcacctgcctgtgctggggagcagggtggggttcccggcacccccaccctgtgccagagaagctcgtcttcattgcttgccggcgagggcctaagtgtttcgaaagtctggtctggggcttctgcccagggcattgtccgcagtactctagaagatgtgccaaggcgggtgggtgaagacagggaccagggcagatgcccgggggcacaggggtgggctgggagttgtcagcaggagaaaaaagccaccgatgtgtgactgtcagtcagtgtggggtgggagggagaggaagggacagtgtgatctgacttgcgaagggagagaacttccaggaagacgtgggcatctctgctcactctgagagactcgggggtgagccggtggtggccggctgtcgtgggtggtcacagccaaactcagctgttcctggagctcaggagccctggggctttaggttctaccacctgtttccttccttctctctcaggggcccccttgccatctgtgacctggctgtggacatctcttgtgacttctggggccgagacaagagcccagtcgcattcctgattctcagtcccacctggctgagatgggaatggctgtatgggttgtctgaattcgggctttccctgagccaagcgcacacctcccttccctgctcacagcagctgttttcagagactgaggatgtttaaagctgccagaaaagcacggttacgttggccattccttttctgggtgttttctgtcatggaatgtttttccctgaactgtgacgattacagtgatcatttccaaatagcatttaggaaaaatacacagtacccacatgacaaagtgcatttatgaaatgtctgtttcgtgccaagagctagccgtacattcacttatttaatcctaaaaataggctaccgtgataatgcatctttgtccccgtttacagtaacgggaacaggctcagaagcttcaagtaacttgccttaggtcagaaacttagttggggtttgaagcgcctccaaacgcttgctttttctgtggaaatgtgcgggctgccgagggttttctgcaggactttccgctctgcagcgatcttcctgaagttgcaggaaatccctgtggcccttgccttccatggtgatgaccgtgaggatggtggcctgcacctgcatgggactcacttaggaacttgttaacacggctcccgaggccacctgtgctgttgtcaccctgccttgcaggtgtggcagggatgccgcgttccatccatgctgatgcccttttttccacatggtagtatctgggcccccaggatgcctcacagtcttggcttccttcagttatagttggcagctgcttttggtccttacatgaatgactcattttgcatccgacagggactgggattcgacgaattacagtaaccggctcaaggtcacgccattctcaagtggtgccctgggttttaaactcatgccttgcggcaccagggactgccttcaaccaccaggctgttctcctttctgaaagggacaggtggctgggctcacaagggggacaggaagtgcagtaccttcccccatcccaggggaaaagtgttttttcccagggctgtgatctaagatcagctgtgggaaattggtcctaaccaggaagggtggcagccccaaagatgtcttattagagcgagccagggtgtctgcgggggtcagcagggtctaatggggcagggagtgctcagagaggagaccacctcccagggctgccctaggcgaggcctcctccctgccttcagccagtccccgccaccccacaccccacagaagggaatgaggcttcttgtggaccatgcgagaccagccctgctccgaggctttgggtgcccccaacccctgcccacctgtgagagtcaccccccggagtgggttggagtttctctgagtgtggtgtgtatgagtttgactttggcgatgtcaggataatttggtctgttttcaacacattctggaaagcaccctgagcatctgaaggatggaaggattgggctttaaatcaagttttttcagtccccattggttatcttaaggggcgtttgactttaacttgattttctttttcccctgtaagtccctgacccagaactgtgatctattttcttttgtgttttcagctgttgagcatgttgggcagcacggagtgtagctacaactgtgtgaccccacctgtgtgactgactccacctgtgtgactccagtcgtgtgaccaactacaactgtgtaactgactccaattgtgtgactaactccacctgtgtgactctgcgtgactccaactgtgactccatctgtatgactccaattgtgtgacccccacctgtgtgactctgactgtgtgacccccacctgcgtgactctgactgtgtgacccccacctgcgtgactctgactgtgtgacccccacctgcgtgactccgactgtgtgacccccacctgtgtgactccaactgtggactgactctaactatgtgactgactccaactgtgtgactaactccacctgtatgactccaactatatgattgacttcaaccgtgtgaccccacctgtgtgactccaattgtatgactgactctaactgtgtgactccaactgtgactccatctgtatgactgacctcaactgtgtgaccccacctgtgtgactccaactgtgtactgactctgtgtgactgactccacctgtatgactccaactatatgactgacttcaaccgtgtgaccccacctgtgtgactccagttgtgtgactgatttcactgcgtggctaactccactgttgcctgactccagctgcgtgacttcagctgtgtgactccatgtatgtgaccctagctgtgtgactccaactttcagttgccacgaagacaaccagctgagtcaggagtgggcctccctttcaatgtttttagctaagcatctctgcgcaaagaaagaggcttccccacaggctcttaatttgggacaagttttcccttagtttgggaaaaatttcaatctacctaaattagccttttacattagaaatcgagaaatatgcacaaaaattcataaaagcctttttccaggttccaaggtttttgtagaaagcccaaagttcccctttccttcctgaaatgccagcaggaaggggttggagctcccgtgattagccagggagtcaggcttcctgaagtttacacaatacaaagcatattaagtgagaatgtagcagaaaaaagaacttatcccaatgattatagcaatttaaattctcttgaacccaagctctcaaggcctacctgttttatagcctcaagggactctactcctatcccagactataatgaattgtgtctcctggagttgtgcagtacgcaacctgtgaagctgtacacgacagccctataaattctctagcagacagccctcctagattctagttcccacttcacagctgaactgcatttaatctctgtaggactgttttcctgtctgtaaacctgggaaaactgcctcatctctatgttgcctagttctcaggaggtccacatgggccatgcacatggtagccatgaagagtgtggagtgctcctccaacaccaggcgggctggccacaggcagtttcttagagtgtggcctggggacgctgccaccactgagaagctctgctgtctctcctctgtccctgggagggctggagggaggagggtgctgagtgagagggacctggcctgcagagggctgaggacgaggtgtgagctggaaggccaggctgtgtggcctcggggtgtggactcctggtggggggctcctctgcacaggctagcagagggctggtttcatgggcagtcacttcagaaggaggattccctggaggggagtttgaacccttagtcttttgggatgcagtgttctctagcaagtcttgaagcgaactggcctttgtcggtcttagattaatttaattcctgtgcccagtggtgggatattaccaagagagttgacacccagctccctgagggggaagctctgagatgatgcagcatttgccagtttccaaggtgtaaattcacgggccagggctgatttcaggttcccagcgtggagctgaggaaggatctgcaccaggggtgctcactgcgggtgttcactgctgtggccgccgctgcctacacctccctcatgttctgcagaagggaggcgggagaaggccctgagaccatgccgcatgggcacacagtgcttagggttctgaacctgcgggtggcgggggaggctcaagggtcatctggccgaagcttcccccttcacaggtgggaaagcctagacatctttagtcctttgtttggagctttaagtctgagggtgtctgtgtgagcagagggacagataggatggctggagggaccccagggttgggattggcacagaccaggctgggaaggtgaactcagagctgagacaacacaaggaaatgccagcccagagccttgtgggaggcctggggtggtcccggtaaacggggccttgggtctgcaagccacgtatcatgactccaacagccagctttcctggcctgataacaaattgcctaggacctgccactggctcttgcctccctccacctcactctggcagctccctctgacccatgcatggctttgctttggccagagccctggaaccaaagccctttacctggaggggacattgagactattggcgcatcctcctgggaggcccagagagggtaagagccttgcctgaggccacacaggccactggaggtgtgcagagcctggagccccactcttctgagttttgtttttccacttgctatgagatccttgatggtttcagggccctggtctctccctcagctgaggactgccaagaaccccgcaagcctagttagcttcttggctgtcagagaattgatcctgcctcacaaaagcaaatcctgtgctctaggtgagcatcgggaggggcctcacacacctggggcaggtggggaccagtggcttgtaccacactgacggtggcccgggagtcagcgaccccccacagcctggtgctaggctcaagccaggacactttccttaaaacccatagtacaggccaggcatggtggctcatacctgtaatcctagcacctcagggggccgaggcaggaggatcacttgagcctagaagttcaagaccagcctgggctatgtagcaagactatgtctctacatagtgatggtatctacagcaccatgccaggagcggtggtgcacgcctgtagtcccagctacttgggaggctgacatgggaggatcgctggaacccagaaaggggaagttgcagtgtactgagatcaagtcactgcactccagcctgggtgacagtgcaagaacctgtctctaaatttaaaaaaaaaaaaaaaagcaaacaaacaaaaaacccatggtatacagagaacacagtcaggcagtcaggctgtcaatgagattaggcaggacacagtgaggctgggattgaaggaggaggaagccatcagtgctgggtcaggtaggcagggcggggccttcccggagaggcagcgctccacacagcggtcctgaggtttgggtaaggctcttccacagaggcctctgtggttacacccgtcccaccaactgtctgggacacacaggcaggggcagttctaaggaaaagtgtccaggtccttggcttttttctatcatggagcacctgtgatggaggacagggttcttattcccctctgaggtctccctgcttccatgttagggtagagggtaggcccttctctcttctggaagctcaccgtgtgccgtgctccaggaagtaactccccctaggattccagacaaagggacagttcaaaagcttgtcaacagcattgcaataaggtcaggactaggtagcaatctgtttgcaagtcaggtgatgtccaattgtttgcttcccccataacggaaggagaatttaattggggtatcagctgacacattagtaaccattttatcagcaggttattgtcatttcttagcgctaactcagaaggactttgaagaatcgagtgacatttctacaatgaagccctttccattcccatctatttattaatgtgaacaggatcttttagtgtttgcgtctacaaaaatgaaaactagaattagaattggtgcagaacctactttcattccttcaataaatatttattcatctcattaagagatgcctttccaacacattatgactttttgtatcaaatgattatttgtcggccaggcacggtggctcatgcctgtaatcccagcactttgggaggccaaggtgggcggaccactagaggtcaggagttctagaccagcccagtcaacatggtgaaaccccatctctactaaaaatacaaaaattagctgggcatgggggctcatgcctgtaatcccggctactcaagaggctgaggcagtaaacctgaaaggcgaaagttgaacccgggagacagaggttgcagtgagcccagattgcgccactgcactctagcctgggcgacagagcaagactgtcacctcccagagaccccacctcctaaaaccatcgccttgggtgttcatacttcagcatattaatttgggggtgcacacattcagccaatagcaggtacactggttgaccacactcttaaagaggacagccaaaaaaaattatttggcagtgttttatttacattgtattgtttacattgtttgaccagttaggtatcactggaacgataaaccagaacgctctctttttaaacacttggagttgaggaacacacggctgcaggggctgatggggtgatcagaacaggacgtagaagcaccagatatgctacattaggatggaattctgaagaggggggactggaaatatgagtgaaagttccatgtggtaagaaagagcatgctcctgcaatcctgtaaataatagatggcaatgagtatcacgttactgtgtagattccatgggatactgacaagaggctcccagagttttagttttacgtgtcaatatttagaatacactgcacaatatattatttacaggcatttcaactaccgatgaaaaccttcaatggcagttttaaaatgggcagggaacgctgtctgagtccagtgtgttgctgtgacaaagttccgtagtagacggggtggcttatcagcaacagacatttatttcgcgcagttctggaggctggaagtccgagaccagcggcccgcagattggccggctgtgaggacctgcttcttgctccatagatgctgccttttctctgcatctgacatggtgggagaggtgcaggagatctctgggcacaaaccccattcatgagggctccactgccataacccagtcacctcccaaatacccccaccacctcaaaccatcaccttgggtgttcgtacttcagcatattaacttgggggtgcacacattcagtcaatagcaggtacactggttgaccacactcttttaaagggtacagcaggccaggtgcagtggttcacacctgtaatcccagcactttgggaggctgaggcaggtgaatcacctgaggtcaggagttcgagaccagcctggccaacatggtaacaccccatctctaccaaaaatacaaaaaattagccggtataatcccagcaactcgggaggctgaggcaagagaattacttgaacccaggaggcggaggtagcagtgagctgagattgcaccactccactccagcctgggcaacaagagtgaaactccatctcaaaaaaaaatagccgggcgtggtggctcacgcctgtaatcccagcactttgggaggccgaagcaggcagatcacctgaggtcgggagtttgagaccagcctgacctacatggagaaatcccatctctactaaaaatataaaattagctgggcgtggtgacgcatgcttgtaatctcagttactccagagggtgaggcaggagaatcactagaacctgggaggcagaggttgcggtgagccgagatcacaccattgcactccagcttgggcaacaagagtaaaactctgtctcaaaaaataaataaataaataatacatgcatacatacatacatacgtacatacatacatacatacagggtacagcaaactaatccgattggaaactgccggactttggggctagatggagcatgggcttaaagtgaaacctacattttggctccaacacagactagctgtgtgcttgggcgggtgattcagcttccctgggggacagtcatgcgtgtgtgaaatggcagtggtagccctgagacagcagcatgggtaagcaggctggcgacgtcatctgcaaggaggtgtaattaggagcaccagctctggggccagacttggcttgagaaacttgcccaggcactgtagctagaaagtggatttggatcccagctccccgctctgtcaccttgggcaggctgcttaacctctctgtgcgtctgtttccctccctgtgagatggggctggtaagggcgccccttgcggtgggcgggaggatggagtccgcgcctgtacagctcccctgcctccactgcgctcaccagataccggctctcctcactcccctgtaccactcccgaccccctcctccctggacccaggagccccagtgctctgtggcaatgttaagagcctctcctggctgctacagtgctcctctccccagcctcccccaggccgtggtcctgcccaggaaatgcacctgggactgttgccaggcactcaggccccccacacggaggctgttgaggaagtggtgctagaaatcagctcatgactctcacggagtgatgtcatgcaaaattttccatagctctggcagccacaggggccatcctcctgcctctccgagggcacttctgctgaactgtgcttttccctgcactgtgtcagaagaggcaggtgggtgccgggagcgctctgtggccaaggctctgatcacaagctgccaaccccggaaccccacctatcctacttgagaagctgaactctgacccctgtccctgtccccagtgtgataacttcctttgttcttaggtggttttgaggtggtttcctgaggatgtgtctggggagatgtgatgggatcaaccccctgccctgctggcagccccaccccatggcatagcagcaggcccctgggagccctgagcgctcattaaaggaacgcactttaatgacagccacacgccaccctgccacaagcagcgctcttctccctatgaagtgtggtgaggaaattggggtgagagggtggtggaactggttgttttgggggtctcttcctggagtgtggagagatcagaaccatctccagaccatggctgtagacagcggcccttgatcattcacagaagatctcgctgggcggatccttcagacctcagcggggtgggaagagtgtccttgggactagagccctgccagaccccaaaggccggtttctacccgatgatctcttgggccccgtcccgagagtgaggcacggcgccaccaggcacccccgatacgcagcgtgttgtgaagtgcccttgtgagcagcgggggatagggaacagaaaaccagctgtcagcgacagcgaggtggtgccccagagagggctgcctcattcgcctggctgcagggtccgaggtcgtcttggtagcatttggcaggaatttatttaggaagcattcagcaaaccgagtgtgtgtggtgctgggagatgacgacgaaatggccctgcccccaaggaagcccctcccctgggggcacaggtggggagggaggtcatgagctttgtgtgtgtgacaactgctgatgggaatgctattggcacgtacgaggggtgcctgtccgtgtcttgggagagcaaggaaggcttcccggaggagttgctgccaagttggcccagaaggatgaggaggagttcttctggtgaagtggggagggcagaggcaggatggtccctacggagcatgtggggacgctcgtgttcttccagaggatggaatgctgggcccgaagcctgaagtattgttagggtagagacaggcgggaggtgcgtggagaaggggtcatggaggtcttgttgggcagatggcggtgggacgtcccaggcagggggagcatcttgggcaagagcccagggtgcgaggtcatgcttatggcacattggaccagctggaggacagccagctcaggagagcagccggctggggtgtctgcccacgtgtggggcagggatgggctgcagcggggagggatttgggagcttctgtcgtagtcctgcagggagtgggagctgtgcaagaaggaagggcggagcggctgtgatccaatgactttgggaaggccactcctgtgatggagtgggggaagacagaccccaggccaggggtcctgagtcaaggcagtggctgaggaggcactggggaaggtgatttggagaggctttgggggtaggtcctgggggtctggaagggctctaggccaggaattttcagactcctgggggcatcagaatcacctggagggcttgttaaagcaaagcttgcccccagcctcaggcagctgggcggcaggaatctgcatgtctaacaggctcccaggggatgctgacttgctggccagggtcccacactttgagaagccccgcctgaagcttacaggacagggcaggttcttgagccattgagttgggcaatgccatgggaagttgcaggtgcacagacgttgccttcctggctgcggttgaacctgggctccatttgtccccttggagctccaggcggccgggccgacttcgaccctgagctctcctgtctgatttcctttccaggtggcacgtctctgagcttcctggtgttggtgacaggctgcacatctgtgggcagaattccagatgctgaaatctacaaaatcactgccactgacttttaccctcttcaggaagaggccaaggaggaggaacgcctcatagctttgaagaaaatcctcagctcgggggtgttctatttctcatggccaaacgatgggtctcgctttgacctgactgtccgcacgcagaagcagggggatgacagctctgaatgggggaactccttcttctggtgaggccctgggtcccctgcagagggtgggccctgggtctcctgcagagggtgggccctggttggcatctgaggccttgacctccacttgcaccacccccgggttatggggcacctctggagagttaggacccaggcctgctctcagcacaatgagaggaaaactaaccctgaactccctgccaccccccacccctggcccctggaatgtgttcagtgtagatttggaaaagaaacctgcgccaggcatggtgcctcatgcctgtaatcccagcactttgggaggctgaggcaggtggatcacttgagttaaggagtttgagacaagcctggccaacatggtgaaagcccatctctactaaaaatacaaaaaaaaaaaaaaaaaaaaattagctgggcgtggtggcaggtgcctgtaatcccagctactcgggaggctgaggcaggagaatcgcttaaacccaggaaacggaggttgctgtgagccaagatggtgctactacactccaccctgggtgacagagcaagactctgtctcaaagaaaaagaaagaaagaaaagaaaccctgttccataagtaaaaaacataagagccgacgtctgctgagtgcttcctcagtcccgggtgccgagctcagtgcttctgcctggattcactctttcagtcttctcaatcatggttacctccagtgtgcagccgtttaccgctgatgtttataaagcactgtgttcgggtcaccgtgctaagatctctctgctggtaataactcatcattattataaaaacctttataataattatgcggaggctctgttaccccattttacaggtagagagactgaggcacgaatagtcgagggaattttgccaaactccacacacttactaagtggcagagccaggatttgaacccaggctttctgggtccaggtcccaagctggtaatcacagtgctaaaccagtcccatcaatggggaagctgagtcaccctgcccaaagggacttgtagcaatgcactaagactagtcccggagcccaggcagaggcggctggatttctgtatgtttaagatctcctggtgctttttcactccacagcaggacagagacaagagtggacaaccctgtaaatacataaattatctattgccctttctggacataatgctgtttctgtcagattcgcactgatgcctagagatgccaggtagaagcaaaagtgaggaaagtcctgccatgggagtcgttccaatgaacctcatctaatgtaatgttttagaatccagtgtctgccttttgaagctatatcagttttcccagctctgagacgggactcgtgaggtttatttctgacctgtttgtgcctctctccctttgccagaggcagccacaggttttcatctggccttggtgctttggattccccagaagtgaattcctgatttctgccggaagaaggggaccctccccacatccctgtgtccatcccaacgctccccacccccacatcctctttggttctctggtattgtggatatttgggggcagtaatgtgcccagacttcaaaatgcacgtgaatcaaggctgggcatggtagctcacgcctgcaatcccagcactttgggaggccaaggcaggcggatcacctgaggtcagcagtttgagaccagcctggccaacatggtgaaaccctgtctctactaaagatacaaagaaaattagccaggtgtggtggcgcacacctgtaatcccagctacatgggaggctgaggcagaagaatcgtttgaacccaggaggctgagattgcagtgagccgagatcgcaccattgcactccagcctgggctacagggtgagactctgtctcaaaataaataaataaaataaaataaataaaatcgtgaatctcatgctgatctcattaaaaatgcagattctgggatggcaggtctgggctgggcccaggattctgcatttctaataagctgccagtgctgcttgtctgcagacggcaggttgagtagcagcctctggggatggcatttctgtgaatcgctggttacattttgcagggcccagcatgtgccccgcgagctgttacatgttcccctaaaggcagccaagcttaagcacagaggggctgtgtattatgaggtatctttgtgtggagtccgtgaaactattttaaaccagaactgtcaggggagcagaggtgagagctctcagcggcagtgagggtccttggaacccctaggggatccttggggtatctgaattgcaccagcacctttgcaagttctcttccctatgccagctctgtggctggaggtgtgaggggcactaacaaagcgaggcaaaggggattcacgaggtggaggctgagaggagctttggaaggaggagccccatggtgtccctttctgaagggagaggaggaagtaactctggaggtcgccaggctcctcagctgtaacacgccagggcgtggtgtttaggctcagggtggagcccccagaactgaccacaactgagtcaccacgggcagtgtggttctgggcttgatcgcctgaacccccactgttgtggcgcagcgtgaggtctggagacccacagcaggagtcagatggggtcaacgctcagcgtggctggcacataaggcagagtgagcagcagggtgaagtcatctttctgggctggtaattgatcacactgacaattgcctcccagtacaatcaggtcctgggaggaaactctttgggggtcctggatatgagtcatcctcctgccagagggccaggcagtgtcactagaaacagggctgatttaagggttgtccacttggcaaaaggtttcttctcctgagccctggtgatagtggccatagctgtgtagctggcagactctgaaatattctggaggctttgccttgatgccacatgcagatttcatatatgtgtttcggaagctggcttatcatctgaatttgagagagtgatttggaagagggacatgtgtttttgtacagcaatgcttcagcagcatttttcaagcagaggagcgctgtggctgtgcgacctcagatggggtcagacgcgggctgtgctccctgtgggggtgcatgtgactgtgcgacctcagacggggtcagacgcgggctgtgctccctgtgggggtgcatgtggctttggtcacagtcggggaggctggcctgagagcaggaagcttggagaagccccctgggacccatcagagctcacagcacagatttccagcaatgagaaaatgctgctgctgtctttgaggaaggctcaagggcaggaattgtgttgccttttttaaacaagtagggcactgtgatctagattcactcagtgccctgtaagagggcatctcctgatgatgggtcctcctccctgagagtgagtatgggccctcaggatggtaccactcaggtcccctgggtgctaaagcaagggggccaggccagctcagggatgagagaactacgtggtcgttcgcaggtgcacatggaaacgtagggcctcatgaagaaaggctcggcgtgaagagcgcgggctccaagctccatgacgccactggctggctctgtggcattagacaagcacttcacttctctgtgcctcagctgctttatctgtgaaagggggtcactgatgatacctttcacatagggtcacttcaagggtgaaatgagttaatccaccccaaagtacttagaatggggcttagtgcacaggataaatgttggctgtcaccctgtcgttatcatcatggactctagagcctacagcaatccactaggcatggagagggaatacttgaactttcattacattttattttcctcggatctttttaaaatttattttggattgctttgtagcgctctcgtcataatcatctcatggtgcatgtgtgtgtatatgtggataatttaaataactgttcccatatttaatatgatttttaatcacttattgatcatgattgtttaataataaaagatgattaattttttaccaatggggcctgcgatgaaaactgtggggcccacagggctaaccagaggcccctttgcgattccccgaaaagtgcacgctggctcactctccagctttgcttccatttagcgacagtgacgacctggtagtggctttgggaaaggactccctggccatcctcctctacgtgacacagtggtcctgctatttgggatctctttgaagcacatgaacttcccagatctgtacagcccaagtgcagagtccactggggagcagcatgcattcgctgacccgaaatgctgcaccgtgcgccccccagttcctcagccacactcgctgtccaggcagcatgtattggaggatgtcaagtgactggaattggtgtgggactgtgttttgcaggaaccagctgttgcacgtgcccttgaggcagcaccaggtgagctgctgtgactggctgctgaagatcatctgcggggtggtcaccatccgcaccgtgtatgcctcccacaagcaggccaaggcctgcctcgtctctcgcgttagctgtgagcgcacaggcactcgcttccacacccgtggcgtgaacgacgacggccatgtgtccaacttcgtggagacagagcaggtgagtgcccaggcccatctgtggcaccaaatggttccgagtggctgcagctcttgcacacgcgctttccacttggggcagaagaggccctggcatatttgtggtggtctctgatcaggcttcctcctataagtggagaacagcacgtgtaattgggctccacatgaaaatgtgacctctggtttgcatggtgtatcctttctgattcacatctcatgcagggaaaatgctgcttagccgaggtatttttaactaaacggaatcaggaatttttgccttggtcgtgaaaggtgggcagtattccaagggcagctgacagatgaacaaatagggtttgaaaatccttttaggacaaaaataagtagatcaatacaatggggggatgaaagaagaaaccattattttttattctaaatcaactgaagcttctcctggaagccagtattagcaccctagagttgtgaaatctgcgtgttaagcagccgctcccatccgttcccctagaatatagccatctgcttaatttctcctggagttttttctaaattctgttctcatttccagagatgctgtcttacaacttttaaatttttgctctaacttgcaatctgtaagataaggccaccatgtggaatacagtggtgtaagccataagaaaggaaaaccccggaaggcacatgtatggtactcctgccagggcaagctgggtgccctgtgtttactgagtgaaggcgtggctgtgcgtcccccctcgctgccgctgctgggagaggaatgccttatgcggactttggccactttaatccagcagaggtttgagcacctacctttactgtgtgggactttctgcctgctccagtgttcagagggtagatacagagatgaggaggctgctctcagagtccccactcagaggaacatcagagcagggggccctaagatgggcaacagctgcaattacttgcctgtaattctgctcagaatgtctgcactgtggatatcaacgaggctattatgtaaatatctggttaaaaatgagattgcttttggcatcttcgtcatgaagtctttgactgttcctatgtctagaatggtattgcctaggttgtcttccagggtttttatagttttgcgttttacattcaagtctttaacccatcttgagttgatttttgtatatggtgtaaggaaggggtccagtttcagtcttctgcatatggctagccagttatcccagcaccgtttattgaatagagaatccttttcccattgcttgtttttgtcaggttggtcaaagatcacatggttgtaggtgtacggccttatttctgggttgtctattctgtttcattggtctacgtatctgtttttgtaccagtgccatgctgctttggttactatagccctgtagtatagtttgaattcaggtagtgtgatgcctccagctttgttctttttgcttaggattgccttggctattcgggctcttttttggttccatatgaattttaaaatagttttttctagttctatgaagaatgtcaatggtagtttaataggaatagctttgaatccataaattgctttgggcattatgtccattttaatgatattgattcttcttatccatgaggatggaatgtttttccatttgtgtcatctccaatttctttgagcagtgttttgtaattctcattgtagagatctttcacctccctcataaactgtattgctaggtattttattcttctcacagcagttgtgaatgggattgtgttcctgatttggctctctgcttgactgttgttggtgtattgattttgtattctgagactttgccgaagctgtttatcaggttaaggagattttgggctgagactgtggtgttttctagatatagaatcatgttgattgcaaacagggatagtttgattcctctcttcctattgggatgccctttatttctttctcttgcctgattgccctggtcaaaacttctaatactattaatatgttaaataggagtgatgagagagggcatccttgtcctgtgctggttttcagcttttgcccattcagtatggtgttggctgtgggtttgtcataaatggctcttattagtttgaggattgtggatctaaccaaactaaagagcttctgcacagctgaagaaactatcaacagagtgaacagacaacctacagaatgggagaaaatttttgcaaactatgcatctgacaaaggtctaacacccagcatctataaggaacttaaacaaatttccaagaaaaaaaaaaaaaacattaaaaactgggcaaaggacataaacagacacttttcaaaagaaggcatacatgcggccagcaatcatggaaaaaagcttaacatcactgatcattagagaaatgagaatcaaagccacaatgagctaccccctcacacaagtcaaatggctattatttgacttgcgtgaatattatttgacttgtgtgaaatgagatacctcctcacacaataatggctattgttaaaaagtcgaaaaataacagatgctggcaagattgcagagaaaaaggaacgctcatacgctgttggtgggagtgtaaattagttccaccattgtggagaacaatgtggtgattcctcagagacctactcacaatagcaaagacatggaatcaacctgaatgtccatcagtggtagactggataaagaaaatgtggtttgtatacagcatggaatagtatgcagtcatgaaaaggaatgagatcgtgtcctttccagcaacacggatgcagctggaggccattaccctaagcagactaaggcaggagcagaaaaccaaacactgcatgttcttacttacaagtgggagctaaatgatgagaacacatggatacaaagaggggaacaacacacactggggcctatcagagggtggaggatggagggtaggaggagggagaggatcaggaaaaataactagtgggtgctgctaggcttaatactgggtgacaaaataacctgtacaacaaacccacataacatgcgtttacctatgtaacaaacctgcacaagtacccctgaacttaaaataaaagttaaattttgaaaaattttaaaaaggggacagagagagaagctgtggccccagctgggtggttttctcttttctggctgatgtctgcatggggagagtcccttccctgccccacttcattaccacttgccttttattttgaacttttatttaaaatactggttttggatttcaaccagaattttaagacttggggtctcatctattgcatctcatcgagtaagtccctgggaaccactgtcctttagcggcactgtccttcctaaaacaccggacattctaacacggaaaatgaaagcaaaccgcatgcatttcctaggactgcccataataaagtaccccaaactgggtggccgaaaacaacacacttattctctcccagttctggagactggaagtctgcaatccaggtgtcggcaggactgctgtctcttcgaagtccccctggggagaacccttctgagcccacctgaccgccccggctcttggtggcctctggcaagcatctctccatcatctctgcctccgttttcgtgtggccttctctgcctgtgtctctccaggactccagtcgtactggatcagggacccaccctactccagttgtcctcatctttttttttttttttttttttttggagacggagtctcgctctgtcacccaggctggagttcagtggcacaatctcggctcactgcaagctctgcctcccgggttcacaccattctcctgcctcagcctcctgagtagctgggactacaggcgcccgccaccacgcccggctaattttttgtatttttagtagagacagggtttcaccgtgttagccaggatggtctcgatctcctgacctcgtgatctgcccgcctcggcctcccaaagtgctgagattacaggtgtgagccactgagcccggcccagttgtcctcatcttaacccattacttctgcaaagaccctatttccaaacaagttctaaagtactgggagttggtacttcaccatatggtttttggaagggacacagctcaccctgggccgcggatgctggctcctgttagaggactgtgctttacaggcagcgcctgtggccctgtgagaactctcgctgcaatctttgctttctcacttttacagaccaacaagccctaccacagaccaggctgggccttggctctggccacttcgtgtcgcgtgcctgctgactggcgcttgtctcctgtgttgccagcctgcttgttagagctcagaggcagggaccttgcccccacatctcctgaatctcccacctcgggcagcctggcaaggccatagagatatgaacagcctgcccttccagctcctggggtacagcccgatgctgttgacattgcctccacctcccttccttgtctgggctggggagggatttcttggctcccataagcctttgtgggcttcctagtgtgtgtgttttgtcctttttcgtcctctgggctctgggctagacagggctgctctccatgaagtccccacccaaccttactcccaggagcagcagtgattgacagacagctgggcaccaccacctgccgctcacccacagatgcagccgctgcggatgctgcccccgccccacctagagagcataacttaacccatggtgacttcgttaacaagagatgcgtagcggggccccaggaaggtggccctacacccacggtagctcttggttgggtgcctatgtttcaggctgtgctgatgagcctggaggtgcctgggctggcccatccatcggagaccccggacagcctggctacccaggaaggggagctgtcacttcccagcgctgagtccagggctgtccacgtgggccttcagcaaagcctgactgagcctgccaggtcccaggctctgctcccaggtgggtgggcatggggggcagtggtggtgtgatgggggcgcagcaggagtggggcaggtgaagctggtcctgccaggtgctgccgcccttccaggtggtacttccgataggtggtgttcggctggtgacccctgcctggaggtcgaggggaagcacagcagagccagggcagggagaagcgtgtgctgcgcgcagcccaggaaggaggggcatggagcagaaagaaacacaggtgaactggaagagcagagagggttcatgcttcctgcacacatgggaccagggcatgggcctggtggggggtcagcattcctccaagccaaaaaacacaggtgtgacagccctttttctaaaacattacagaggcagcaggagcagagatggctgcagggaagtgactgttccccaaaagcaagaaactcctgttgcctcacttgtataagccaagggaacccctcgctttctgtctctggagtcactgaatatttttgtttatgtcactttatagcagtactgatgcttaggttgatctaagttcgtttttaaaacacaaaacacgtctttaagtggaatgcacagttagtatgctcctgcgaagcggcagccccgctgccctccctggctctgcggccacctgctgaggatggttcttctaggatgagtcaggagagtggagcaaggctcagcctgcaggtccttgctgagctcagggaagcagccccgtgaggatcgggctgcgtggtctgcaggggaacctgcctgggaccctgtgagatttacctgtttcaggtgccagtgatctgctgggattctggagaggtccctcaggggagcctggcacttcctacccccttgagtttgcaaagtcacaactgagggcctgggttgggacggtgtcatgagctctccataagctttgcttatggtacaggagcagactgtctggcgcttctggagacctttaacgtgctcctgtagacagtcgggtaaactcattctggtagcacagcgtggcctccccctccacctgacatctgaggaagtggcaggctctgcatctcggtggcctcgccccagggtgcagggagcaactttgaggaaattagtgctgagcctccagtaggaaggaggactgtgctggggaggcaggtgagccccttgtggtgccgcccgcaggtcacactggcctggggcccctgcagaggaaacaggatccaccagccaggcccgctgaccatttggaagtggagcgtgcacacaggcggctgtgcggtcatcgtctggcaaacaaatgatgggaccggaccaggagcagactggctccctgtggtggggactcttggcaggcggatcggcttcttaggaattaattctcaggaagccagaaaagggggaccctgtggcaccctctgcttttgctttggtttaacatgtttcctaggaggaataattaatcttctttctctgaggcaggctgtgtgtgtgtgtgcatgggttgtatgtgtacagtgtgtgcgtggtatgtgcatttatgtgttgtacatgtgtgtatgtgtcatgtgcattgtgcatttgtgtatacatgtgtgtggtgtgtgccttgtgtttgtttttcatgtgtatgtgtgcagtgtgtgcatttatgtgttgtatacacacatgtgtgggttgtgtatgtgttgtgtgtctgcacgcacagatgttgtgtacatgtgtagatagcatctcagcctccttgggaggaagccttgagtctttttggctctgctgagtcatagctggtgggcttgctctgcagtgctgactcaccacacagaaaaacaagaccaaaaagtcccctcagtctattaaaaaaaaaaaaggatgtaagataaatatttggctattcaagataaggccactgactcattcagggaggttaggatgactgcgtgtcctcccaggaatgcagacttggagataattggtttgcagacactgtatctggaagcagaaggtcagcagaaagcctttcagatagaaggtatatgtacccctgtgagttttcctgcctcgtcgctctctttttatggccattaggtttctgttcccactgctctggaagcgtcactcagggtcaccctctggctgctcagtctggggtctaggcactggcctggcctcatcacagcactggcacgggcctccgacttttcttcccgtggccccactgctcttcccggtctccctcccacctcttgtctgttccttcttgaatccctccttcttcccacgacccaagctctctccgacgccagcaggtgcccgcatgcatagtcatagcgtcagggcctctggggaagagaaaacagcttcgttttttgagtggctactctgtgctgggactatgcccccctcatttacccctcacagctcatcccttctccgtgcacaaggtgacatgaacttcatgtagagagagggaaactgaggctgaagatggctaagtaatgtgcccagggccaccctgctgggcaaatgggggtttgcaaagtggcagtcggacccagcttgtgctaataccagagcccactttctctcctgcttccactctctgtcctgcctccccaccccaagagccctctgtcaaaatgacatctgtgaggtgagacatcacttcttccactggtattaaaagttgttcgcccagaatggaaatgtatcacttgcatttgatggtcaagttatgcctactgccttgggaacaaagaagacagtcttgatgataggacggggtgcagatgtcacctacttcccctgtggaggacggggtggagaactttggagctcctttcttcttgctccagtgtgggcagggaggggcatacagagcactgacagccctcagtgttttcagaagctggttctgggcaagtctcagcttgggaggagcctgatgtgatgctggaagtggcattgttagcacttggggcagtcagagtgaagggagacattcctcagcctaaatagatcgtgggcattggtttttgttgttgtttggtgttttttggatttcactctgttgccccagctggagtgtcgtggtgcaatcatagctcactgcagcctcatcctcctgggctcaggtgatcttcttgcctcagcctcccgaatagctgggactacaggcatacgccaccatacccggctaactttttaaaaattgttttggtagagatgggggtctcactttattacccaggctggtctcgaacttttgggctcaagcccgcctcccaccttggcctcccaaagtggtgggaccgtaggcgtgagtcactgcgcccagcctggatattgttaaacattgtctttatatacaaatgttggtttcttttccaggaacctgggcctatgcagggcacacacgccggtcagttgtatgtacctaatttcacggtagccaactatgtctgtagccgttcaagcaacctgctattttattctgttttgtcagtagaagaatggagttcaacagctttgctggtactcaatacctggaaacagacagcatgttcttaacacatgcttttttcctttggagattaagggatagtattccagtttgacaatgtagataccaggctcctgtaattcctgtggcccagggaaacagtggctctaattttcaggtcctccactgcagaatgactcattcctgtgtgatctgagcgtgatctcgcctgcatgggaagctgccctgtaagggagcaggccggtgaggaacggaaaggaccacagcagcgcccaggccgccctgccaggccaggctagagttgcgcagataaaggccccgcatctgataagtgtcgccgcctgcccctgctggcgctcaggatcgtacttcttgtccttttaaaactcccttgcactccagcgtcattggaggcctgcaggcacactctgaaatagctgtacgtgtgggtggggaggagatagatgtcttaaagtgtacggatcatttgtttctctgcaggtgctgtcacactggaagcttgtggaaaccgtgttgtgtgtgttaactgagtggtgtgtttaagaacacagtggggcagggccaggaccaagtacaagatcaggttgagtcttgcattgtcaagtacgagactggctagcacagtcagtgaggtcttttggctatcactggtgcattttatttcattcagtccttttctcatagctctcttctgcttagctatttgccaaggcaaaaatagagggctctaaggaaggttacattccagagcacactgacttctattcatacagggggtggcggaaggctgttcctgggattttcagggtgacgataaggttgtgccctagaagtgtgaattcccggagaccctgggaggccccaacccccagcagaccccctcctcagaggctggtcgacagccagcatgcccgcccagtacctggcgagaggtcagggcgcattgccggatgggggagcagaggacgccggagtccaccgtccgcccttcattctggctggtgtcgggtcacaggtggccggatcccgttacccagcccaggacgttcggtttcattgaagaatacctttccctttctgtttccttgtgccgcagatgatttacatggacgatggagtgtcatcttttgtccagatcagaggctccgttccgctgttctgggaacagccagggcttcaggtaggtcatgaaaaaacttaaatgtccccttgtgatgttgtccgccctgcccttcccttcaatagctggggaagatttcttttaacacgttcgtttcatggcatagtttccagtctttttcctcagccctgttgtgttgagctgagctatcaaagtgtgcacacgtgtgtgcatatgcatgcgtgcgtgtgtgtagaaaacacagacaccactttgttgtttctggtcgtcaaggatgctgtgtgaaaccgctgactcgggaacggtgctgcggtgcctgctgagtgggtgccgcgaagtgagcttgggtagcactgcctgaggttagaccctgagttcggtgtactgaggacgtttctgagagccgtgactctcatggagggcttcaggaaggctctgtggctgcgtaggtctggcacccggtgctgcctgttgtggggccacgtgagacttccacagctttcccgtgatttctaaaaataccccttgccgtccaaagcagggctctggtcagtgccagagagatttggcattctttctcctgggaagagcacagggtggggacacattccaagaacacatttgtcatcaatggaatgacacgctgcctccttcaccagggtctctaacaaggtgggttatgggccgagtggactggaggggcctccccactaatccccagtcttcctccctgtcccgaggggacgtgggtgccttcagaaagcctctcggccagggcctttgtcgcctctcggctcttcttaccgacagctctcgtgtgactgcatttgggttgccagccagtggctactggggcccagagtgccatctgccaggttccagggggtgtttgacaacgctggactcagggtccccagtcctgggttcagcttcttagcctgctctttgacttgaccctgtgccaggagcaggtgagtcacttgtccccatggctgtcagcacgctgcagtgacagcattggtgaagtactgggtcagcctgggcagtgagatggatgaatggaggtctcgtttaggctccacgctctggtagggagaaaagtcttgattaacattcagtctttccactagaaagagcgcaccacactgcacgagataactgacggcctccggagaaacgctcctgaggacagctgtgacacagaaactcctccggagggctgcccaaaggaggtttttggaaaaatagctttattgcaatataacttacacacccatttaaagcctacaacttggtgcttttactgcatttatggtgttgtgtaaccaccactgtaatctaatcttagaacactttgatcaccactaacaaactttgtccccgttagtggtctctcccatcccctccaagtctccctcatgccaactcgactgttcatctactgtctttatctatagatttcccattccagacgttccaaaagagtttttgaaacctgattttctttaaatatggagttttcctttggaaacttctcgagctctgtattcaggagaatgaaagaattgatcgaatgagtgtggcacaaaaaggagacagggagaccatgttgtgtttcatgtaaagtttgtaagaaatccaaaaattaggggaatggtcatgatggattcttagaatttgggaaggaccctttggaattcatccattccaccctctgactctcagttcaggggtcctccttttttttttttttttttttttttttgagatggagtctcactctgttgcccaggctggagtgcagtggtgcaatctcggctcactgcaacatctgccccccgagttcaagccgttcccctgcctcagcctccagagtagctgggactacaggtgcccactaccacacccagctaattttgttgtatttttagtagagatggagtttcaccatgttagccaggctggtcttgaactcctgacttcaggtgatccacccgcctcagcctcccaaagtgctgggattacaggcgtgagccaccgcacctagccaggccagttcagggatcctcttccaggacctccaaagggctgtcctccaggccacaactggggatggttccgactcttggtgaattcctcctgtattgcactgctgcgtctgtctgactctagagtgttttggggtgcgcgggaatatgtctgattcttctccgtgtgactcaccctcagtccttggagggagtcttctggttccctcttcttcttcttgtcttctctaaggcctcccaactcctttggccaccttccctcctgtttctaagactctcaatgttctcatctccctcatctaaaaaatgacactcctttttgtcgttcccctcttggatttcattttggtcttaccttgaccttcgtgctgcctcagatgtagcctgacccgccatgggatgactgtgccttggtctgtcaggggccaggagcagtggaccacgaggtctcagctttttggcagctgtttcaccctcttaaattcctaacatttgtgctgcaccaaagcctccatggtttcttctttttgtttcttgttttgttttgtttttgagacgaagtcttgctctgtcacccaggctggagtgcaatggcacgacctcggctcactgcaacctccacttcctgggttcaagagattctcctgcctcagcctcacaagtagctggggttacaggcacccaccaccatgcctggctaattttttttgtatttttagtagagacagggtttcatcacgttgaccaggctggttttgaacttctgacctcaagtgatctgcccgcttcggcctcccaaagtgctaggattacaggcgtgagccatcgcgcccggcctccatggtttcttcaaaacaagcttcagaaggctttagtgttccttaatcttattaaggatttgctaacctttgggcctaatacctgtgtttagcctctaaacaccactcatcatcaaagagagatgaagtcatcttcacagggggccgggagggcagcgggaagtggtggtctaccgtcaccggcttcaactgtcactatcaagcctaaggctgcttctagttatttttctccactttgaactttttctcttccttcttcacttaggttagatgaaaagtgcaaagattttggggtgagtagcttgcgtattaagctgcaatgctgtccctccttgacagctgccgttggaaacccaggagcccagcaggatggggcagggttgagcagagggtggtggatgaggatttgtctgcatgttttcctgggtaatggtaccttcagtacttcctgactccatttctagcagccgtgtacctttaataaatttcatttttacgtgtaaatgggctgtgcagtttataaatagccacattgaaattttacccttaaagcaaattgctccctggtctagctagttcgagaatctatttatgatctgtgtctgtggttgacaacgttgctcccctggtcattgtagaagcttccccccaccatatgctgtatagacacgtgccttgccaaggtgagttcagtctgtcttttgaagtttcctgcaactgaaccaaacggaggaggatgccgagtagagcagacccctcttgccctgccttcacctctttcctgccagaaaccattcgccaagtttgtggagtcgtggcgctggatgggcttgtgtgtttgtaccttccttttttccaaaaaggacatgagatggcttgtagtataacagtttcaaaaataagtgaagaggtctggatgaagggcaagagtcgaattggtgcccacgatgcatgccgtgggtcttgtgtgcgtgggaaggaacctgacgcttgttccaagcttccccgcagccaccacagaaagaaccacagtcacagccagtttatgacagtgactcagagcacgagctttgaagcgacgcagacctgggctcaaattcaaactctggctcccctgctttgtaaccatgtgtgtttgagaggctcttatctgtgccaagccttagtttacttttctgtaaaatggggctaacaatatctaccttatagggttctagagaggattaaagagcgtaatataagaatttggctgggcatgggggctcatgcctgtaattccagcaatttgggaggccaaggtggacagatcacttgaggtcaggagtttaagacaagcctggccaacatggtgaaatcccatccccactaaaaatgcaaaaattagctaggcatggtgtcaggttcctgtaatcccagttattcaggaggctgaggcaggagaatcacttgaacctgggaggcggagtttgcagtgagccaagattgtgccaccacactctagcctggtcaacagagtgcgactctgtcaaaaaaaaaaaaaaaaaaaaaaaaaaaaaaacacacagtatctagaatctaaaaagtactcaaaatggcagctgctattgatactaatagaaacaaatgataacacccaggagataaaaccaatggtggcatccggagaagcatggctcttggtgccgtgagcactgaatgagagtttcctcctgtctttgtgggaacagggacaccgtgagatgtagtaacatgaagacagcttcctggtcagtcttatctctcatccctcatagactcatcgtaaatcagtaaccccagatgaagccatttattcatcccaaacattcactgagcgtctgccaggtgtagggggcaccagggatcagatacagtccctaccttcagggagcagggggcaggacagggcagtgttgtgtggacagagccgtgttggaggaagggagaggccccgggggcagctctcccaggctgagggtgtggggtgggctgcccaagggtccagactggggaggggtgaggaagaagcactcaggcaaggaaggcagcccttgcagagggaacaatgggtgcaggtgttgtaacccttgggttcacagtgatcagggagcatcactgggtagcttcttgaagtcctgggcatgaagggaatgggaggagagataggagaggtgagcagggctgggtcaagggcctgtggatgctacactgaggagtttgcatcccataccagcagctactcaagcagtactccccaaccttgctgcacagaagactctgctggggagcttgaaaaatcctgatacccaggttgataccatacacattaagtcacaatatctggggccgggagccaggcagctgtcctttttgaagacccatgggtgactccagcatgcagaaaagtatgggaaccactcggtgctgtgctggcaagccagttttattggggtcagactgggtgcagggagctttggtttgtagcatttgtccattgctgtggtgtaaattctcccatcgtggccactttcaacctacggctccacatcactgagctcagagttgggaccagctgggtgcaccgtcggcttgcaagcctgcaggagctggctccagcacacactggacactgctaaagggctgcaagaggtagagacacaattagacagaagtctaggcagtgttagtttggaggggaaagacaccagatgggaggccgttgagctgagatttttgggtaaccttaagtctggtaggagtggtggggtgcaggggagaggtgtggaggtgctgtctgcgatccttgggcctcttgagtgctgatcgagactctgctgtgacttccacagccaggagttctccagaccccgactatcctcatggctgtctacctaacctcagtctctggtctataggattgaactaatgactttaggggccagataagagtagctggccctttgcccagaggggaggaggacggggtggaggagaagggaagctacaaaatgcagtgacagtggtggaccctgccctcagctgcagctcgtgcctgtggcttctgacacccagtgacctcaggactaggtgacaccagagaaggtggatgctggtcagtgttggagcaggacagaggggaggaaggatatgaggcccaaggaacccagacaaaagggatgcacggggtgacggaggaagggtgagctccggagagaacatgaggcccagctcccctccacttttgcccaaggcctcactgtgttgcctttccacctgcctaaaagaagcagcttagggtcatgactcagggagaggcggttagacaagtccaataatacaacttgtttaggggatggagggacccagcctgaggccctgagcccagggaagcagctgtggcaagctgagcctggtcatggtgtccctgaggctctgcaggtatggacatgcctctgctggtatgcatgcagctctgcaggtggggacacggctctgcaggtggggacatggctctgcaggtatgcacgtggctctgcaggtggggacacggctctgcaggtgtcgacatgcctctgctggtatgcacgcagctctgcaggtggggacatggctctgcaggtatgcctgcggctctgcaggtatgcatgtggctctgcaggtatgcatgcagctctgcaggtggggacatgcctctaccagtatgcacgtggctctgcaggtgtgcacccggctctgcaggtatggacacagctctgcaggtgtggacagggctctgcaggtgtgcatgcagctctacaggtgtggatgcacctctgcaggtatgcacatggcccctggagctgtcttccctgctgtaccttctaccccttcatgggcatttgtaacctaagccaaaagggaacataacaagtccagaaataagtcaaaaccagaaccactcaaacttcagcgtgtgtgcataggaatctcctggagggcttgttaaaacacagattcctggccccacccctggagagtctggctcagcagatctggggtaggcccaggacttcgcatttctaacaagcacccagaggaggtccaacgaccacactttgagaatcactggtctagacttaacagatcccttctgcccattccctgctctggtcattcacccgggggtggtgctcccgactgacttcttagttctctgaggtagaaaggtttgttgtcagcagtgatactggactagccactgcaggggatattgaccatgcctgtgacagttgggcccagccctgtccacacggaatgcttgtctaagtccaggataaaagacaagcctgaggcctcagaaaagatgtgctgcagcccctgtccgggctgtgccttctgctgtgggcagctgattccagggcatgccgtctgcttgccacattccctgagtcctcactgatgtggttgaggggaccccatcaaaggcaggtgcctcatttcactctgctttgctgcctgttccctggactcaagggcatagtttctgtcaaattaatttgcgcttgtgcaggtttgttagaaactttgaagtgcttctgggtctttccatgggggttctggttaggtgtcatcacccaggccaggggattcagcgtctcccatccctttcccacctttccatgacacccaatggcatgttgactcggagggcgctcagtaactgaggaatggactgctgactgatagtgcagtttatatgttaacgggggagctatagagcctggggattggagcctgctaggtccagtcatctgtgcaacagtttctacctaattaaaagaagaggctttgggttatgactcagggagagacagttagacatgtccagtaatagaacttgtcacgacggagagccaggctcctcagccctggcctgccaagcttgtattctcttcttactgtgctcccatggggaatgatcctataaacagctgctgctcattgctgaagccaggggagacttcttgtgatgactgacagaccacacagagcaggtagcccctctcttgggttttagccctggtgacctctcatagggtggctgaggggtacacagacccgctgacttccctcagggtgcaggatggagcaggcctctcggtagtgcgaccatgaaagttttcaaattttctgagatttcctcagccaggtgttgatggccatggggataaaggacagaggtaacacaggcagcaaaaaaataaaaaaaaaccccacaggtttggggtgagcctttcttaggagctccattagccaacagccaagatacctcattttgcactcacttcacttgtgaccaaagtgtcttaggaccaaaagggatttgggactttgttgaactgtttatataaaaaaaacctggctgggcacaatggctcaagcctgtaatctcagtactttgagaggccgaggtgggtggatcacttgagcccgggagttcaagaccaacgtgggcagcatggcgaaaccccatctctacaaaaaatacaaaaaaaaaaaaaaatagccaggtgttgtagtgtacacttgtagtcccggcaacttgggaggctgaggtgggaggatcatttgaacctgggaggttgaggctgcagtgagccgtgattgcacctctgcactccagcctgggcaacagagtaagaccctgtctcaaagaaaaaaaaaagaagaagaagaataagaagaaaagaaaaggaaaccttctccaaggaatctctaaatctattgctgagaaaccagttctctagatgggtgcttttcttgagtctgagatggggcagttgtatcacctgcagtgttgagttatacaatgatacatgaagcatgataatagctgcatctcataacatagataaatctgctgacactacttttacaacactcaaacagaagcaaaactaaagagtgcatttttaactacttattcttgaaataatttcagacctacagaaaaaatttaagaacaagagggaactcccatatgtccttcacccagattcactaaattttaaccttttgccacacacgttattattttttgaaccgtttgaaagtaggttgcatatatcacattggtgttagtccatttgccttgctgtaaaggaatacctgaggctgggtaatttataaaggaaagaggtttatttggctcatggtaatgcaggctatacaggaagcatggtgccagcatctgcttctggggagggtctcaggaagcttacagtcatggtggaagaggaaggggagccagtgtgtcatatgacgagggagggagcaaggagagggaggttgcaggttcctttaaacaactagctctcctgtgaaccagcaagaactcattcattaccatggggttgtcaccaagctattaatgagggatctgtccatatgatccaaacacctcccaccaggccccacctccaacactggaggtcacgttttaacgtgagatttggaagggacacacatccaaaccatgtcagtgtctctttacttaagtgcaaaatatactctcctacatatagtataggtacacatttgggaaatttaacattgacaaagtacttcaatctcatctgcaggcaatattccaaattgatcacttgtctcagtgatgtcctttgaagcaccttttcccgccttgagtccagcatcacatactgcattttgtggtcatgtctctagtctttaatctgcatctgttcctcggctttctgtctttcaaaacattgatgtttttggagaatgcaagccttcttttccgttaagtcgagggtccctacatttacattttcctagtgtttcattataatcacattcagtgtatggatccctgaccagaatgctacctacatgatgctgtatccttctcagggtaccagatctggaggcacacggtgtccatctgccactcattagtgatgttaattttggtcacccagtcaaggtgctattcagtttctccacttacggttaatatgttttcccttccaactaatcagcaatctatgggagacactttgagaccatgctggtatcctgccttttactaaactttcccttaagatttatcatcaacagataatttttgctgaacaattatttactatgacagttgtaaaatgatgatttttaaatgatttcctccaaatttattacttggtattctactatagagccctctcttgttccccattcacccacctacacacccacccacctgcacactgattcacccatctgtcacccattaacccatccattcatccactcattcacccacccacctgcttatccactcatcgtccacctatctacccacccatccacctatccacctacttgtctacccaccatccacccatccctctatccagccagtcatccatccatccatccagtcatccacccatccagccatccagccatcaatccacccagccatccacccatccatgcacccacccatccacccacccactcacccacttacctatccatccatctttcatctacccattcacccacccatccatccatcctcacattcacctgtccatccatccacccacctatccatctactgatgcatccactgatccatccatccacccacccattctcttatccacctttctatccatccactgatccatccatccacccacccatccatccatccccattcacccatccatctatccattcagtcgcccatctattcacccatccatccatccccccattcatccatccacccattatccatccattcagccatccacccatccattcacccattcatctatccatccactcacccacccacctacccatccacccatctatccatccactcagctatccatccatccatccatccatccatccactcagctattcatccatccacccacccatccatccactcagctattcattcatccatccatccacccacctacccatccacccagctattcatccatccatccatccatccatctattcacccatctagttatcatcagtatagattcatgaatttctattttattcatcaggttaaaatccattactgtcctcatacagtttgatgttcagattgtcccagatttggccagcaaaagcccctttaagctgactccagcaacaatatgtattttaaatgtattttctaaaactaagttgagtattaaataaatagttctattaataataaggcaaatttgatcattaggatgactcagattttagggggaaattagtgtccctgaaggcataaaggagactgagaagcagtttctgtctccacagttggcttcactgacctctgtgctatcagagagcttaggatctgacatctgcctcatcatcttaccctggatctgctttctgtggaagaattgcagcagacatggtcatgttgcagttaggactgggcagcagcaaagccagactcgaggcacctagacctgagtttggagcactgttagctgaatccagagagctcagccttcctgagccctgaagagaccacagaggtggcctagtgggtgccacatgcagcctggctgggagtaagaaggagaatgggaaaaaccatggcctccttggtttgcagagaaggaagaatcactgttgttacttctctttgctttaggttggctcccatcatctgagactccacagaggcctggaagccaatgcccctgctttcgacaggtagggattgtctgacaccatccaagcctgtcattgtcatccttagacatcgtcctcccatcagacacaagggagagggtgcgacgggaaagggaggaccctgaaccctgaatctaaagctgctttccctttggtcctttatgcaagaagggagatgacaaaatgggatttttactttgttctcaggtttcctgaaggtaaattaatgaatgttcaggtagcactttataattattttatcttaccagtttcttgcaatgaggcttcatctctatgccctggttaataagggatcatctaaattatagggtatttgaagctgtttgttttttgttttaaaatagtatagaataaataagtatagaaaagtataaagtgaaaaataaaagtaccctaactcccagttaccactctcagagattttactattagtagttttttacatgtcattctagaaaacaattttggcattttatgtgtgtgtgtgtgtgtgtgtgtgtgtgtgtgtatttaaatacacaaattggatcataacacatttactgttttgcagcttgcttaagaaaagcagagctatttgtaatatgtatttgaaataataacttcttaaaagatttgcttatttaatctaaatactcaatattttaaaattgtcttagtgaatatagtaaaaattctcgaaagtaatgtgttaagtgtttgagtccttctacctgaagctttattgagactttaagtttgctttcatactcttgttaaacataacacttgtcatatgagcccagatgtgaccccctgattagtgtgtgacatgtaatgcgcttttctttaaagagatatttaatcaagtatagacaagaccattgccttttccaaagcattattagtatgtcctgagcattctacatgcggagttctttcagttgacattcatctatactaaattgtcttaggaaatagtgaacatgaaaccaaaaatgaaattctacctggctgagcttggtggctcagattttagggagtcgcctgggtgacagagcgagactccatctcaaaacaaaacaaacaaaaaacaaaaatattctacccgaagctgacccaaaacaagagggaagggtcatgctgggttcgcttcaggaaccctcctatgtttaggagctttcttaaaaaatacatacatctagttgaagcacatttgcatagactgcagatttttcagaatcctggtaatgcatggtgtgtgagatgcacgtaccacagagaatgagacctctctctcctcacaagcaccccagaggctgccttgccccttggaaagcattcctaaatctaggggtacacttagatctcttctgcaaatcacaggacaagctgctgaaagggtgagtctttctacaggcagctactgtgtccaggaagtctcttctgtaatgcttcttacccacgacactgggctggaggcaggagccctcccgttcccttgcaggtgctgctgctctcatgttcattgctgactatgttcccctcattcgagataacgtttggaaataaggtgacatgtctgcctagtggccgcagtggggcaccatgagggtccccctgaaagcaggctgcccaggtcctcgatggtgtccctggactggcatgtgcattgtcctgggtgcttcccaattctcttctctgggacatcactgcgctctcaagagtcgtgcggttctctgatggatttggttgagagtaaatcctttctttcccccgcaaaaccttcacacagatagtttttcttcccagaggatgcttgttttcctttgcctgagctgcatgggtgcccctgttagccgaggcggtctcttgtcactttgctgtatgtgctccatatctgaggagggctgtttgcagcaggactttggctgcagctgcttgagtggggtcttgtcatctctgtgtggtgatgagtctcggtggaagggctaacctttcacagggcggtgcctcagtctctcctcacaggacagtgaaccccttctccttccccgccccgctctgcgggcggctgctgtgcacatcagggtgtgctgaactcttggtccctccctgaagatgagaaggatgcttccaaatagaaatctgattcctcagtatcccgaaaaactcctgttttccaagtagcttcctatgacagtaacccgtaggcaggggaagtgaaaaaaaggcctcaatgctcagggtgacccaggaagaagcccgtatgatgccgaccttgctgctggtgccagcgtccccttacaccctgggtgccagcgctcccttacgccctgggtgccagcgtccccttacctgggtcggcagggcctctcagctcaccaataacgagcattttacaataaagggaaagaaagaggaaccacgtcccacacaccaagcactgtccttgtcactttcactcgtctttttagtcctcctcgccattctccgcaggaggggaagtagccctgctttatagatgaaggagccagctcagaagggatgaatcatttgatcaggggagtttggggttgggacagcatagagtaatgatgaggaatagtgagtaataatgagtaataacagtttccttctggccctgggctttggaaccagttgagaagaaggggcaggaatgagacaggaagagatcagaaatgggccttgtttccgatgagccacattgtgggatgtggcttggatgtgtggccacggtgggctccctcaccaggggcagagcctgcacgtgtcagagccaggcctgggatgcaccttctctgggcagaccgacccaaaagaaagcccacaagggctgaagccacacacagcccgccccagggctgcctggagctgcacgtggagacgggagcccgggagggtgctcacccttaacttaggccagggagtcagcaggcaagcctaacttcaaactacccacttcaaaatccatagtctttctactactgtcccttaaagttagtaagagaatgttttctcttactgcataagaaaaaaaatgatttttttcatgatcattattagctctttaaaaaattccgctcataaacgtgtcattacagaaatttggaaaagagaaagatgtttaaagaagaaaagaacttgaatcatataaaattctaccacttttgacatcatgtgtttttttccagtgttttttctatatttaggcataaagattgcaccattaaacgataatttgacatctgctttttgcattgtatcatttccctatgttttgtttaaggcactacatttcaacatgtttaaatttgaaatgtaaggttacttttaaaaagctggtgatcaagaataaatattggaatctctccctaatatttcaacatacatatttagaaagtagcttccaatacaaggaatgttttccaaagcctgcaagttttgttgtatctccttgttgtggtttagcataatgcaatatagcacttagattgaaaacaggatgctgagttgagagctctcctgccagttgttctagttttgagaagggtgggtaccaagcaaaataagagattcatttcacacatgtgcacattgcatgtgtaagactctagcccaggcacggtggcttatgcctgtaatcccaacactttgggacgctgaggtgggaagattgcttgaagccaggagttcgagaccagcctggacaacatagcaagaccctgtctctatgaaaaataaataagtaaaaattagccagatgtggtggcatgtacctgtagtccctattacttgagaggctgagttgggaggattgcttgagcccaggagtttgaggcagcagtgagctatgatcgtgccactgcactctagcctggacaacagactgagatcctgtctcaaaaacaaaattctcttgatgaaagttcaggttaggtgttctagatataatgggaggtgctttatagaaagtgcagcatatcctttgtctgattccaaacaaatgtagaagtctacgctagctagtagtaatggcagctgggaggtgcaggttctctccacccaggctcattttccacgatttgggtcatgggggacagctggtcctggactgtggcactaagaaagcatgactcctgccccgtcttcccttgaggggcagaacagggcagagtctgcacctgtgcccgtgcccagcatcacgcccaccccgctgcctttgcaggcacatggtgcttctgaaggagcagtacgggcagcaggtggtcgtgaaccttctgggaagcagaggcggagaggaggtgctcaacagagccttcaaggtaaggccaggctgtcctctccacagctgggctgggcggcaggtggccatggtggagcgttgagcctggaggtggctcctgcagggactggagctgacagcccagccctccttcgtttcctgaggcttccccagcattccgaccagtgaacacggcagtgctcagtgactcgggccctgatacagtgagtgtaatttcttttctttttttttttttttaagacagagtttggctcttgtcgctcaggctggagtgcagtggtgcaatctcagctcactgcaacctctgcctcccaggtacaagcgattctcctccctcagcctcccaagtagctgggattacaggcacttgccaccacgcctggctaatttttgtatttttagtagagacggggtttcaccatgttgttcaggttggtcaagaactcctgacctcaggtgatccacccgcctcggcctcccaaagtgctgggattgcaggcgtgagccaccgcgcccggcctagtgagtgtaatttctgtgagctgatggttgggagaatttgctcaaagtcaaaacagagcatctcctgtccccagccatgtgtcccttaccctccctccccatggggctttgagggcttctgacctctcaaggtacccctctcagtccagcccaggagcaggcaggcctccctttctgccctggctggtcctgggtgagttcccccagccccacagggcacccggcctcagggctcaggagcaggaacttcggtggctttcccctgcttgccggctggccttcaaatttccccctcttcctcgggctttcatggcagctcctggacctgctgctgctgggctcctgtgggctccttcagacttccttggggggcttttcctggcgatcctggacagatcctgggcagggtcacagagccatgggagcaagagactccgcccacctggccaggttccatccctgtgcatggatcccaggcctccagcccccgccccctgctccccaggcgcaagacgttccagaatgagccaagggggctcctggttcctttaccagcctccatgtcccctgcctaatagagaaaaactctctcgttgtttaaagctcaaagatatcccttacagagagagctcgaagtcgcctcactgggggttagggcgatctctgagcctttccctctgcttagaaatgccacatgctcatgctcagagcaggcacttcctggttgccaattttatttggccagacctgcttttcctgtttggtttgttgctattagcaacgagctccagaagtgtctcccttcccacccatcttggcagtgatgctggctgctaatttgaaggaagaagggaaaaagctaaaaaataagaataataataagaaccccaagtccttttcccctatgccttgagttgtggcccctcccatcagtgggtgaagtgcccggcactggtgagggcgggagatggcagccacctcatgcggagaagggtgggctcctggccaggtagggaggggcactctagctgaagacctgggtcatggccctgcctggggtggccctcagccacctcagcttggcccagaccaaggttggtggcccagcagcctgcccagggcccaatggccatcagtcctgctggatgaagcactggctgtggaatgcatggcactgagccaccaggcactgttgggctcctccagcttcttgctcacagcaagacttgcttgatgatggcagcactgcattgatttacactcagacctatcacaggcagtcacgttgagtcagatcagatgacccccaagtccttctagtccttccaagtcactaggacctctggctgggcagaggctggactggcctgacctgaagccacaagggcatgagtgcagggtgagaggcctggaagccgggtggcctgggtaggcggacagtttgtccttcatcacggggctctctggggagaaagccagggagctgccaggccagggaagcctcatatggaagggagggctcttaagggcatcctggtgccatcagcagccccttgacctgcttcccatctctccccaccttcactctggctccctgaccatcctgaagtagcatcgggatgtgggacccacctgggccacttcagctggagacttggtctcttcagagcataaccaccagaggctggtgcgcggcaggatggggccggttactagggcaacggggagctggattatgagctctgcagcctgccacagcactgctatctctgagggcctggggcacctgggccacctgaagaacagagcagtccttcctcacctgtgccctccagagagccctgcaggagtatgatctctccaggaagccacacctgctctggcttcttttgctcaagggggaccttctgccctttcgcaggcaagacgctctttgtgggttttgtccccccagggcctttgtcctgtgcttcccttttggggtcaactgcctggtccactgtgagcttccagctaaagcacgtcctgcggcgagtcaccttggttagccgcacgggtcaagctctgcaaggagcttgccctcctcgtcctcccttccctctgctcccctcaccgccctcccctcctcttttcagaagctgctctgggcttcttgccacgcgggcgacacgcctatgatcaattttgacttccatcagtttgccaaaggtgggaagctagagaaattggagaccctcttgaggccacagttaaagctgcactgggaagacttcgatgtgttcacaaagggggagaacgtcagtccacggtgaggctcgctgcgcactgtgccgcgtcttctgctggggggaagcgtcagtccacggtgaggctcgctgcgtgctgtgccttctgctgggtgaggcggcagaggggccgtgcagtctaggacatgtgccctatgaggggcagcttccttccctccccactcagttacccttgtggtttcctgggtcataagcttggcgacgccgggaatcttgggttccagcttctcatctcccttcccacagtaggagacaggcttttgaatttctcaaggagatgttgagtcatggttttctggcaaaagaaatgaactaataaaggggactgcattaaaacatggagctccacgctgtgacgcaggcctgtgagagtgagggccacagtcgcggtgggatggctggcatagacttagattgctagaggagaccagggtatggacttccctgttcagagcagaggagaaaaacgaagtccagttccctcaggtcacatgcagggggtcctcattatttgcagattccatattggcttatttacctattccttaaaactgatttgtaaccccaaaatcagtatgcaaagcatttttgctggacagagtatttaaatactctggcctcgtatttaaacaagtttcctttttaagatttagtaccatgtttttcacatttgtggggtctttgttaggggcccccctttgttcggggatctcatggtttagaatggccccaagcagtgtgccgaagagctgtctagtacttctgagcacaagaaggtggtgatgtgctttatggagaaaatgcacgttaagataagctttgtccctatatgagctacagtgctgtcggccatggttcagtgttaattaagcaaatatatatattcaataaggtgtctttatatggaaacatacataaaacaaggttgtatattgatcagttgataaaaatgtgaccagaggtttgcaggaacctaaccctatatttcccctaggagcgatggttctgtgttcatgtccaattcagtgttcctacaactttatagaacataattgctataaataacaaggaccagctaaacgtaaaacgacccagctgtgcaggctactgagtgtgtgtcctggggtctgcctgcctttccagaagtgctggggatccactgggatggacactggggtttctggggggctattgatgaggaggtgaggggttccctcttagaacatgtttcctcacacctgtaatcccagcactttggaaggctgaggtgggcggatcacaaggtcaggagttcgagactagcctggccaatgtggtgaaacaccgtctgtactaaaaatacaaaaattagccgggtgtgatggcacgcacctgtagtcccagctacttggaaggctgagacaggagaatcgcttgaacctgggaggcggaggttgcagtgagccgagatcatgccattgcactccagcttgggtgacagaggtgagactctgtctcaaaaaaaaaaaaaaaaaaaaaaaaaaaaccatgtttccttgggagtcaaaagtcagacatgggcctctgtgctatggccactgcttctttgaaaacaacatataaccgtttacatttcttcttgtcctaagttttcagaaaggcactttgcggatgaactgtcttgactgcctggaccgaaccaacactgtgcagagcttcatcgcgctcgaggtgcgtccctgccacagccttttcggccatctgtgccaggtcctgtgacttcagctggacaggctgggctgagcacctttagcggcaagatgagggtggcatcaccaagacaaccttctgactatggggaaggtggacagggagacactgggacatccagagaggggttccccaggaggctgctttctctgtcgtaggcacactttctcacaccctcttgtgaaatgcatcccagacatggtggcccaaaggctcctcgggaacagcggttgtgtgtaatgattatcgtggatgcaccattggccaaaggcagtgtgaggctggccggatgaggctggatttgaagctggggagggagacctctgtctgcatggccccagctgcctggttgacctctcctggctggggggtcgggggtagggtcagcaccccctgctgtccaccactgtttgctcttcagcctctggcattgggtggggcggggcggggtgcaggggcgttcaagtgtcagggggtgagaggagggcttgggtggaccctatagataaagttggggtgagatgtgggaagtcactctctgctgtgggaactcctcatcctctggaggggcacagagtcttccaggcacagcgtaatccacaggctgccgaataaggaacctcctgggacagtggctgcagggcctctgtgggagaagccagtgacagccatcccttattcctccccaggtcctgcatctgcagctcaagaccctggggctgagttcaaaacccatcgttgaccgctttgtggagtccttcaaagccatgtggtctctgaatggccacagcctgagcaaggtgttcacaggcagcagagccctggaagggaaggccaaggtagggccccgccgagggggcagggtgggggccccagggacccccctcacggcctgcggtctgggctctcggcaggtggggaagctgaaggatggagcccggtccatgtctcgaaccatccagtccaacttcttcgacggggtgaagcaggaggccatcaagctgctgctggttggggacgtctacggcgaggaggtggcagacaaagggggcatgctgctggacagcacggcgctcctgggtagggcctgccgcagacagggcgaggcagggaggtagggtgctccccagccccactttcccaccgcctctgtgctatccagagagcgggtggcagaggtgcctgggatctgagcagtggaccatgcaccttgcagctgtcactgcctctcccgggagcctgcgctttcctgctgggcctgggagctcacgcttcctctgtctcggcttggactgtgtttccatcctgagaagcgagagacaccaggcgggctcagggagaggccgtgcactctcctaaacgcatcggtgcctttgaatgctaacctactccagaaacttcctcagctgcctgggctcttgggcccttagcaggtgatgttggctttgggagcttcccatgaagttggcctccagtttctctcttggcccctgaggaccctgtggaaacagagaaggaggatgctgtcatcccctggggatgagggcaccttctggtctcagcggcaagacatcgtgattccatcaatataggaggttcctttgggagcattttaatggcatcttcttacctgagcctgtaaacatattaggtctcatggaaaagtaggggaaacccagcatttttccttataagaatgtacaagtgtcgctttagaaatgtcaggtgtttttgaaaaatgaactagcccatgcttaaaatgggttcacggccctttccactgtcaccgtcactgggggagctctaatttggcttccgataggcacggtgatatttagtttctactctggaaacagtgccagctctgtaaaaggtgaacaaagctccatgttgtacagtgagtcttatttaatagcaaggcagacatgagttagatttggtttacatcacaagtttaaaaggtggaatatattttggctatctagaggatggagatggttctgtgtagtgactttttaaagccttaagtctggggcaaaacaaaacatatcagacatgcaggctggaaggcagaggatgcaaaggtggctgtctgggttggtaagacacttaaagttatagtgtatatggatgcatacacaatgaaatatggtcagttacagcatgcccttgcttaaattcctatgccttgttcttctacggagtggacagtgaggacacggcttttccctgtcgtgtctgagatccctatggtctgatgtcccatggcttctggcttcagttgggggtaggggtatagacggtgagtttccagtcttatgttttcacgcctttattgtagaaatgccataagggaagccccgtggtgaccgtggttttaagccttttgtcgtcttcgtaaggagcataccctggtttatctctagaggctcatgaaccatctgtctctgccaggcagcctcatctgtctttttggaggatgcctgagctttggaactgcaaagaaatgtgcctttttatgcctcctgacagtgactcccaggatcctgaaagctatgactgagcgtcagtccgaattcacaaatttcaagcggatccggattgctatggggacctggaacgtgaacggaggaaagcagttccggagcaacgtgctcaggacggcggagctgacagactggctgctcgactcgccccagctctcgggagctaccgactcccagggtgagggcagtgactttgggggagacaaaatccaattgcacctaacctgacatgtcacgcttgaccctttagtggccatcgtcttgtggaatttcatctttggtgtcttccctcctcacaatgtctaaatagcaccatggcctgactctcaagaatgctgcctcgcaagtaactgacctttttcctttcccagatgtttagaagagttagcagatggtgaatctctcttttctctttgcatacagtgatggtgaagtcttaggctttcatcagtagaatcttttcgtcaccagtcggaaggtgtggcttctagggccatgtaactgtgaggttgggagccaagcctgtcttcggtgttttgtttttgttttttgttttgttttgttgttgtttgtttttttgagacaagtttcactcttgtcacccaggctagagtgtagtgacgcaatctcggctcactgcaacctccatctccaaggttcaagcagttatcctgcctcagcctctcgagtagctgggattacaggcgcccaccaccacgcccagctaatttttgtatttttagtagagatggggttttgccatgttggccaggctggtctcgaactcctgacctcaggggatccctctgccacagcctcccaaagtgctgggattacaggcatgcgccaccgcgcctggccctgccttcagtgttgatattgaccaagaacagctcatccctgcctctccccaaaccaactctattaatctgctttaagtagtcacaaaataattcatgtgctatttaggaataaaataattccaaatgttgacacctcaccttttatcttgtaagatacactattgaatggccccagaacttaggatctgaagaataaatgattcttgtccagtcatcgttgactcgggccttggtttttttgtttgtttgttttttgttttgcttccttggactcaggaacttgtggttcaggtttttgcctgttggtgagtgacctgtggtctagctgacatgcagtggcccatgtgtacattcatgccccacagctgcctgggtagtacccagagccccatcccttcctgtgcacacgccatctgtgccctcctttctgcctccaagggcaggtggcagagtccaccattcagagccactggggctctctgtgtcggtggtagcctgggttgctgcttgtggtgcctccagaagccattcaggatgccctccggagcaggcccatcaacgcggagagtgcttagcacagccgtggctcaagagccgtccctccagtccccacgaaagtgactcctcttcttttccctgcaggaaggtgtgcatgtttttagcaagctggctggtattttgcaggggatttttttggggtagacactagcaggctccccagcagtcccactagagatacaccaggttccagagaaggaaaggagtgctgtggttactattgccaagcagatcagacagagggacggggattgttttatttaaaaaaaaaaaaaaaaaaagctttaagtcagggaaactagaggttccaggttgcccattgtggtcaacagagaaggaagtggacagcctgcctggcctctcgctgacagaggccatgtcctcctagctggaccctggggaggtgggcctctcactttctgcagcagctggagccatgactgggcttggtggctcaggagcctgggtgtcagaggtcgtgactggacagattcagtcaatggctacaaggttatattaaattctgacctcccctgttcaaagggaacagaatggacggagggcccctctgggctcactgctgcatttaagccaggcatttctgaagcagattccactggggcagttcccagcagcaatggtagccacctggagttggactcaggcagtggacagcatgactcgggagagggcactggggagccccatgaactcgtaatgcgggacttggcggttctgacttctgtcatctcttgccttgctccccagatgacagcagcccagctgacatatttgctgtggggtttgaagagatggtggaattgagcgcagggaatattgtcaatgccaggtaaggggccaggtgtgcggggccaggcagggacttcctgagtcaggtgcctggctgggagcagagcctctgaggctctccgggagccagcctgcttctgagccagctaagctgtggccctggctgtgtggggatctctcacctggctccttctctatgctcacacatgcaccaccccgttctttccctgccacttaggaagtaaaaggaagggctgatgattgctgtgttttctttgcagtgctctggcctcggccacttgttgaggctaatttatgctgccagagggagctggcatgtgtggacctggggtgcaggggaagggcggggctgggactgggagagtagttgactcatgtttcctggggagaggtgagaaagtgtgagtgccgggaagaggtactttcttcctgcacaccagggcaaaggaaaaaatcaaaaccactggatttttatttgatatgaagtcaactgggcgctccccccaccccctgctgaactggcctggctttattttaaggaactttctgaacaaataaataagactgactctgtggggctgctatgagaaggtcctgggttgggtttcaggggtcaagggagggctgctgtgatgtgtgaggcatagccaaaaacacgcagatcctccagtagaagaaggaaagcatgacactaatattggggtgcgggcagcgtgaaatcagttctgcaaacagaataggcttgggctggagcatttggtaggtgggagatagatgtacttccagctacctgtaaacagcatcctttccttttctcttccagtactaccaacaagaagatgtggggtgaacagcttcagaaagccatctcacgctctcatagatacattctgttgacttcggcacagctggtgggcgtctgtctttatatctttgtacgtccataccatgtcccgttcatcaggtaagaacattctgtttacacacatctggggaacaaggggttgttagtctttgtgttttgttctttgacttccccctcctcccccatccccttctgtaacaggaatcgggacttaccattattttagataaatgtagcaaaaccccctaggaaaaactgggctgaatagaatattgtctagcgattaaaaagccaccatgggaaatgtctaactcaggaagctgaactcttagaaagggtgttacatgattgtcatcgcccaagctcaattccgtgcaaggaaaagggttccttgttggaatcttatagacaggaaacctctgaccaagagctgagtaactcactgggaaatgccaactcttttgtccctttttaaaagaattctaagtagaacgtgtgggcctctacaactgtgacctcattgtcatttctccaaggtgcatgctttgtgagcatcagaaagggggcgagcttaggggcggcattcctcttggggtgtgggtgtgggtgtttggatgctggaggaactcatcttttccccagcttgtggttggcctcatcttaccacctgggcctacccatggcttttgaatttccaccagcctttcggcgagctggcagcaggcgttgaactgacctccccactgagcccctgggtcccgggaagggcctgtgcctgccaagagcaccacgggtacacccctgcagcacctggagactaagactatgctgcccataatcctcttctctgactttcagaagatgtttaggtccctgtccctctgcttgtgttatttgggcagcttggcagtgtcctaggttagcaggtgaaggttagtaaaggttaaaggcaagggcggggtgagggtgagaggtaaagcatttgagaaagggctcagagctgaggagagccaggtttcccaggctcggtgtcctcggcttcacgtgcctttagccctgagctgcttccgcctacaccccttccatcagtcatccccccaaccttgtctgccagcgagcagatgcaccagcaggcctcagtctgtggcatggctgtggaaatgttaacaaatgtgcttgcagcccatgtttctatggactcgtatgcgtcataagtgggcatttgaatgcaagcaggctctggcattgcataaaagtccttttgagaccatctacccagcccagcataaacagctgcccgtttcctagctcttaaagtgcattgattgctgggcacggtgtctcacgcctgtaatcccagcactttgggaggccaaggcaggcagatcacttgaggtgaggagtttgagaccagcctggccaacatggtgaaaccctgcctctactaaaaatacaaaaattagccgggcgtgatggtgggtacctgtaatcccagctactcaggaggctgaggcaggagaattgcttgaacctgggaggccacagttgcagtgagctgagatcacgctgctgcactccagccagggtgacagagcgagactctgtctcaaaataacaataataatttaaaaatgtgttgattgcccagatgacacctcccatgcatggcgtgatggctgcacaggagtggggtgggctggtgggtggtgatgtttgcgccgctcctggtggcagtgagaacctgggcggatgcaggcattgccctgtcttcggcttcatggggtgctcaagtgagcacttcccagttggggtgtgggggagatgtccaggcagcggtgggcagcaggagggaggcggcctcctgaccaggagtcgatgacggccacggtggccactgtgttgagctgatgattttggagcactcagagcagcaggtcccgagctgctgctgggcccttctctgtggcaaagcagggtcacacttctccttcaggagccgacggcatgcgcgtatccttctgttccagggacgtagccatcgacacagtgaagacgggcatggggggcaaggcggggaacaagggcgccgtcggcatccgcttccagttccacagcaccagcttctgcttcatatgtagtcacctgacggccgggcagtcccaggtgaaggagcggaatgaagactacaaggagatcacccagaaactctgcttcccaatggtgagcggcgccgtggggacagccagcacctccctgctcagctcagtcccaaatgtgactgttgataggagccaggcactggggacacaaccacagggagggccccttcctggagggctcagcgctgggggagggggagagggctatgtccctccatggaattgacctggggcagggttagccacgtgcctggagggggccagctttgcagcatttcccgttgctgtacaattcctgagtgtctgcatggccactggatttgtatgtgtgcattttctgattttctaattcaagtgatggtttagggaagaaaaccatgtccgtggtctgtcctgtccaagtggtgaagagcatttgaatccacacagcctaagactccaccttcctgagattcacagtcttcacatgtactttctgtggtggctcagataagcacacccttttgaccaatggaccctttttgactgggaacacggttcttgaccaaggagcccagatcctgcctgtcctcgaagctgcaatagcgaaccgcacactgccctctcgtggcggtccggagggtttcattctgaaactggaggattttcttttcaaatctagacgttaatgttctccttcctgtgcaaagatgctacccgggcacagcttcagcgtgtggtgcacacgaggccacctctttcccgaagtgaggatagacttcagctgttcttgctgcaaaatcttccactgtctgagaggtggtgggttgggtcacagagctcttccctgtgagaacagatccttaaaactgacgtcccattttactgggctgcacgagcactcaaggcaaaatttccttagttttcattaagaagtgccataattcctgttggtgttgtttatttcttatgttaaaaaagaaacaaacgagttgggaaattttcaattgtgtgtaatgcagtttaaaaaaaaaaaaaaagtctaacccttctcacttaaaaatagctactttggggccaggcacagtggctcacacctgtaatcccagcactttgggaggccgaggcgggcagatcacctgaggtcaggagttcgagaccagcctggccaacgtggtgaaaccccacctctactgaaaatacaaaaaaaattagccaggcgtggtggcgtgcacctgtaatcccagctactcaggaggctgagacaggagaatcgcaacccaggaggcagaggttgcagtgagctgagatcgcaccactacactccagcctcggcaacagagcgagactctgtctaaaaaaaaaaaaaaaaaagtgctactttgacatagtaaacttgggatacataataagtaattaaaggatttataatgtagttcttttctaccataaaaatattgagggacctattaacattctacacttcttttttgtttttgttttttgagacagtctcactctgccacccaggctggagtgcagtgacatgatcttggctcactgcaaactccacctcccaggttcaagcaattctcctggctcagcctcctgagtaattgggattacaggcgtgcaccaccaggcccaactagtttttgtatttttagtagagatggggtttcgccatgttggcccagctggtctcgaactcctgacatcaagtgatccgcctgcctcagcctcccaaagtgctgggattacaggtgtgagccatggtgcctggccaacattctacactggtattgtctgataccgtagtcactggccataagtagctatttaaattcaaattaattaaaattaaataacatttaaaattccttgctttccctggccacagtgagaatgatcagtatccatgtggccagtggctcctgcatcagatggcacagagaacatttcggtgctgcagaaagttctgtctgacagtgttatctagacgctcattttatttggttgggacctgtttaatcttctgtccagattattgtcatggggggagtggaaatgcctcatattataggagaagagaagctgattttggagctaggcagatgggagctgaaatcccatctgtatcatgcactagctgtgtaaccttcagcaagtgcctttgtttctgaactttgtttttttttttttaatctaagagagagctggtggtatctgctttgtgcacctggaacagagcccagcccttgcggacagttgatccacagcagctgctgtcattgtcttccccattcctggggaagagacagggaaggcaaggaccccaggagctctccggggctgagctggggccgtgggctcctaggactgggcaggatgggaaggaggagctagagagagatggagaagggtcacctgaaaaagctcaggaagttacatgaaggtgcacatcctgagcatttctgctgctcttttgaaacctcattctcctaacgctgaatgctgggtgctgcttcctaggagtagacactccaaagtaagggtgcatctgatcttcaggacggggatccatggaggaaatgctggccatgttgctctcctccgtttagggtaggagctttcttcaaaccactcagaaacactattatttaaaattaaaaagtaagccatgtaaaaattcctccatagttttatgggatgagtgaaaaacaagatgctctagtagaaaactttcttttttctaagtagcattttgagaaaaatactcctgcttgccccagtgagcttgtttttctcctctctcccaccttccttgcaagatgggctgaatgattatgattttcttttcaacttaggggagaaatgttttttctcatgattatgtattttggtgtggcgatttcaactaccgcattgatcttacttatgaagaagtcttctattttgttaaacgccaagactggaagaaacttctggaatttgatcaactacagctacagaaatcaagtggaaaagtaagttgtgctttaaaaacattttttagcagctgctccaagatggaatgacatctgtgagatgtagaggctggtgcagcaaattcagttccgtgagtggatttcactgtttccaacattgtagaaaataggtgggcttgtgaggttacagtacaggagtggctgttcatacacacttcctgtccttttttttttttttttttttttcctgaggcagagtcttgttcagtcacccaggttggagtgcagtggcactatcttggctcactgcaacctccaccttcctgggttcaagcaattcttgtgcctcagcctcccgagtagctgcgattacaggcgtgtgccgccacacctggctaatttttgtatttttagtagagacgggttttcaccatgttggccaggctggtctcgaactcctggcctcaggtgatctgtgcgcctcagcctcccaaagtgctgggattacaggcatgagccaccatgcccggtcaaccttctcctccttctaatactgttattttagtgcctgtttgcttcctagcaggatgagctgagatgaggggagtacatttaaattccatttagctgtggagaaagaagctggttaaatgtgtgagggccaggtgcggtggctcttgcctgtaatcccaacactttgggaggccgaggcgtgcggatcacctgaggtcaggagttcaagaccagcctggccaacttggtgaaaccccatctctactaaaaatccaaaaattacctgggtatggtggcaggcgcctgtaatcccagctactcaggagactgaggcaggagaatcgcttgaacctgggaggcggaagttgcagtgagccgagatcgcaccactgcactccagcttgggcaacgagcaaaactccgtctcaaaaaaaaaaaaagtgtgaggacagggcagataaggtctctcctgaagcaagatttggacgttcttcgaggtttactgtgtcttcccacttgagccccttccagtgtgtggagtgctaaagggttgccacatggacgagtgaccataccaacctcctaaagcaggttttcctgtcttcctactaccaacattctcacatcctctcagtgatgcccaagagaatgagggtgtgtttgtcccttggtcttcccatggaagcaaggccaatccaaagttaaacaaagaaaagaaggatgtgcatgggggctcacgactgtaaggcgggaggattgcctaagcccaggagtttgagaccagcctgggaaacatagggagactttgtctctacaaaaactaaaattagccaggcatgatggtgcgtgcctgtagtcccagctacttgggaggctgaggcaggaggatcacatgagccccagaggttgaagctgtagggagccgtgattgcaccactgtattccagcctgagcaaaagagcgagaccccagggggagagagagaggagagctgactttcactctgcgcttctatgtacttagctcatttagtcaacaaacatagatgaaggcctcggggttgtgggccagacatggcaccaggcatgggactgtaaagatgagcacccctgacccgtgcctcggaccctgcactgtctcctggggggcaacaagaagacagtggatagatcagacactggagtgggtggggagatagatacgagggcggtgtgtccctcagtgggatgagctgaggatcacttttttgctaattaaaagacacatatgtccagtttcagatagattttcaaatgtaatggagcttctgttactttttaagaatagggacttgccttttcagttttcgtttttgtatataacattcaggatcgaaaactacggtggcctgatgacttctttttctcccaatagatttttaaggactttcacgaaggagccattaactttggacccacctacaagtatgacgttggctcagccgcctacgatacaagcgacaaatgccgcacccccgcctggacagacagggtgctgtggtggaggaagaaacatccctttgataaaacaggtgagggggccgtgcccgttcgagagtcggcagagggtgaataagaaatgcgacggagggagagtcacgtttacccaaccccaggcgctgctacataaatcagtttcttcataaccccagatgacacaaaagtcatcccagaccttaacccctaagctttggaagttgtgctttcagggagcctctgcttctggcctctttttttcccttttcttttcttttttttttttgagacagagtttcactcttgttgcctaggctggagtgcaatggcgtgatcttggctcaccacaacctccacctcctgggttcaagccattctcctgcctcagcctcctgagtgctgggattacaggcatgcaccaccatgcccagctaattttgtatttttagtagagacggggtttctccatgttggtcaggctggtcttgaactcccaacctcaggtgatctgcccacctcggcctcccaaagtgctgggattacaggcataagccactgcgcctggcctcctctggtctctttctagagacagtgacctgcaaataggtctgctcctggctgcccctgcatcacagctcccccccacacccccacctcttttttctgggtggggaaagcggggagcatgaggttgcctccctccctgccccccatgctccccctcatgttctttatccagcctattttgttcagctacacttttacctgcttaaagccctaattccaaattggacacgagcaagacacagtaaaaataagttagtttttaaaaatcattagttgtcaagtatgttttgaacaactgttgatgcccagctaggaagtgaagtttatttaaagttagaatatctgtaactagtacataaaaaaaaaaaaaaaaaaaaaaaaaaaaacctaattacacattttgggagagcatagccaggaaattgcatctgtgaaaagaaaatacaaattttcctctagatgagtttgtgaacgcctgtgtggccccagcgctctgagaggtggggcctagaatgagtccgagtgttctcagctcctgcagctcttaccataccaattgctgccaaccttctgggattcctgggtcctggaaacccggcagcaacactgtgtctcaagcctacagtgggcatgctggcgaggactgcaggcatggtcatgactgttttgaataattatatgcgaggaatgtttttaaccaaaggccccaaagcatccgaagcctggcttcaaggtggaggagtaaggaggatgagtctgggacgtggggtggttcgtggcgcagacctctattgtggaagtgtcatgatcgcattcttggatattgactcgattctatatgggtctctcgaatggaacccctgcgagtagctggagaactcaaccttctagacagtgatctagatgttgacaccaaagtcagacacacctggtctcctggtgccctgcagtattatggtcgtgcggagctacaagcgtctgatcacaggtgaggtcctgacttccatggcgttttctcctgtgctgggcaaggcagcgtctccctctccgcaggaaaatgcatgctgtccccataaggatgtgtgtgcgcatgggggtgcattttgtgtgcatacaatacaccaaagaacaaagaatgatggaacaaatatctgtggacccaccaccaagaactaattaatcttagcattttgtcattgctccatatcataaatgacatcattgatgaaaatttcaaagatgcaacctacgtattttgcggcttttatattttcttaaatgatgtcgttgtgcaacttgcttttttgttactatttttgagatacagtcgtgttgatgttatagctctggtgcattcatttgtaactgctgtctagtatcccactaaatatatccatggaacttacaacttatccattcacctcttgatgaatattttctccaggattttatgattacaaacaccatagggtttttaaatctgggatgcacaaccttttttttttttttttttttgagagagagtcttgctctattgcccaggctggatggagtacagtggtgtgatctcagctcactgcaacctccgcttcccagattcaagcaattctcctgcctcagcctcccaagtagctgggattacaggtgcacaccaccatgcctggctaatttttgtgtttttagtagagacggggtttcaccatgttggccaggctggtcccaaactcctgacctcaggtgatccacccaccttggcctctcaaagtgttgggattacaggcgtgagccaccgcacctggccctaggatgcagggctttttaaatgctctgtgcatcatgcattgaggatagagtggaggcagcagagggagcaccgtgggcaccagcacctgtgccctgggattgctgcagaggaagactcaccctgcagaatgtctttaaagacagaggagaggatggcatttgagggtgtgaagaaggaagagtttgatcttcccaaggctgctgcctaaactctcatgtcagtttcaacttttacaaggaaagaaattaagaaaaagaaggtaagaacagttggtcaacgaaaaaaccttttttttttttttttgagacagagtcctccaggctggagtgcagtggcacaatcttggctcattgcaacctccacccccagggtataagtgattttcatgtctcagcctcccaagtagctgggattacaggcgtgcatcaccatgcccggctgatttttgtatttttagtagaaacggttttgccatgttagccaggctggtctccaactcctggcctccagtgatgtgcccgcctcagcctcccaaagtactgggattacagccaccatgcccagactctttagataattctaaattctttagatacctgttgttgcaaatacatacctagaagtgaatcttgaggaatcttcagatatgtgacatcaaggtttgctagctcaatgtattttgaaaccttaatttaaccaatatttcttgaggggcccttacatgccaggccctgttgctggcctggagaaaagcagtgaacaaaacagatgagaccatgttatcatggaattttctggacaggacaaacagacaataaacaaacatgtgtgctatgaaagaaaaaaagtagtggcaggagtcaggccagagtcgagctattttcaatcaggctgtgtaattttcgtaatataggattttctggaaatttatagagtaataaccatccctgtgtcagaattactataaggattgcattatttcctgctggactgttttcctgtttacatcattgatttttacattattcctaatgattgcgtagggtattatatgaaggtatcataactgtttccccattaagaaacagagcattttggcctggcgcagtggctcacgcctttatcccagcactttgggaggctgaggcaggcggatcacctaaagtcaggagttcaagaccagcctagccaacacagcaaaaccccatctctaccaaaaatacaaaaattagctggtcatggtggcatgcgcctgtaatcccagctacttgggaagctgaggcaggagaatcacttgagcccgggaggcggaggttgcagtgggctgagatcgcgccactgcactccagcctggacaacagagggagactctgactcaaaataaaaaaaaaaaaaaaaacgagcatttccctttttttttttccctcccatcaacaatgctgtaaatgatcaacctcatgcattaaatctttgtctgaatccctggtcatttccttagaataaagtccgagaagtgagattactaggtgaaaagagatgaacaattttggaactctatgtaaagtgccaagtaaccctctgaaaagcttgcacccctggcagagtgcagatgtctgcttccccacctccttggtggtactgaggattaccatgtcaaaaatctttgctgatggctggttattttccaagtactgggatacatctttaaggtgccacactttattttccccctcaaatcatctttagataaaaatgccaaggtgatactaaggttaaggaaagatgaagactaaaacgccagagcagggcagctagcctgcaaatccacctgctggtggccacattcgcaggttgttggtgttgactgtttacaaagagccctgggggacagcagctggggactgggggctggagatgtggacatctgtcccaggctaactggggactggaggccgggggtgtggacatctgtcccaggctaactgtcatccctcttttgttcctaacgcagacctgtgctggcgatcgtggaggtggaagttcaggaagtcgatgtgggtgctcgggagagggttttccaggaagtgtcctccttccagggccccctggatgccactgttgtagtaaaccttcaatcaccgaccttagaagagaaaaacgagtttccagaggacctgcgtactgagctcatgcagaccttggggagttatgggacaattgttcttgtcaggtaactgctcccctggctgatgtgggttccaggggatgtcgatgaggatccgtgagagctgccaggtcgttcttggcattgacttggagtatcatttattccaggatcaaccaagggcagatgctggtaacttttgcagacagtcactcggctctcagtgtcctggacgtggacggtatgaaggtacgctgtacttggccacactgtggagtggggtctgatcaatccctctttttatgtgggcatgtcttcttcctcctcttgccctgacctgtgccttttttttttttttttttttttttttttttctctgagacaaagtcttgctctgtcattcaggctggagtacagtgatgcaatcacagctcgctgcagccttgaactgccaggcttaagcaatcctcccatctcagcctctcaagtagctgggaccgcaggcacgtgccaccacacccagctaattttttttaaattttgtagagagaggatctcactctgtagccccggctggagtgcattgggacagttatggctcactataacctcagcctcctgggctccagtcatcctcccgcctcgatctcccaatgtgttgagattacaggcatgagctttcatgcctggccaccaatctgtctttatgtatagacgccatatgcgggagggagtttggattcttcactctggttctaaggtgtctcatgtccggctctagctacttgcaaaatagggcggaagggtgggcgcagtggcttatgcttgtaatcccagcactttgtcaggccaaggtgggtagatcacccaaggtcaggagatcgagaccagcctggccaacatggcgaaatcctgtctctagtaaaaatacaaaaattagccaggcgctgggtgtggtggcttacgcctgtaatctcagcactttgggaggctgaggcgggcaaatcatgaggtcaggatttcgagaccagcctggccaacatagtgaaaccccgtctccactaaaaatacaaaaattagccaggcatagtggcaggtgcctgtaatcccagctacttgggaggctgaggcaggagaatcacttgaacccaggaggcagaggttgcagtgagccgagatcgcaccattgcactccagcccaggcaacagtgtgagactctgtctccaaaaaaaaaaaaaaaaaaaaaaaaagtagccagacatggtggcgcgtgcctctagtcccagctactcaggaggctgaggcaggagaatcgcttgaacctgggaggcagaggttacagtgagctgagatcgtgccactgcactccagcctgggtgacagcgagaccctgtctcaaaaaaccaaacaaacagaatggggaagaagaatgtcagtcactgtgtctcacgttggaaggcagctctaccagcagctgcagaagcttagccattttagagtgtagttctcgccgagttacttgatctgtctatgctcgcactgccatgtgggagactattccagtctttctctttagagtatgtattttggaatatgcagctcatagatagtttccgtttttatagtatcttggctttaaatctgtaccaaatgggaagctggagatgagagttcaactttttttttttgagatggagtcttgctctgtcacccaggctagagtgcagtggtgcaatctcggctcaccgcagcttccgcctcccgggttcaagcgattctcctgcctcagcctcccgagtagctgggactacaggcactcaccaccacgcccagctaatttttgtatttttagtacagatcgggtttcaccgtgttggtcaggctggtctcaaactcctgacctcaagggatctacctgcttcggcctctcagagtgctgggattacaggtgtgagccaccgcacccagcccagttcaacttttttttcaaccagatgtatgagagctatgctgagcctgcgtgaggtctggacccttggtttttcagggccaaatgtgaagattggcctcgttgagggtgtgtgggttttggtgagaagcattgtgtgatcaacaggaggggtcatgatttttatttattcctgggtggccgctctgccctcccaggtgaaaggcagagcagtgaagattagaccgaagaccaaggactggctgaaaggtttgcgagaggagatcattcggaaacgagacagcatggcccccgtgtctcccactgccaactcctgtttgctggaggaaaactttgacttcacaagtttggactatgagtcagaaggttagtgaccctgcagggagggacaggcaagccgttcttctagcaacaggcctgagcttttaaggacaccttctaaagcctcccttgcagaagtgacggaggacacccgcagggcaagccctctgtcccatgtgatgagcatgtttgtatgtgtggacgatgcatgccatgctacctgggacccgaggcatctaaacttaggctacaaacagtggctatgaggatatcagggctgtgggtgtaccaatggaactggggtaccgtccctgctggcgcctgggccctgagctgcagggcagggtgcacgtgtcctgacaggagctgaaccagtcccactgatggaagactgagcctttccccctcattgttttcacccgaattgtgattcatttccttctcccaggggatattcttgaagacgatgaagactacttggtggatgaattcaatcagcctggagtctcggacagtgaactcgggggagacgacctctctgatgtccccggccccacagcactggctcctcccagcaagtcacctgctctcaccaaaaagaagcagcatccaacgtacaaaggtagcctgacccttcttttctcaggagcctcagcgatggagtcagctcaggacagactttcctttttctcttggcgattgggcactgtgtgatatcaagtatgcaggtcccaggagagacctcaaccaggcaggccaagcgaggggtagggactgagccctgtggaggtagccagctccaacaccctgatttcctctagttagtttatttttttacaataacttgtacccccataacacaccagattcaagataattcttgtttcctctggatattcaaatggccacggttctgaactggttttatatttgtgattatttcccgcccccaacaaaactcttctgattcagccaggcgcagtggctcacacctgtaatcccagcactttgggaggccgagacaggtggatcgcttgaggtcaggagttcaagaccagcctggccaacatggtgaaaccctgtctctactaaaaatattttttaaaaattagcagggcatggtggtgcacatgcctgtaatcccagctactcaggcagctgaagcaggagaatcgcttgagctggggaggcagaggctgcaatgagccgagatcgccccactgcactccagcttgggtgacaaagtgagattccgtctcaaaacaacaacaacaaaaaaacttctgattcaatcccagtagagacataatccatatctatgtcctgagttgctggcgtatggtcacactcatataatatcatattattatacagtcatgtcatacggtcacatcattgtatcattttagacttcagagggcctgaaaggtcacattgattgaaccacacacccctagattaaataatacaactttttttttttttttgagacagggtctcactgtctcccaggctggagtgcagtgatacaatctcagctcactacaacctccacctcccaggctcaagcgatcctcccacctcagcctcccaagtagctgggactacagggttgcaccagcatgcccagataattttttgcattttttgtagagacggggtctcactatgttgtccaagctggtctcaaactcctgggctcaagtgaccctcctacctgggccttccaaagtgctggaattacaggtgtgagccactgcacctggccagtaactgttctgagtaacttttaaagcccactaatgttacgtggctggcaggtcgggtagttcatatttcagtgtcagctacattgatgctgttccattcatagccaggcatgcctctagctgtcaatcactgagccccgagttggaggacagctctaaccagcaggtgcaggagcttagccacgcattgggcccattgagctggggctgagagcagagaacagggctgaaagtggattaaggtacctctcagggagggtactttgccaggagaggtgcgaagacctccagcccctttgaccgtacgctggtccccacactgaccaataacttgcctataccgaaccatcaggagcttttaaacttatggatttttgagccctaccagagagatctggatttggtaggagtggggtgggaccctggaagcctggcgtttcaccaagctttccaggtggtttggacgcacagctaggtttggggacttctgcccaagactgaagcagcagccttcgccggagcatcgcggtggttctgcacgttgctcctgccaggggcttctgcccgggagttgaagtggctggagggatgtgctcttcccataagaaggacctttctctcgggggtggccgtcatgcaggcagcctctggagccagtgcaggtgtgagcacagatagtcctttgcatgaagaaactaatagcgcaacacgggacacgtgggtggctttgctacctggtgggcattgagagggtcttcccttgatgctgtggggtgttcagccattcccatttgtaggagaaatcctgcctttccccagttccagtctccaggacacatggggtggagctgctggatacagggagtggggtgtccgagtcaaagtgaaatggagaggcccatgctttgggggagccctagggctgctgatttgatctgtaaggaagcaggagctgtgcctcctgaaaacccctcagcctcttggaaggtgtgtgcagggcaggtcaagatggcagacccttgggagtggccagccatgggcccacagggtttgggatttgatgagtaagcaggacccctggtcctaggcactggccactgcatgccaggctgctctgctgccagagcagggagaacaccctcagcttcctcagccggtgtgttctagagtgaggaattgaaaacatctgcctgtggttggttgactcttcaggggttgtggtttgcaactgtctcctccactctgcccaagtcttgttatttcacaagaaaacacactttgaaatagctcagtgtctctcaagtctgagaaatacccattatccatggttcactgaatgttccaagcaggcactgggtgccctccccgcccccgcccctcgccggcagacagaggtgcccgtttctggacagagccttcagctgtcctacagcaggtccccctgccacagtcggcctcctgtgctcagatccgtgtctgacacgctcacgtgtggaacagaccattgtactcatgccccgccatgtcctccagatgacgcggacctggtggagctcaagcgggagctggaagccgtcggggagttccgccaccgttctccgagcaggtctctgtcggtccccaaccggcctcggccacctcaacccccgcagagacccccccctccaagtaagactctgcttgctttcagctccctggatgcctgccaggaataaccgcgcgttccctgctactgaaaacacggctccgaatccacttctccccggccttccggtccccacagggcttcctcctccttgggctccgttttgttgtaaatccaggacacgtttgacgtcagggctggttgtgtttctcatggcaaatgaaacagctcctttccaaagctgctgttcaccctggagctgtgctattgcttcaaactgctctcccttggcagcattagaggatgcagaatgggggccgcagccatgggagggacgtgagcttcgcagtcagaagtctctcctcagctgctgcgcagtcctccctctacttatgaggaatctggtaaacccaggtccccgcctggaggtgacctggtcacccctctgcgctccgaggcctcctgttccccgggctcagaacaagttcccccttatcctgggtctaggagcattttcttctggttgttcgaacaatgctttgcccgtccagccctccctgataacctgaaagcaaagctgtgatgtgcttttgatccacttgcattttcccaccactgtttacttctccctccccaaaaatgtgatgatcagacttagatcttcctaagccattacttcagaattgggctcattgtggctgacgtcacggtagtaaccaatggcaagccacaagcccagatataaaaataacccaaaaataaaatgcataagtcatgtattattgtggaaattttagagataactacaaagaagaacaaaattttaaaattcacttgatgacctacgggtcgtagttgttgaaaaaagtcttctttttccagtttcatgtatctgcagcaacatacttctttttttttttttttttttttaacaaaattaatacccattttctctggtcggttgtcttttatttaatgggttatattttctgtgtcattgaatgttctaaaacatgatttgttaatggctgcaagtatattttaacagtttattcccctgctttggaattttttttttttttttttttttttttttttttttttttttttttgagatgggctcattctgtcccccgggctggagtgcagtggtgcgatctcacagctcactgaagccttgacctccccggctcaagcaatcctcctacctcagcctgccaagtagctaggactgcaggcgcataccatcaggcttggctatttttattcatttatttatttattttgtagagacagtttcaccatgttgcccaggctggggtttttgaaatattttttccccacaaaatattttaaaaatctggtcctagcaatagtatttggaaccatttcaaaatcaattggtttttatatcagatctgaatcccccaagatgttaaagtttgcattctagtaatgcttctccagatcatctacatcaataggcacacactggtagaatcaagtgagaaactccatagagagtcaaggaaggcctggctctgtgggtgccctaagtgccgagtgagtattcggacctcaccgtgtctgtggtctgctgggacatccgcctcgtctagtcgggctcctggcagctggctgggaagttgtgccttcactgagattgagactctgccctcgttggtttttacagccggtttaatggtgaaaaagtcggcttcagatgcgtccatctcctccggcacccatggacagtattcaattttgcagacggcaagacttctaccaggagcacctcagcaacctgtgagttcttctgcatacatttcaatcccaagggttttgcccccgggatagtgtgggatctctcttctcagtgaatatatagatttatgtgtctttaaccctctacctgctcaccatctcatctccaaaccccataacccttcctcgcaggttctccatagggcttttaaatggttgtatggagtgttctagaaaaaatcacttttgatgaaaaatcccaaatatccctggtttccatactcatccatttctctctcttcccattcttgcctctgaccttggtgtatgggcagagcattgcttggtagaagggaaaatgggagaaattcaggtcgttatcctgggaaaatgatgatcattctggagtgaagttggttgagagaagaggctaaaaagagatgtaaataatgaagttggggaacacactaggaagactaacagccatagaggattgtggaggtgcctggttccagagggtaccatgagctgctggggaagagagcaggtgaaggcagggaagtagaggggagagaggggaagctgggtgctagggggaaactgctatgaccgggatgcctctggggtgctgggcctggttaagtgcttgtgcggccccagcaggtggaggggtgactggaggccagtgttttacagtagtgaaaataggtcataaaggcaacccacatgctggatgaagaagtagaaaaagcacttttaaggaaggtattttaacaactcagtgggaccatggaaagagtggcctcttattttgctttctggctttcacctggttattgaaaaaaagatagaagatggtctgtccatatgcaaaaatctgtaatcacccggctttgaagaccagggtcatcaggtctaagtagtatggcactcttggaaagagagtgctccaggaaagagaggattgcagggtgtggtggaggctggagtttgtatggtcagcatcgtctggtggagccctgcacagacccacgggtagcagatacgtcccacgaggctgtcctcctgcctctgctgatactctgctcttcctcattctgtcctcaagcccaaggctcggactggaataagtaaaccttataatgtcaagcagatcaaaaccaccaatgcccaggaggcagaagcagcaatccggtgtctcctggaagccagaggaggtaggtgctttcctgggggcaggggaaaaaccaattctccttttctttttatctccctgctaaaagtggtctagaaacgaaaataactctttttattcttctggaggcaatattaaatgaaaacatcctttagcaacattttatataaatctatactaagattgattgtccatttaaaattgtattttcaaaattctgtgtgtatataaaaatcatcccagggctattaagcggcgtctaaaggagagaccgaaaaaaaccaaaatgagtttttaaaaaaggtgaatgctgccggcatgaagtcattctgccagctttataaaacagagacagttatagtgtttgtcctaatttcaggcacaaaatctaccttttaaatcactggcaagtggaaataaagtttttagtgtcaggcagggacctctttcccaccacattattttttgttgctgttacttaaaccatgttagttaccttgggctctcccccacttcattcataatcactggtaatttacacttttagttttggccttggctttgttccagaatctcctagagaggagagtgtgcccttttcttcgtttttttttttgttttttttttttttttttttgagactgagtttcactctgtcagctggactggagtgcagtggctcaatcccaggtcactgcaacctccgcctcccaggttcgagcaaatatcctgcctcagccacctgagtagctgggactacaggcgcgcagccccatgatgagccaatttttgtattttcagtagaaatgtgatttcaccttgttggccaggctggtcttgaactcccaacctcaggtgattcatccaccttggcctcctaaagtgctgggattacaggtgtgagccaccacacctggccgagtgtgccctttaaaaaggtgtaagcaatcaccattgcttaatttgcttttagtcagcatgtttaacttctttggaattctcaaataatatttaagggggcatgagttaaaaggtcgagaactactgttgtagaatgatactgctacaaatgctttctttttttttattttagaaaaataactaaaactaggccgggcgcggtggctcacgcctgtaatcccagcactttgggaggccgaggcgggtggatcacgaggacaggaaatcgagaccatcctggctaacacggtgaaaccccgtctctactaaaaattcaaaaaattagccgggcgtgatggtgggtgactgtagtcccagctactcaggaggctgaggcaggagaatggctgagcccgggaggtggagctcgcagtgagccaagattgcaccactgcactccagcctgggtgacagagcaagactccgtctcaaaaaaagaaaaaagaaagaaagaaaaataactaaaactatggatataacaacccaagtgtccatcagctgataaatggataaacaaaatgtggtccatcaatacaatggaatattgttcagccattaaaaaaaaaaagaatggggctgggtgctgggtgcagtggctcacgcctgtaatcccagcgctttgggaggccgaggcaggcggatcacgaggttaggagatcgagaccatcctggctaacacagtgaaactccatctctactaaaaatacaaaaaaattagccgggcgtggtggcacgtgcctgttagtcccagttactcgggaggctgaggcagaagaatcatttgaactggggaggcagaggttgcagtgagccaagataacgccactgcactccagcctgggtgacagagctagactctgtctcataaaaaaaaaaaaaaaaaagaatgaagtgctgatacatactacttcatgggtggaccttgaagacattatactatgtgaaagaaagaaaaaaaggccacatagtgtaccatcccctttttatgaaatggccacagcaggcaaattcatggggtcagaaagttcttcttgctttccagggactggaaggaggcctgggtggggagtggctgctgtggggcttcttttttgtgtgatgaaaatgttctggagttagatcgtatgatggttgcacaactttgtggatacactaaaaaccaatgaatggtacacttagaaagggtgaatttcacggtatgtgaattatgtcacaataaagctgttaaaaaaaaaaaaactctagagatgtagatgttagtagaggtgtgaaatctacctacagtcccggcttaacactttcttggtcatggccccattgagattttgatgtctttggatcatctaccctgagaaatgtaagtacacatgagactttgcatatgatctcagggtctcactggtccccatccaaactatccacagaccccagatcaccacccctgctaggaaggtgagcatgaaaacctgggactgctgggtgcggtggctcacgcctgtaatcccagcactttgagaggctggggtgggaggactgcttgaatccaggagttcgagacaagtctgggcaacacaatgagaccctctctctacaaaaattttaaaattagctgggcgtggtggttcacaccagtagtcccagctacttgggaggctgaggtaagaagactgcatgagcccaggagttccagcaacatagtgagacctcatctctactaaaaattttaaaaattggctgggcgtggcagtgctcacccgtaatcccagctactcaggaggctgaaatgggagaattgctcgagcctgggaggttgagactgcagtgagccgtgatcatgccgctgcactccggcctgggtggcagagcgagagcccatcttaaaaaagaaaaaagaaaaaaagctgggactgaatctagctgattactcctgaaatacactgaattagtaaatgacacttaggatgtagactgtctaaggacgaaatcatgcagtgaattgccttgtcctttacacttcagccatgtggttttatgtttcaggtgcctccgaagaagccctaagtgccgtggccccaagggaccttgaagcatcctctgaaccagagcccacaccgggggcagccaaaccagagaccccacaggcgcccccactccttccccgtcggcccccacccagagttcctgccatcaagaagccaaccttgagaaggacaggaaaggtaaaagcctggtaacataaaacctcttactcctaagttgctcacatgtctcgatagataagaattgtggcctgtaatcccagcacattgggaagccgaggcaagcggattacgaggtcaggagttcaagaccagcctgaccaacatggtgtgaaaccccgtctctactaaaaatagaaaaattagccgggcgtggtggcgcacgcctgtaatcccagctactcaggaggctgaggcaggagaatcacttgaacccaggaggcagaggttgcagtgagccgaaatcgtgccactgcattccagcctgagcagcagagtgagactccacctcaaaaaaaaaaaaaacaaaaaaaaaaaaacagatttgcgtctcacagataaaaatctagttccctatggacatcctcacgttcatgagtcccagacacaggtgtgtctttggggaaagttttgacaactgcttcttccctcatatcctactgtgtcttggctctggctgagaagaacgaggagtccactgtctggcacattgtcagtgtgacaagaacagcttggaggtattatgcttcctaagtgttttgagtccccaaagggaaccatagtgggatgcttttccccacatgttctggtaccgcccatttgcgtgtggtctgtgttgtgtgcacatggtttcaaggcattaggaaaacagtaaccgattcccagattcgccatgttcacatgctctcgtgcggcctcagcctacgagaggttccacagcttttcttgccacttttcttgcagattgttttttgctctcgctctcaagcttctcagccttgcttactgcttcaaagacatgagtttgtaaggacagtagcagcccaaagactggcatctgtagacacatctggatcttccgtttgatctcagtgttctagtaacggaccctcggtaatcccttcctggtcatcacagcacgatgctgcttcccccctagagagtgtgaggggggcttcggcttcactcttgacagcgcttgctttgtatttcctgggttgctcttctgtcccacattggctcattgccatctgtcccttgtccatgcttccttacaaagtggacctttttcctccgcctcttccctgttcagatgctcctcgacttaaaatggggttacatcccaataaacccatcgtaagttgaaaaatagcgtgtcaaaactgcatctcatacacctaacctagcaaacgtcatggtctcgctgaccttgaacacactcagaacacatacattagcctacggctgggcaaaaaaaaaaaaaaaaaaaaaaaacacccatccaacacagcctattttataataataaaaataaaagatcaaacttcaaaattcaaagtatgctttctacggaacattagcgcttgtgcactagggtgaagtggaaaatcctcagtggaaccattgtaagtcggggaccacctgctttgtcttttcttgtaaaagccaggagcagaaatagattcattttcccaacctgctgcacaggagttaaagttaaaaggctgttggaaaagagactttcttttttcttagtttgttttctaaagaaccaaagaaacactgaaacgccaatgtttaactagtctactgatcaccttttctgaacaaaagcttcattttgcctgtgcagttgttttctttgtgatagatttgaaccagaaccaaggcagtgtcaaggtttccattctttaccaatatttaagtataaaagattcaaggagctgggcgcggtggctcacgcgtgtaatcccagcactttgggaggctgaggcgggtggatcacctgaggtcaggagttcaagaccagcctgaccaacatggtgaaaccccgtctctactacaaaatacaaaaattagccaggcatggtggcaggcgcctgcaatcccagctactcgggaggctgaagcaggagaatcgcttgaacctgggaggcggaggttacagtgagctgagattgcgccattgcactccagcctgggggacagggcgagactccttctcaaaaaaaaaaaaaaaattcaaggagaaagtatatccattagtccttcagttagcttatgttgtaacacaagttacttcaccctagcatgatacagaccatgaatcagcccaggttgcaacttcaaagagtgttttcagagaggtttgctttcaataaaggaagagcatcaccccatttcctaaaggacaaagaaaagtttgtctgattatttactgtggccctggttttaaattttccactcgttttcattggacctgctggtgtgacctgataaatgtgtgtttctcctgtgctttttctttttcttacctggtcacatttctggcaccccacacattctcaaatctcgaatttgctagaatgtcagcttggtctcatctctgttctctgctggccactctgttctctgatcctcagctgcctagttattggcttcttatttacactctttgtcccaccttttctcagcccctgtcaccggaagaacagtttgagcaacagactgtccattttacaatcgggcccccggagacaagcgttgaggcccctcctgtcgtgacagcccctcgagtccctcctgttcccaaaccaagaacatttcagcctgggaaagctgcagagaggccaagccacaggaagccagcatcagacgaagcccctcctggggcaggagcctctgtgccaccacctctggaggcgccgcctcttgtgcccaaggtacccccgaggaggaagaagtcagcccccgcagccttccacctgcaggtcctgcagagcaacagccagcttctccagggcctcacttacaatagcagtgacagcccctctgggcacccacctgccgcgggcaccgtcttcccacaaggggactttctcagcacttcatctgctacaagccccgacagcgatggcaccaaagcgatgaagccagaggcagccccacttcttggtgattatcaggaccccttctggaaccttcttcaccaccctaaactgttgaataacacttggctttctaagagctcagaccctttggactcaggaaccaggagccccaaaagagatcccatagacccagtgtcagctggcgcttcagctgccaaggcagagctgccaccagatcatgaacacaaaaccttaggtcactgggtgacaatcagtgaccaagaaaagaggacagcactgcaggtgtttgacccactggcaaaaacatgactgagcagctttgaaggctgcagtcctatagaatgcataccttcctccctctagacatccctccaccagaagagacatctatttaaaggcacactggccaaaacgtttgtgcatctgtcactctcgtgtagtttacaaaaatcgtgtctcttattcagtaagatggttactcagccaccaaaatatatttcactcaaggcttgtacatctgaagtttgctcttcaaggaatgggaaccttcctgttaaattcggtgtatggattttaagaaaggaatctagccaatgaggtccaagaagttctcacccattgaatttttaaatggctgttcagttcatgttgtacgtgatggagatttgtcttttgttttatttgcattttacagatttggtataacattttggggagccacctgaaggttgatgtataaagtaaggattagagaaagaggtcgttgtgaccattagtagctgtcctggcccacttaaacaaggttacaaaaaatcagagtcggaagcagccaaataggtcaacctaatgactagactgtacattcccatgagccttcatgtttaagtgtgtacatgtgcgttaaccttgatgatgcgtgaatcccgagggagccggtggcatacaccgttagcttaaccttagcttaaactagctgaaggctcctgtgccatgtcttagacattgcatgccctatcaattactataatcctgagccatggtgtgctactgaaaccaatttttatccaccatctagtccttattaaatgaaacctcacggatcctttgttccgcttatattccatgcataccacataaaagcacacagtgcgaaaactcttgctgatacgcgatattgattctcattgttagaatatggagagtgtttcagcctcgtctgtccggctggagcttcgggatggaaagtgctatgtgtccctgcatataagaatcaccaggccagtgtttctgggtttgcttgtctatatgtttgtctatattttttgcctatacatttttcccacgtttccaacagcacttctcacctattcaataactgaaaaagacattaccatagtgctttacatttttaaagtaatgttacaaggtctggaatccatttggagcagataccgtgttttcgctatttaataagaagttcagtagtgaaatcttactgtaccgcctgttgtatctgggagcctcgtacagaggctcgcacagcagtgatcaagtgtcatcccttacgtgactgggggatgtctgtcctaaaagctgactgctaggatagtaaggatcatcttgcctgggctatgccactgtcttgttaccaattagacatctggaatttcataattagttttcattgtcactgtcaagatatattgcagattacttaaatatggccatcaaaacaaaagttacaacacgtatctcttttcatctgaaaactaatacctggaaaaggataaaaaaaaaaaggaatccgtgacccacagagctagacagataagatgcatagttgaccagtcataaaaggcggtgtttaggtgatcaggatgccgttggtggcatttacgtgctttatatgatttttacctctgtaacaaacacaagaaataaacagaatggtccttaacagagtttgggggagagagcaagatgggttccttggagaagctgatttgccaagatgcacatcgctattaacagccagagtcataaatgaaatgaaattgaagaattcattcaaatgctcttttccctataacctcttttctcaccaaaaaggagataaatttgaaaacagataaatgtaacaaccagtcaaagaagcaggggaaaagtaagctcctccaaagttgcttgcagtgctggaaatagatctcatttttaggttttctcttcgttccagataccaaataaatgggacagagaataaaatttttgttaaaatatgtgctcatctcctaagtagctcttcagagtctgaccgtaagtaaaaacacacagaattgtgttgactgggggaggtgaatcacaaaaaagttacgaggagtttaagagttaaatattatttgatcgtggctgtcaaatttagtgaacaacatagattggatttggagttggtagtaggtatggttctcataccagaattctcttaaaaaaaaaaaaaaggacaattggaattgccttatttatttttaaaatcaatgcttactagttggtaggattcccaggtcagcagcagggttgattaaataatcttgacaatgagcagctgccatcttgggggatttcattctgtggttttttaaatgtttcgtctttgatgctaccatccagggcttcttattgtgaccttgtagcctattttgttcctgctgttctctaacatggtgcagttcacgcagactggtttaggtacttcacaactcaccattgtctctctgaccccaagcctagtcccttttacatcaccatcttctcagacttcttgcctattcttaaaatatgttttggttaatgattgaattaggacatcagcttaagcaattcctgtaacggtttaacgttgttgaagttcaaggcacataataaaattctccctgatgtgtgtgtaagtataaacaaagtaatgtatcaaagcgttcactttataatgaagtcatttcattgggaaggaaagctgcaaagattattgggggactagtgattaataaaatcctgtaatatttttgaagtgaaaatttgtactgaaattgtacatgatacctattaaatgtttttgtctttttttaaattgggtttatttcttttcagatatgaagagaaccttagaatatctttggctaccttctgttctggatcaaatgtaattactggttatttagtaattcctcttgagtttcgggttttggttttttgttttttttgtttttgtttttgttttttttggagacagtctcactctgtcgcccagggtggagtgcagtggtgcgatcttgctcactgcaacctgcagtgagcaacccgggttcaagcaattctcctgcctcagtctcctgaatagctgggcttacaggcatgtcccaccatgcctggctaatttttttgtatttttagtagagacggggtttcaccatattggccaagctggtctcaaactcctgaccttgtgatccgcctgcctaggcctctcaaagtgctgagattacaggtgtgagccactgcgcccaaccggttcgtttttttaactattaaattaagttcaaaaaccagaaaagtaatcatctggttaagaatttatgacttgaatgctgctagcagggaatactgccataacatataataactttatgctacttagagatgctagaattcattttctgtacgattttatagcaaacttataaaaactgaactgctagcttgagtccattacagcatagaagcaggagacggaagtaaacacttcaagttctgtctaggtttgctctaagctaattaatacaatatagatcataaatgttctctgatgattttcaggaataagaataaatctctaataaatatggctagtccttcctgaccagtaaggaggcatattgaatttactaaatctgacagccggttgcagaaacttccttttcaagggactgggggagataggtttaaaacgcactctcatccaaggcaaattgtttgcatttatctcaatgaggtaataagagtacaaatgaggccaggcacggtggctcacgcctgtaatctcaacattttgggaggccaaggcgggtggatcacctgaggccgggtgtttgagaccagcctggccaacatggtgaaaccctgtctctactaaaaatatgaaaattagctgggagaggtggcacacacctgtaatcctcaggaggctgaggcaggagaatccctttaagcccaggaggcagaggttgcagcgagccgagattgcaccactgcactccagccagagtgtgactctgtctcaaataaataaataaatgagtataaatgagagagtaattgtgaacagacagggaagatttgggagaagagtattaagaattttgggccaggcacggtggctcatgcctgtaatcccagcactttgggaggccgaggcaggcggatcacgaggtcaggagatcgagaccatcctagctaacacggtgaaaccccgtctctactaaaaatacaaaaaattagccgggcatggtggtgggcgcctgtagtcccagctactcgggaggctgaggcaggagaatggcgtgaacccaggaggcggagcttgcagtgagctgagatcgcgcgactgcactccatcctgggcgacagagtgagactccgtctcaaaaaggaattttgaactatttttttaattaattatattttcagagctgttttatgttcacggcaaaattgcccaaaaagtagagtttccatatcctccctaccccaacacgtgcacagcctcctccactattgacttccccccaccagactggtacatttgtttcaatcaattgactacattggtacatcatcctcccaagtccatagtttagggttcacttttggtgttgcacattctatgggcttggacaagtgtataatgacatggatccaccattgcattatcatgcagaggagtttaccgtaaaaatcctctgggccccacctattcatccctccttcctctcaatccctggcaaccacttaccttttactgtctccatggtttttccctttcctgaatgtcatagagttggaatcacacagtatgtagtcttttcatgagtggatagctcttttttttcagtgctgaatataatccattgtctggacgtaccagtttatccattctcctactgaaagacaccttagttgccttcaagttttggcaattatgaataaagctgctatcaacatctgtgtgcatgtttttgtgtggacataagttttcaattcatttgggtaaataggaaggagtgtaattgctggatcatatggtaagagtatgtctgtaagaaactgccaaactgtcttccaaagtggcagtaccattttgcattccccccagcagtgaatgagagttcctgttgctccacatcctcaccagcatccggtgctgacagcattttgggattttggccattctaacaggtatgttgtgatgtcttaatttgcaatttcctaatgacatgatattgaacatctcgtatgtttgccatctgtgtgtcttctttggtgaggtatctgttcatatatttggcccagtttttaaatggataaagttcattttcttactgttgagttttaagcgttcttcatacattttggataacagtcctttatcagatacatcttttgtaagtattttctctgagtctgtggcttgtcttttgattctcttgacattgtctttttgcagagcagaaagaggattaagaatttgaaaagtaacagagtcgattaatagaaaggatgttagtcaatggtaaagataatttcagaggacctatagtttaggattttattctgtgtataacagaagaagttgtttgtagaaatatctgaataaatctgtgtggtagaatggttaaggttataggctttgcctgggataatagcagctcttcaaagcatctggaatatagtttagaaatggtatgaagtggacccaacagcttcttcctgagggacgcctatacaatgaccatttgttaagtaataaaccattgctcttgcttcccgaattaggtttctcaaggggttattcaattttattgacattttcaaagaacacctttgggatttatatatcctttctattgttttcttttctttttagagacaggatctcactctgtcacccaggctggagtgcagtggcatgatcatagctcactgtagccttgacctcctgggctcaagcaatactcccacctcaggtcccaagtagctgaaactataggggcttgccaccatgcctggctagttttttgtattttttgtagagacagggtttcaccatgttgcccaggctggtctcgaactcctggcctcgagcaatcctccccccttggcctcccaaagtgctgggactacagtgcagtggttcagacctgtaatcttagtactttgggaggccgaggcaggcagatcacttgaggtcaggagttcaagatcagcctggccaaatatgggaaaaaccattctctactacaaatacaaaaattagccaggcatggtggtgcatgcctgtaatcccagctacttgggaggctgaggtacaagaatcgcttgaacccaggaggtggaggctgcagtgagccaagattgtgccactgcactccatcctgggtgacagagtgagactgtctaaaaatatattttttctttgtatttttaaacatctttcattaatttttaactttaacttggatctgttttgtacttttacttttgttcttttcctaatcttaatagtagaactgggttttcatttttggtctttcatagttaataataaagatatttaattaaagttatacattttcccttgattttagctttaactgcaccctatacattttggaatgaaatttcctccttgtcattaattgctagattgtaatttgtcgttgcgttctctttgatccattggttatttaggagactgtataatttccaaatagttaagggttttttgtttttatttttgattttgggttttttgttttttttttttttggcattttaaattacttagccctaattttattggcctgtgacctgagactatgacctagaaaaccatctacttttaaaaatgtgttaacgttcgatgtggccatgtggaggattgatttgcaaagtggtttcatcaatataattttttttttttagtcatagggtacaaaattgtgtgtgtgtgtgtgagagagagagagagagaaattgatttgctgtcaattacactctacctgctggaacaggtctttgtgcaaggcagatctgtgggggatggtgaaggctctagttctagttccaaagtgatgccttcgccttgctcctaccaagattccttagatcttgctgaataaatgtttcacgatttgttgtcagccttttggtcaatctctagagacattgaatgatggcttttgctaattttgaccagtttaatagatgtctttctgtgggagaggtttccctgagcagctcatacagctgttccagaatgtagaccttctgggctctccgtgttctgtagcattggcctgcttgtctatccgtgtgccaatacaacgttgccttatttcatttaactttgttatctgataagcactctcaccatattctttttctttaagagtatcttggctatttttgagtctttgtatttttagatcaattttaaaatcaattgaagtttcattttttaaaaacctgttgcaatttttgggattgcatggaatagaatagacagctttacggtattgagtcttcagtccaagaacccatcacatctcttcatttaaggttttccttgatgtttcttagtttttaacttgtaaaaagtttcagacatacattaaatcagagggaatagcctggaccctcgcatatctgtcacctgggatttaacagtaataaccctttgctatatttgctttatatatttttcctttgctgaaatatttcaaagcaattctgctatcatacttgattcctcggtactttcaacgtgtatctccaacattttctttcataaccttaatgtcattattatatctaacagacaatacttattttaaaattcatttgctattttttactagtatacttacagactttttatattgaatgcatcagcaaccttgccaaactctcaaaattctaacaatttactgtattttgatacacctagtataccatcaattatcagacacaccatttatgtaccatcattcttaagacggcttccaactaagactcagtagctattgtgagatgcagcccaattacagagatgttcaaatattgtgaaatgtgtcttggaattgataaaacatggtatctgtggtttttttggattttctatgtaaataatcatattagcaaacaatgaattttgtttattcctttctcatccttgtatctttgtgtctttttcttgccttacagagttggctaggacatttaggacgatgtttaaaatgctgctggtaggcattcttgtgttattcctgttctcagagggaagatgttaatatttttaccactaagtatgatgtttactgttgttgtttttttcttttaatatcctttattgacaaaattctcttcctggcttgctaagtttatcttttgcatgaatagtggttgaattttatcagatattttgtgtgtattgcaatgattatgatttttccttttgtttaatttggggaattacattgatcaatttttcagtgctaagcaaaccttgcattcattcattgcgtaactccaacttggggagattattttacccccttaaatattgctggctttaatttgtcaatatttttgcttgggatttttgcagctacatccatgagaacggcttgtaactgtcccttttttatactgtccttgaatggttttggtatcagagttttgttaacctcataaaatgagctggggactacactctttttctattaactgggaaaacttgataacattggaactatttcctccttaaactttcggtagcactcaccagtcaagttctgtctaggtttgttctaagctaattttaatacatgaaatataggtcataaatgttctctgatgattttcagcagtaagaatatactgataatctcgaagtcataaatatggctagtccttcctgaccagtaaggaacagtacattgaattcacttgggcctatagtttgtgagattttaaaaccacttattctattccttttataggaataggactataaaagttttctatttcataggcaacttgggtaagctgtattttccttggagttttctattaaaaattgagtagtattggcctgaaagtatctattaatatcctcttatcttgtaatgtgtgcattgtagtgatatttcctcttccttcctaacattggcaacttgtgcctcttttttcacttgattgtgtcaggtgggtctcttataaacacatatagtagggtgttatttcttatccagtctgacacactatcttttaactggggcatttagctcatttacatttaatgcaattattactatatttgggttttcacttgccatgccattttgtgctttctcttagtaccatctgttccttatttcttttcccctctgtttgtgccttaagattttttttttttattcccctttttcttctctcctagtttggaattcattatatacactattttttgtctattattggttatcttagaaacaaaatacgtatcattaaattctcaaagtctagtgataatcattgttttaccttcctcctaaataacacaacaaccttggagcacttaactccatttacccacccccaacttatatgctatagttgctgtgtattttaattttacatattttaacacccacttgatatattatgttttataaaatttttatttaatttatcctagtagttacctcttttttcactccacattctttcttgaattccagtgcctctggctggatcacttgccttctgccttccattaatgaaggtctgctggcagtaaactctttttctttatataaaatgtccatttcatcttaatattttaagtgtttatgatttgtactggatgtataattctagattgcaagtggttttcttttagcacattgacaatatcattccagtgtcttctggcttccattgacttaggacttctcaacagcagcaattttaactgttgttctttacacatttttctctaactacttttaagatcttcctcttgtcttggcttttctgcagtgtccctattctctgtatagatgcagatttatttttatatgctctgctttggattaacttcttcagtctgtggaatgagccaccacgcccggcctcctggatgctatttctatagataaaatagtgggccaggtatggtggctcacgcctataatcccagcactttgggaggccgatgtggtgggatcacctgaggtcaggagttcgagaccagcctgaccaatatggtgaaaacctgcctctactaaaaatacaaaaatcagctgggcatggtaacacatgcctgtcatcccagctacttgggaggctgaggcaggagaattgcttgaacccggaagacggaggttgcagtgagccgagattgcacactccagcctgggcgacagagcaagactctgtctcataataataataataatttatttttgccaataaatcattattattttctttgtagctctttgatcaattaaaaacatttcgtctagattctttaattgtcctcactgggagattagatccaaatgatctatcctgctattactgaaagcagaagcctgttattattttttaagattcctttttcactaatattccatcttatgttgcaataacttgaccagtgagcacagtggctatgatttggattttgacttttacagagctttctttttaaaataaattgtgtatcaaagtaacaaatactcagctgggtgcagtggctcacgcctgtaatcccagcacttttggaaacggaggtgggtggatcacttgaggtcaggaatttgagaccagcctggccaacacagtgaaactcccatctctactaaaaatacaaaaattagccgggtgtgggtggtaggtgcctttaatcccagctacttgggaggctgaagcaggagaatcgcttgtacccaggaggcggaggttgcagcaagccgagatcgcgccattgcactccagcttgggcaagagtgagactctgtctcaaaaaaaaaaaaaaaaaaagaaaagaaaagaaaaaagtaacaaatactcataaaattaagcattaaaatatgaaaagttaacccaaaatctacccagaagtaatcataaacattactttagaaatctttctatgtgtattatagtgtctggcattttactatacatatacacatagatttctagaatatataaaacatgtttattaaatataggttattaaatatatattctagaatacatatatttttaatgtttaatatttagatagtatgctatatgtcatatggtttgtaaattatgtttaatattaatgacatatagtatgatggcatactatatgtcattatctaataaacttaccttaggctaagaaggtaaaactagaactgcacagtattccccaattcttgcaggcttgagcatgctggtccattacctttgtacccatttcaagggcaacttagctgagcacacaattctttctctccaacattattgttttctaacataagtgtttttgtttttagggtttttgtttgcattttaaagtgtgctatttttattcccttttttttaaatgtctggattgaattaacaagcaaatttgtcaggaaaggcacataggtccctattccttgaggtgatgttgacaatgcctgtctgtctattgcctttacaattgaacagcttatctattatcttctaattattttattttgcttctgcatctattgtggttccatatccatccagccacctctctattgatagaattttcatccatttctttttttttttttgagacgaagtcttgctctgtcgcccaggctggagtgcagtggcgagatctcagctcactgcaacctccgcctcctggagtcaagcaattcccctgcctcagcctcctgagtagctgggattacaggtgcgtgccaccacacctaatttttttttttttttttttttttgtattttagtagagacggagtttcaacacgttggtcaggatggtctcgatctcctgaccttgtgatccacccaccttcgcctcccaaagtgctgggattacaggcgtgagccaccacacccagccccatttctattctttaatgtgctgtttctacttctgtaattgtgctgatttgattttcaagtgctttccaccttttccttcatcacttttttgttgttcagggattatattttcttttagaattgcaccttcagccatcattttatacagatgctccttgatttacgatggggctgcaaccgcataaacccattgtaagtcaaaaatgcatttaacaatctgataaacccattgtgaactcaaaaaattgtgagttgaaccatcgttaagctggggaccatctgtacttgtttattttgctttactgtgttgcttatgtgctataccatttcttttaatcttgcttgtgtataataaattttatccagactattctaatttagttaagaatacattggatatctcttccacatcttatttttaaagcacggctgtattctattaaaaatttaagaaacagggtttccattccatactctgaattaatgaacagttgtttcaactgtggtttatctgccatggttcacagaaagcagaacaagaaaatttactaaacagggccaggtgtggtggctcacgcctgtaatcccagcactatgggaggccgaggcgggcagatcacaaggtccagagatcgagaccgtcctggccaacatggtgaaaccccgtttctactaaaaatacaaaaattagctgggcatggtggcgcgtggctgtattcccagctactcaggaggctgaggcaggagaatcgcttgaacctggggaggtggaggttgcagtgagccgagatcgtgccactgcactccagcctggtgacagagcgagactctatctcaaaaacaaaaaaaaaaaaaaagagaaaaaatgtactaaacatatctaccccttctccccatgttatcacattgggtagtacattcgttgttagcaactgtcatatttgctatgtctactacagcaataaataagtgggttttgctaggttgttgtacaatgaaacaattaattgttgatatcgagtttattgatgagccatttaccttcagatgccatactccagttttagcttcgactatctcattctacaaaagttcaccatcttcaaaatttaaacatagacttaccatttgaccagcaattccacccaagagaatcaaaaacatctatccacacataaatttgtacacaaatgatcatggtagcattatttatcatagacaaaaatgaacagaacctagatgtccatcagctgatgaatggataaagaaacatggcatatcatacaatggagtaatttcggccataaaaagaaatgaagtagtactgatacatgctatatcatgaatgaaccttgaaaacatgctaatagaaggaagaaggcagagagggccacatattgtatgattccatttacataaaattcccaaatccatagagacagaaaacagattagtgtttaccgcaggcttgggaaagcagaggtgggaactgactgctcatgggtatggggttcttttggggatgatgaaatagcctgaaattaaatagcaatgatgttgcacaactcagtgaactatactaaaaaccaatgaattgagcctgggaacaatggctctggcctataatcacagcattttgggagggtggcttgagatcgggagtttgagacctgggcaacacagtgagaccctgtctctacaaaaaagtatttatttattttttaattacccaagtgtggtggcatgtgcctgtagtcctagctgcttgggaggctgaagcaaaaggatctcttgagcccaggagtttgaggttacaatgagctatgatcatgccactgcactccagcttgggcaacagagtcagaccctgtctctaaacaaacaaaacaaaacaaaaatgaattgtataatttaaaagggtgaatcttatggtatgtaaattatatctcaataatgctgttactctaaagaaaaaaaggtcatcgacatgattatctactactcacatgctatagaggtcaattaataccacttgcaaatgagcaaggaagaagaaaggtttatttagccaaagagaatctgagaatcttgatactaagaattgctaattcatataatggcttagaatagttttacttcatactgtgatcaataatggattagctactttatccttatctaggacaaattccaagcataggcagctacagtctgaaaagaattattataagctagaatttttctaagaaaaagatttgttctcaggaatacgaaaatagatacaaggaactgacccagacatgacaataagtctaacaaagttaacactagtaataatgtgtcagataaaaggtagaactgagctaaaaactcaaactttaaaaatgtacagcaaatcaatacccagaagtaaaagagtcttgaatgttctagttcattcttctctccattttaggtactctcttaatggcatttttatggtaagttgagttacctcagaacctgccgtgcccctcctggatgcaccaggaaagtcacagatgggaaaggacactctctcacagcagctttgctccagtcaccaagcccaacactgcgaaccataaagcagcacacagggacttctttacaccaaaggggcccaatccagcccttccttctgtgcctgccacttccgggttggtgctttacagcgcttgaagggagaacaatgttctgtagtctgcaacacactccagaccatgttgacgctatgatcactatgtttgcatgattgcatagagcttaaaagaagaaacagaacaccaagtttcttgcactgaattcacatatgaaaactggaagagcacaactgttagttttcaaggtctttggctaaagcttcacgaatgaattgtaaagtacgctggtacaaaaaagcatcctttttctttggcttacaaatgttcaaatggttaacatccacaggaattagatctccaatgcctaaatctgaagaaaataaaaaagtcaataaacctaagtaaaaatataagctttccccttgacaatactgaaagaggccgaatgggtagttctagacattgctttggttgtgacaagggactcttaaaagataaaggaacctgaagtttgattgcagctaaactacatttgatgaaacatgcaggaagggattctcagtcagtagaaccatagttttatgctttccatgaacttttcgtatgtgttctggcctacttccttatttcagagcaagcagagattgagcactaacatattcaaaaccttcttacacctgcaggttattgctaagttacttcagagtttctattataaacttcctttctcctggtgaaatgaatgggaatgtctcacatgggatccattctatacctaaatcccaataatcactttcagggtaaaaatgatttagtgcttgagatatttcggtctaacaaagtcccctcgcacggaagtgataagaggtactagtgaggccacctaggtgaggaatgcaggtggtggttatgaaggaagaaaagcctcttggtgacagaattagggcaaggctatgccactccaagcagctggtccatgatattaactttgcttttgggcgaggcacagtggctcacaccagtaatcccagcactttgggaggccaacgcaggaggactgcttgaggccaggaatttgagaccagcctgggcaacacagcaagaccccatttatacaaaaaatttaaaaatttagacaggtgtggtggtgtgcgcctgtggtcccagctactcaggaggctgaagtgggaggaacgcttgagcccaggagttcgaggctgcaatgagctatgattataccactgaactccagcctggatgacaaagtgagaccctgtctcttaaaaacaaaaacaaaaaactatgctgttgcttcaagcttccaaagtcctttttaaaaacatctggcagctgttctttggaactcttcaagttcttcaactactaaatagtaactcctcaacctacagcatattactttaaggtaaaatttttcagttctactacacagtatgacatttttcattttatgtagatagcatataatgaaattaggacaaaactcattatgtagacaaaagaaccatctggcaagcactccagatgcatgctgtccctagcctgaaggacccacaatgtggctggctaccaccagaacagcacctaagccagcctcagaggcagtaagaaaggggttcccagagataacaggcaagctgaagacatggccaggtgaggcaaaagcagttcaggtggtgaaatgtacagggtatctagtatgtacagagtaacagaggagtctatgaagagagttaattaagatctgggctcctccctcaaagaatctataatacattatatgacactagagagcaagcactggccatttccctcaaccccaggatcatgaagagattgtagttcaacactagtttttcccactggaatatttctggagctttactattccccatggatcttctatttacgaaagcttccacacttttagatgattttcttaagggttctgcatgtaaatataagtctaagtctattaaataaatgccccttttgatctagctgatagaagagctttctttactgcaaaagagttcactgttgatgcctaacttagagttagccaattaacccttctcatctaatcagttacataaagggcagggagaggtaatacccgggttatatgtttacagagaaattttaatctattgctgaaaagaataaaagaaatcaaatctagaccttcataaactatctcttaaaactgagaacctggatataaaaattgctgtttacaagtaaatgctaggtataattaagcatctaacagccaacaagtttcaaaagagtgaatacctgctgattccacaggtaccacatggagcttaatcatgctgccaatgtaggttggtagtgtttccacaaaattcagcacctggaagtttttgtctttagcaaactccagaaagtcatcttgtagtgttttaagtgcaggagaatctgtaaaattatacagaacaagactgtgacaagttgtttacccaattcataataaaatgcattaatctttcaaatttagagaggaaattagaattctgattcaagacggtggcttgagtacacatgtttattttctcccctgccaagaagccactaagattcaaggaaaaagctaaaaccaagaatcgacaggacagtcagcagcaggagagggtttatcacattactgggggcaggaagcagttcccagggcagtctggtgtgtgggaccacaggggtcctccagtgtgatgatggcaccacaacacccaccccaaagcccagcctcccaccaacaaagcctgtctacaatcacagaatgcctgtcccttcccatccctcaccctcacatatgaaagagcaaccaagaggcaccagataggcctatgacctaaaagagatggatcagataagcaaacagaaaagctggccacagaaaaaaaacagctagatgaggagtagaagggaactcacaaaccttctacttaggatctttagaattatttgaaaagataaaggagccacaaaacaagaagaggacatgagtgcagaaccaccagggcacaggaaagaaggcacgtacggaaaacacaatctgactccacgaaaggaaagtccaacagaaggtttagaagaaatcaagagattctccataaagtagaacaaagagaaaataggagcaaaaagacacctggtatatttaggctcgagccagggaatccaaattccgattaacaggtgttccagagagaaaactgcttatcaaaccagagtactttaaaattaatactaacaatctcaaagtttcatttacattttaacagttgatgattctccactcatgggggaaaaaagccatttattggtaatttggaataatacttaaaagcaaaacattatctgattatttttctaattttaagtatttaagataatattaaaattattacaatgcttgagtaaataatggcttaagaacaaaatgagaaattatcaaagaaaaatcaagcccaacccaaaatttccatgaatagtctaaacacaattatatacaaattataaaatgagataatacattcaaggaagaaactttttcttcttctctgtgtaactgatgttaatataaccccaatttcctttatgacaaaaagtattacccttgctgagttctttgacttccaacgaggggaagagaagatagcgaatattaacagagtattcagccaaacgtgatccatgatgagggacactataaaaaattattcctctggtattgttgataacagtactcatttctggcttcgtagaggcttccaacagcatctttttgacaagaagacctagccacagacaagggaaaaaaacaatgcataagctattttccttccctttattactgtaaaaaaagaaaaggccaaacaagaaatacataaaaagagatgctttctttttaaaaaaaatggtttaaacaattctctgtacagtagtataagaaataaggccttaaaacacttaataatactcctgatccttatagtgcaagcctacaaacagggattctagaaactcatttgtagggcagagccttgtctcacaggatctactgtcccagtgcaggaacatgaggtatgcccagctgggagctccctcaggacatgagcgtggtgtggctggtctctcagcctgctatggcagaccgctgatgaccacactgtcaggacagtgctactattccacagcacacagtcccccatggagaacacagctttcatgggaactgttcctctggaggcaccttttcttccatccccctgccccggctttggaaccgataatgaaacacaaagatctaaaggatgatgacagtaggtctttgaggacacgaagggctacacccacctttgtctcagcaaaaatccccacctcagaggcaatcctgagtgcttcatcagataaactaggccacgggctgcagaaaggccttctgcaaggtgggtggtgaaaatttcaaagtggactgggggagtcgcacacaggggaggccattccataagcaaccactaggaccccaagaacagacacttgatcacacctgtacctcagcagctctgggcctggtgtgagcaggcacccagagtctgggactgtgggcactaaagcgaccatagactgcaatggtgagggggagcaggaagaataaaggggcacccctggggccacccaagaatgctgaggcatgttgacgaggtgggtgtatatgaaacgggctgcttctcatgtttattcattaccgctatgtgaaagcactacgctgtcaaacccatatccctcttagatgatttgtaacaggttgcccttttctagagaaaggaacagcatggaacaagagtagtaattttaaaagtcctagccatagctacacagattaatttagcagggggggtaagggagccgctattaagtaaaatggaaagataaaataactttaggttggccacagtggctgaaaataacatcacaatggccacttcacaaagttgaagccacacttacctcccatgctatgtgatatccaaaccactggcctatccccaacaccagcagctctgagcttcctaagaagttcgttgcttctgaatgcaatggactttctgaacaaaacaaaaacagcaggcatgacacaaggctatcgatcccctcaatttgctgtctaatttttagagttaagaactttagtctacaggaccaatgctacatactacatttagagtaagaaatacccccattctctctgcttaatataaaatacccctattctctcttattgaactcctggccccaaggaatcctcccacctcggcctcccaaagcactaggattataggcatgagccaccacgcctgggatctctctgctcaattcctgaaatcgttaattctctatttgtaacttattaacattggcctaattaggaatatctaagcccagaacaggccattcatttactgcatgaacattgttggagcacctgtgtcaggcaattttttcgggtcaaatgtgggtctccctgcaactgccctccaacacttaggatatggatgtcctttttcatccaaggcctgacaatgaaagtatcaccaaagactgtggtctctctactggtagttaggctgcaaaaatattaagctttcataattttggtttattctttagaaatactagggtgctatttagaaaaactagaatgagtcaagtttattagcacttattccttccaatgcatgcttttataactagcataaacaggatgctaatagaatcagaattcgaaataagtaatttttaaactaaagaggaacttcaaaactatctagtctggtagtttcaaactgtttatttgtagacacatttcttcaaaataaaggttctccagagctcctctgggtgaaatggggagggagacctggggtcttgcctgctcaccttgacacccttcttgggcacctacgggaggttcattcagaaagcagtttgataacactgatttagaccaactctgtcaatctgtagacaaagcttcccggaaaagttaactgactggtctaagactgcacagcaaatcaaaggtaggatccggctactctcagtccagtaactctgaaatccagcactccttcccatgtatacaactggcacagatgacatacaagggaaatagcagctgatatttctcagcatctttctctttgcttcctttagccagtatgattgtggacacaagaacaaaaaaacatcacttttacttctgatagaaaaggagactgctagacaatccacgatccttcactattagaacagttgtaaataaaccatgttaggagcccaccattggtgatatacctaagccttctactattccactgcttattgacagcaaactccttctagaaggaagacaaaaaagattaggtttgttcttcataagaaaatcctgtctgtggcatcaaaaaattaaaatcacttcccatccaagaggacctaaacttgcggcctgaattcttccctgtcctcctggtctaaagtcgcctctgttacctttccatagggcaccttgctctccagtcgctgaggctggtgtcatactccacagatataattcggagagcaggacagtcttttgctaaccatgtctaagtaaaataaaacatatgtgagaacaagtatgaatcttcaccactgcaattactgcctagtaaatcaaatttataactaaaggcctcttgcactataattaaagatagcactggaataaggtttgaaggtaccgtaaaaacaattccagcactatcttttcaagtctctggtctcgaagtggtaccagtatttatagcataaggccaatgaaggtttcaagagaatattttccattttaagctgctatagccaaaagcaaggcctgttttaaagtctagatcaagttggctttttgaaagaatttagtagaatgctataatctcaggacagatggcatagtctgacagattttggatctgagaattcagagacactaataataatcatcacagttctatctctgtataccctaggtctatcatcatctctgtacttcagtgccaccagaaagtgcaaatcattcttctacttgataagcctttgtgaaggagaataagtagtaatggaacaatgccctaaaaactattcacacgtatatgcagcatcacttttaaatgagctttagataaattccattcaatgaattcattccagaattaaggttctttgggagaaatagtatcaaagaaatgtaaagtattaattagccaggcatgatggcatgtgcctgtggtcccagctactcaggaggctgagggggaatgactgttt

SEQ ID NO: 5661 - DNA, 239169 bp, Homo sapiens
  TULP4 gene - 158704101 - 158903269 of chr6; NCBI Entrez Gene ID: 56995; Build 35; sequence includes 20,000 bases upstream of initiation codon and 20,000 bases downstream of termination codon of the gene
ttatcaacgtttattcaaccaataccctgtttggacatactgattatctcatatttttcccttatacaaacgctataagaaatccttatagccaagtctttgcacagtgtaagattatttccttacgataaacttccagaagtggaattgatgaatcaaaaggttttgcagcattttaagtctttttgaattatatcaccaaagtactctctcatttctgtgtaccctgtgtgacatgtgacacaggctattatttctttcagacttcgttgctttgataaataaaatgcccccctttttaatgaaggcacctgacttttgatactggtgagccccaatatggtaccacagtattttaatatctgagtatcaggtgtagattcactctaagaagtagctaacttccactttcttttaaactactaatcaagcagtttgtctgcaagctccattccctcctctctctgtacagataattacatgttcatattctcagaatcggctattgaaatcagccatataaagtaaatagggagtagctttccttgaaaatacacctctttgtgattctctgaacttggcagtggacctgtggcccttgtggcttttgctcacagggctgaaatgcccacagccttgggcttccaagtggctggtgttgacctggggttcacacacagaaactcattcagttcatgtttattgtttcccacttccctaaactgaggcaatgtgccatgctcagtaccttattgaacacttaattcagtgcaggggtactggtgggaattgcaggtagcataaaaattggagtaaaacatagcctctgtttatgagtatatgatttaggtagggataattaattaaataaaaaattacctctaccacaggcagaaagacccttgctatatgagtctgcttatgtgctcagtgcttctgtgtgccacacctgaaagagatggttgtgttctgaataagacagaattctatagactccacctctgtaagttacaatgcaagtcaatgggaaaatgatttgagactaccacagttgtagaaacacatcttttgaataatcctagtcatacattatttatctcactagcacgttttgagaattagaggtagaaaatgataacacaataaatatataaaatcattgttaaatcccattacctttgcagggatgttagtttcttctggatgtatgtgtttccctgcgtttgtcaatagccacataacgagtggctactgagagtattccagccttcaaaggcaggctctgagtgcaaatttgaaccagcctcggggcagccattaaaactaattaggaaacaaaactacctcatgctcagtgaatatttgtaggttctggaaaattctgaaaggaaaggagtgattctaattagaagcaggtcatcgggccaggcgcagtggttcactcctgtaatcccagcactttggaagaccgaggcgggtggatcacctgaggtcaagagtttgcaaccagcctggacaacatggtgaaaccctttctctactaaaaatacaaacattagctgggcgtggtggtgggcacctgtagtccagctatttgggaggctgaggcaggagaatcgcatgaacctgggaggcagagattgcaatgagccgagaccgtgccactgcactccagcctgggcgacagagcaagactccatctcaaaaaaaaaaataaaaaaaaaaataaataaagcaggttgtcatagttactttatttaaaaagaaatgcagagttcaggacctgcttccatctgtggacagaagggcaacgaagggaggcctgggtgtggagaggaggaaaagggacagaaagcacaggatccctgttcctaggtagtagagctgtgaggacgtcctgtgtccacatcctccatgggtccctaaggtagcagagtcagcctcccaggaggagaaactgggatgtgtttgattcaaatcattaaacaggaaattctcctcctcctcctctacttccttctcttcctcctcctttcttcctcttccttcttcctcttttttcttctttcttcttcttcttctttttttgagacagggtctggctcctgtttcccaggcctggagcacagtggcgtgatctcagcttactgaaacctccacctcccaagctcaagccatcctcctacctcagtctcctgagtagccgggactacagtcatatgccagcatgcctggctaatttttgtagagactgggttttgctatgttgcccaggtcctgggctcaagtgatctgcctgtcttggcctcccaaagtgctgggattacaggcatgagccaccttgcctggcttcctctctttcttttcctcaacctccaagcaaacctgtagtcaaaagctgaaacattagggtgtttgcatattttattgaaaattttctactgtatatttttgtcttgttttgtgttcatctgacacgtgtatatttttttccaaatctacttttctgtttaagcactgtcttacattgttatcctttagaagaaatagaactttgttctgaagttttatatccattcattactgttaatgtgcattttctttgtagacaccttagcttgagaactaaaatagcatctttatgctttattggaattttctagattgggagagtaccccttatggttggatacaataatttaaaaaaaacttccttactaatttttctaaaagtcccccaggtctgatgcctaatgtagttcacagcttgttaaacctgtttatatcaagtttctcaagttaaaaaattctcaaattaaaaaaaaaacaaaacttacttgttgtgagatatacatacagaagcatatgttataaagtgtatatatgtaataaagaataaagtgaacaccccgtaactaccacccaggtaaagaaatatggccagcattggccaggcatggtggctttcgcctgtagtcccaacactttgggaggccaaggtgggcagatcacaaggttgagagatcgagaccatgctggctaacacagtgaaactccatctctactaaaaaatacaaaaaaattagccgggcctggtggcggatgcctgtagtcccaactacttgggaggctgaggcaggagaatggcacgaacctgggaggcagagcttgcagtgaaccaagattgcaccactgcactccagcctgggcaacagaatgagactccgtctcaaaagaaaaaaagaaatatggccagcatacaagcaacacacctttgtgtgcctctcccggctcacaatagccaccccccaaataagcaacatgctgctttttgtaatattttttctttttaatttttagtcgtaccaccaatgtattctctattaactgataaaattagtttggcttgtttctgaacttcatataattgattcatattataggtattctttcataagatccttccttccccttccttttttctctttttcctttccttttcttattttctccttcctttctttcctttccctttcccttcccattcctttttctcttcccttttcctcatggctcactgtagcctcgatttcctgggctcaagcaatcctcccatattgggggaacccgcccccaatatttcaacgtaggttctattttccataagtgtcggccagctgagaaataaagagagacagtataaagagaagaattttacagctgggccgccggaggtgacatcacatattggtaggactgtgatgcctgcctgagcctcaaaccagcaagtttttattaagggtttcaaaagggaagggggtgtaagaacaggtagtaggtacaaagatcacatgcttcaaagggcaaaaagcagaactactgataagggtctaacaaagatcacatgcttctgagggaacaggacaaagggcaaaagcagaactactgataagtatcgggggaacccacccccaatatttcaacgtaggttctttctattttccctaagtgtcagccggtctgagaaataaagagaaagagtacaaagagaggaattttacagctgggctgccggagatgacatcacatattggtaggtccatgatgccccctgagcctcaaaaccaacaagtttttattagggatttcaaaaggggagggagtgtatgaacagggaaaagattacatgctttaaggggcaaaaaagcagagcaaagatcacatgcttctgaggaaacaggacaaggcaaaatcagaaactcctgataagggtctgtgttcagcagtgcacgtattatcttgataaacatcttaacagaaaacagggttcgagagcagagaaccagtctgacctgaaatttaccagggctggtgtttcccaatcctagtaagcctgagggtactgcaggagaccagagtgtatctcagtccttttctcaaccgcataggacagacactcccagagcggccgtttatagacctccccctaggaatgcatttcttttcctagggtcttaatatttaatattacttgctaggaaaagaatttagtggtatctctcctacttggcacgtccatttataggctctctgcaagaagaaaaatatggctgtattctgcctgaccccgcaggcagtcagaccttatggttgtcttgcattgttccctaaaatcgctgttattctgttcttttttaaggtgcactgatttcatattgttcaaacacacatgttttacaatcagtttgtacagttaacgcaatcatcacagggtcccgaggtgatgtacatcctcagcttacgaagataacgggattaaaagattaaagtaagacaggcataagaaattatgagagtattattagggaagtgataaatgtccatgaaatcttcacagtttatgttcagagattgcagtaaagacaggcttaagaaattataaaagtattaattttaggaactgatatatgtccacgaaatcttcataatttatgttcctctgccacggctccagctggtccctctgttcggggtgcctgacttcccacaacagataagggtccaacaaagatcacaaggcaaagggcaaaagcagaactactgataaggttctatgtttagcggtgcacgtattatcttgataaacatcttaaacaacagaaaacagggtttgagagcagagaactggtctgaccacaaatttaccagggcggagttttttcccactctagtaagcctgagggtactgtaggagaccagggcgtatctcagtccttatctcaaccgcataagacagacattcccagagcggccgtttatagacctccccctaggaatgcaattcttttcctagggtcttaatatgtaatattccttgctaggaaaataatttagcgatacctctcctatttgcacatccatttataggctctctgcaagaagaaaaatatggctgtattctgcctgaccccgcaggcagtcagaccttatggttgtcttcccttgttccctaaaaatcgctgttattctgttctttttcaaggtgcactgatttcatattgttcaaacacacatgttttacaatcaatttgtacagttaacacaattatcacagtggtcctgaggtgacgtacatcctcagcttacaaagataacaggattaagagattaaagacaggcataaaaaattataaaagtattatttgggaactgataaatgtccatattaaaatgaaatcttcacaatttatgttcctctgccgcagctccagccggtccctccgtttggggtccctgacttcccgcaacatctctccctttctttttatataaatgtgccatggcgatgaaggcttgttcgttctcccagttttgacacaggattctttgactggtctggcacatggtatccagattccttcttgatctcgaaccaacattatacttttcctggagtcaaaacgggagttaacacaagtgtataaatgacaattaatgcattggacagtttgattgttcgtccaaattttgatattttccactaacagcatgtaaggaggcttaacacaactctgtataggagtagtcaggttggcggtaaacaaagcagaatgtttgagtctacgttgatactgagggagaggagcggcagtggcaatgcccaatgttctgcgccacaaagaagcaatcctaggtgcccggggatgccgaacaggtagaggagcatacctgggtcaagaagaattatcataatgccaattggagtcccataaaggaggatcagcatcaaaaagagggaaaaggttcaaaggggatttatcatggagttcagaatcacggatgcaaggggcggtagtggggacaacagacagaaacgtttccccttcccatacttgcagtctggacatggcaatagccaatttccaaagttctgggtgttctgggctcggaatggggagtatccatactaggcctcggtcggggtggggggtaatgcccttatcttcctgttttaaggaaaaggacgagctgaacctcctatgccaagtaggatgatgatcctcgtcatcccaataagaaatataaaataagtagcctccaggcattcccttctgccagaggagcaatcgttttttaaatagccctttggtgcccagtctattactaaaccatatgagtcattttttttaatactactgcatgtgaattaacacaatcttcccaaattaaagttttagatgggccctcaaaatttttaggacatggttttcctacaggtttatattgaaggtatggggtatctcctattactccccctttcatttgtcttaaaggagaaagggagaggccggagaccaaatgtccccattcccttgtggctgatctctccagaaggtaagcagcccagacttgagtttctagatggatacaaccaggtgcatgtccaaagcccagaggagggcatttataacccatagtaacattaaatgcagtgctttcttttcctggttgagcagggcaatgttcatctgtagctccaggcagccacacacgatatcgttagcatagatttccacaggagcatccatccaggtgagagattgaataagtgggggaaaaagcacataagcctaataagaataattttgtgtagcaggtaaatcagtttgaggggaaactggtaagacaaagtgtaagggggagaattattaaataaaacctattataagcgagatccagtgctaaaggaggaagagaagaacagggggatgttattttcaggctaatagaaatggtgagatttttaggttcttaaggagaaaaagggaattaggagaagtgggattagttagaggggtctctgttgccattagggaggattgaaccacacccattttaatttggcgtgccagtttctgaggagtcggcacagatctcaccaggtatgaaggtggtctctgacgcagacgtctcttccctatggtttttattgtcagtattcacacgaagtttaagtctcctagtgggcacccagacaggggattgatgatctcctggtgaaacacaagcataccctcttccccacgttgtaattgttccagcttcccaggtattggtctgggagtttttccctaacactggcttgccttcatttagggagaattttttgcctgttcagctgcagtcagagtatgtctttaggaacatttagaaagtttaaagtaaacaatgctaaatgtaactgggagtggggagtggttaaattatgcttttgttgctcagactgtttggacaattgagtttttaaagtgcaattggcctgttccgccacagcttgtccctgaggattgtaagttactctggtaatacgggaaattccccattgttgcataaataaatcaaaagccttactaacatatccaggggcattgtctgtctttatttgatatggaagccccataactgcaaagcaagaatacagatgtcttttaatattggctgtgccttcccgtttggcaagtagcccaaataaaacctgaaaaggtgtctacagaaacatgtacatgtgaaattctgccaaaggagctaacatgagtcacatccatttgccataaatcattaggagttaggtctctgggattaatgccaggttcctgatttggaagtacaaaaacttggcactgagggcagtggtggacaataagcttagcctccttccaggtgagagcaaatttatcttttaatccagcagcattgacatgagtgagattatggaactcctgagcttctcggattgcaatagagaccagtcgaccttatcgttaccagcagacatgggtcccagtagagtggtatgagatctaatatgtgtaatatagaaagggtgtctacgttggcgaaccgcctgttgtaaccttgaaaataaagaagccaattcagaattaccaatatgtttgatagtagcggtttctatatttttagtggcatgtacaacataagcagaatcagagacaatatttaaaggtttggggaaatcctgtaaggcaataattacagcaattaactctaccttttgagcagaggtataagggttagaaataagcttgtctgtaggacccacataaccagcatttctgttactggagccatcagtgaacactgtaatggcctcaggaatgggctgatctttggtcaatcaagtgaccacccaagaagtcatttttataaaatcaaacagtttttttttttttggataatgattgtcaacaacactgataaaatcagccaagtgaatttgccacagtatggaatgttgaaaagtggcctgaacttcgagttgatttaaaggaaccacaattaaattcggatcaaatctggaaaatttaagtattctacaccgagcttgtccaattagggtggccatttggtccagataaacagacaaagtttttgacacagaatgaggaagaaaacaccactccactaagtcattatgttgaactattagcccagtaggggagtgcaatgaagcgaaaaccagaagctgaaaaggctgagacggctgtaccctagacaactgggcagtttggattctttactccatgaattccagttctagtgaagcctcaggggtgaaagtcctgggactgcagagattggaatctccacacagcatagaaaacaagttagatggcgcgtatgttgaaatgcctaaagtaggtcttaattaatgttatctaaaagtttttggaatcatttaaggttttcaaagaatctctcctaatctgaaccttttgaggttgaatatattctttattgaacaccattcctaaatattgaacaggagtggtctgttgaattttatcctgagcgatgtgtaatccagcctctttaacacaatggctcaaaaattgttaacagtcaattctttatcagtgggggcagcgattaatatatcatcaatataatgaagaatataggcctggggaaattgagctcaaagtagtgaaagcacctgtccaacataaagctggcagatggtagggctattcagcactccctgaggaagtactttccattgataacgagctgcaggctcctgattattgatagatggtacagtaaaagcaaatttttcacaattcgatttatgtaaagcaatatgaaagaaatagtctttaagatcagtaactatgagaggccaattcttaggtattaaagcaggggcaggcatcctgggttggacagctcccataggtttaattacagcattaatggcccttaaatcagttaccatcctccacttgcctgatttcttttttactagaaacacaggagacttccagggggagagagaaggttccacatttccaagttgtaactgtttagcaaccaattgagttaaagcctccagtttttcttgagagagcggccgctgctcaatccaaacaggtgtttcagattttcattgtagggaggcatagcagtggctgtcattgaaaaggatgacctaaaccagccctcttctacagtaacttgaagaggtttagtaattccttcatgtcttggaccgagaccgagtccgggaacaaaccccatgttttccattatattttgactgggagcactgtaagagttatgtggaatattaatttcagccccccactgtgtcagcaaatctctaccccaaatattagtggagattggcatgatataaggctgaattttacccttttgaccctcagggccagtgcaaggcaagataaatgtgctctggtgaacttcatcagcttttccaatccctgctagttatatgttagtgggatgtttacgccaggaggaaggccataaattagaggaaataatagaaacatcagacccagtatctagtaggcccttaaacttttttccttgaatgtgtatggtgcaggtgggctgttgttcagaaattacattaatccaataagtggctttttcactgtcagagcccatcctaggaccccgtgtcttatctcctttgtttaaaacaatattaggtagtaaaagtaattgagcaattgactcaccagccagagtggaaacaggaatttcaatgtaggttctattttccgtaagtgttggccggctgagaaataaaggcagcagtataaagagaggaattttacagctgggcctctgggcatgacatcacatgtcggtaggaccgtgatgcccgcctgagcctcaaaccagcaagtttttattaaggatttcaaaaggggaggggttgtaagaacagggagtaggtacaaagatcacatgcttcaaagggtaaaaagcgtaactactaataagggtctaataaagatcacatgcttctcagggaacacgacaaagggcaaaagcagaactactgataagggtccaacaaagatcacaaggcaaagggcaaaagcagaactactggtaagggtctctgttgttttcagtttggagctgatgtaaaccctgctgctgtgaatactttgtatgtgaataccttatatctacctccccttgagcactcacagacaatgtgttgtggtgcacacactcaggagtgggaatgctatttgcagggtattcacgtcttcagtaatactagtaataccaaactattttccagagtggttgcattcttacaacttgtaatgaatatgtttctgttaaaattgtgtaagtggaaaatatcttccctaatttatctccagtctctaacgttaattcaaacggtttagaaaacaaaacaaaccaaaaatgcttttttacctctccactcccgatggtaaattttatctgtgttggtggaaaataggaatcagataacacaaaacaaattgtagtgaaaataagttagaaagtagaatatctaattggggacaagagagggagagaacacagcacaggggccttgtgtataatattaataatattaatagctgtttaatgaagatttattggttgattaatctatgggtatctaacatacctgatacaccatcctgtccctaggttgaactttccaagcaagttctggggctccttctttgccattagaactggatcgtatggaagctagagtgggaagcatcttatgtgtttcattactggcatctagaaccctagcaggtcattaattcaattagacacatgtattctttggtttgagattctaatatcctaaaagcaggtatgggttttgtactgatatacaggaatgttctgaaaataagctgtaattattagaaacaggtttgtttctaataatatctgtggaggtcagcattatttattcttaatgaaaacacccaggattgcccttgggcctgtgttaacagtgctcagggtaaaaaacatcataatgacaagcagagtaatatttactttcaatctgttattgaaagactttatatgaatagttgctttttaaccaacttatctcattttttaaattgaggggaaatatatataccattaaatttaccaattttaccttatttttttttttgagatggggtctcactctgtcacccaggctgaagtacagtggtgtgatcatggcccgctgtagccttgagttcccgggctcaagcaatcctcccacctcagccttccaagtagctgggactacaggtgtgcatctccatgtctggctgatttttttattttttgtaacgacggggtcttgctatattgtccatgctggtctgaaactcctaggttcaagccatcctcctgcctcagcctcccaatgtgttgggattatgggtgtgagccactgtgcccagcccatttttaccatttttaaagtgtacagttcagtgatattaaagtacattcacattattttgcaaccatttgccttcagaactcttttcatcttacaaaactaaaactctatacccattaaacactaactctttatttcccctcccctcagcccctggcactcacccttctacttactgtttctatgaatcctactgctatctactcttggtcccttatatcactggagtcataaggtattggtctttttgtgactggcttatttcacctagcataatgtcctcagagttcatccgtttggtagcatgtaccagaattactctcccttttaaggctgaatgatatttcattctgtgtgcgtgtgtgtgtgtgtgtgtgtgtgtgtgtgtgtgtgtgtgtacatataccacattttgtttacccgttcatccatcagtggacatttgggttgttgctgggtgtggtggctcacacctgtaattccagccctttgggaggctgaggtgggaagattgcctgagcccaggagtttgagaccagcctgggcaatataataagaccctgtctgtaccaaaaattaaaaaaaaaaaattagctagcctggtggtacgcacctgtagtctcagctatttgggaggctgaggtgggagtatagcttgagcctaggagttcaaggctgcagtgagttgtgatcacgtctctgcactccagcccgaaagacagagggaaaccctgtctcaaaaaaaaaaaaaaaagtcatttatattggtttcaccttttggctactgtgaatcatgccgccatgaacattggcatacaaatatctgttcaagtttctgctttcaatctgatagttgctttttaatcattttataccaaccccccttactagtgttgatttgacaatattcttatcattccttggaaacttaatcagtttagttaccattctcgttttctcatctttatgagaaaaggtagaaagaaaggaagtgaaatgcccaacaccactcatttttgttaatggtattgataaaattggcaccagcctttcaggaattcggatgctttgattgttcttttttgttgttagatttttgtatccattatgcattttgaatcataataaagtggaattaaaaaaaactgccatatttgtctagcatatatggcgttttatgattttaaagatatttttaaagtttggttaaaaaccttaacagtatatgtgaaatggaacactgtgcttttactgtggaaatttatcctatataccttaataaaatagttatttaagatttacatttggctgggtgctgtagctcatgcctttaatcccagtactttgggaggctgaggcaggcagatcacttgggcccaggagttttcgagactaacctgggcaacattgggaaaccctgtctcttcaaaaagtacaaaaagttagccgggcatggcggcatgcgcctgtagtcccagctcctcaagagtctgaggtggaaggattgcttgagcctagttcgagggaggttgcagtgagccaagattgcgccactgcactgcagtctgggtgagagtgagactccttttcaaaataaagaaagaaggaaagatagatagatttacattttagagagttagtatatgtctgtgatttttgaactttattgtttcagggctcctttatattcataaaaattattgaaggtccaaaggaacttttgtttttgtggttatctgttgatatttaccatattagaaattaaaactggctgggtgcagtggctgacacctgtaatcccagctacttcaggaggctgagcaggggtggatcacttgagcctcggagttcgagaccagcctggctaacgtggcgaaaccctgtctctacacacaatacaaaagttaactggatgtggtggtgtgcacctgtggtcctagctactcaggaggctgaggtgggaggatttttttgagcccacgaatttgaggctgcagtgagctgtgatcacaccactgtactccagcctgggcgacagagtgaggctgtgtctcaaaaaaataaaataaaactgataaaaaatattccctaatttattaaaaacataaacccattaaataagttatatatttttatgaaaacaactgcttgtcctaaaactaaaacatttaataataagagtgtattgttttatattttggcagcaatatctaatgtctggcttacttaaagatggctaggttctcatatttgcttctacatttaatcttgcaatatgtcgtttttgttgaagtatatgaagaaaattcagcctcacacacatatataattggaaaagaaaggaggattttaatagtcttcagataatcatggatgtttttctttgataaccacactaaaattcaacaagtggtagtttctcaaaggttagttgcaatgtagaatttgaatgaaatatatcagtgaatttttcatccttggttacattaaaattcatttgtcttctttgcactttttttgttttgttttgtttttgagacggagtctcactgtcacccagactagagtgcggtggtgtgatgtcggctcactgcaacctccgcctcctgggttcaattgattgtcctgcctcagcctcctgagtagctgggactacgggcacctgccaccacacccagctaatttttgtattttttagtagagatggggtttcaccatgttggccagcccggtctcgaactcctaacctctggtgacccccgccttggcctcccaaagtcttgtaccttgaatggatcttttactcaagtataatttctatcatctttgttggtcatttggaaaatattggtttaccaagtatgtgagtcttccaaatattgatatataatgaaatatgggataaaaaataaaaaaaatcacatttattaacatcacccccagttacgtggggagctcgcaagctcatagtgatgagtgctgattttcgcaaacatctaaatttaacttgaaagctcagtttttcttttcttttttttttctttttttatttttattgatcattcttgggtgtttctcacagagggggatttggcagggtcatgggacaatagtggagggaaggtcagcagataaacaagtgaacaaaggtctctggttttcctaggcagaggaacctgcggccttccgcagtgtttgtgtccctgggtacttgagattagggagtggtgatgactcttaacgagcatgctgccttcaagcatctgtttaacaaagcacatcttgcaccgcccttaatccatttaaccctgagtggacacagcacatgtttcagagagcacagggttgggggtaaggtcacagatcaacaggatcccaaggccaaagaatttttcttagtacagaacaaaatgaaaagtttcccatgtctacttctttctacacagacacggcaaccatccgatttctcaatcttttccccacctttcccccctttctattccacaaaaccgccattgtcatcatggcccgttctcaatgagctgttgggtacacctcccagacggggtggcggccgggcagaggggctcttcacttcccagtaggggtggccgggcagaggtgcccctcacctcccggacggggcggctggtcgggcggggggctgacccccccacctccctctcggacggggcggctggccgggcagaggggctcctcacttcccagtaggggcggccgggcagaggcgcccctcacctcctggacggggcggctggccgggcggggggctgacccccccacctccctcccggacggggcagctggccgggcagaggggctcctcacttcccagtaggggcggccgggcagaggcgccccttacctcccggacggggcggctggccgggtggggggctgacccccccacctccctcccggacggggcggctggccgggcggggggctgacccacccacctccctcccggacggggcggctggccgggcagggggctgacccccccacctccctcccggacagggcggctggcctggcgggggctgacccccacctccctcccggacggggtggctgccgggcggagacgctcctcacttcccagacggtgtggttgctgggtggaggggctcctcatttctcagatggggcggctgccgggcagaggggctcctcacttctcagatggggtggttgccaggcggagggtctcctcacttctcagacgggacggccgggcagagacgctcctcacctcccagacggggtcgcggccgggcagaggcactcctcacatcccagacggggcggcggggcagaggcgctccccacatctcagaccatgggcagccgggcagagacgctcctcacttcctagatgggatggcggccgggcagagacgctcctcactttccagactgggcagccaggcagaggggctcctcacgtcccagacgatgggcggccaggcagagacgctcctcacttcccagacggggtggcggccgggcagaggctgcactctcggcgctttgggaggccaaggcaggcggctgggagatggaggttgtagcaagccgagatcatgccactgcactccagcctgggcaccattgagcaccgagtgaaccagactccgtctgcaatcccggcacctcgggaggctgaggctggcggatcactcgcggttaggagctggagaccagcctggccaacacagcgaaaccccgtctccaccaaaaaaatacgaaaaccagtcaggcgtggcggcgcgcctgcaatcgcaggcactcggcaggccgaggcaggagaatcaggcagggaggttgcagtgagccgagatggcagaagtacagtccagcttcggcttggcatcagagggagaccgtgggaagagagggagagggagaccgtggggagagggagagggggagggggagggggagagggagagggagctcagtttttattttcaacaacaaattctgttagttgttttccttaaagtggcaggcttactttgttcatgttcaagaaaatgtcggccaaatatcccagctggaacaaccataatttgtcattcatactttttagtaaacttggggtattagcccatttgcattactataaggaatacctgagactgggtaatttataaagaaaattgttttaattggctcatggctctgcaggctttacaggaagcatggtgctggcatctgtttctggtgaggcctcaggaagcttacaaacatggcagaaggtgacaaggaactagcatgtcacatagctagagcgggagcagcaagagaggtgggaggtgctacactttttttttttttttttttttgagacggagtttttctctttcgcccaggctggagtgcagtggtgcgatcttggctcaccgcaacctctgcctttcggtttcaagcaattcttctgcctcagcctcctgagtagttgggattacaggtgcccaccaccatgctcaggtaatttttgtatttttagtagagacagggtttcaccatgttggccaggctggtctcgaactcctggtgctacattcttttaaacaaccaggtatcgtgagagttcactcactgtcagaagacagcaccaagacattcatgagggactgcccccatgatccaaacacctcccaccaggccccacctctaacactgggggttacgtttcagcatgagatttggaggggccaaacattcaaaccatgtcacatggtattccatgaaaaaagcaagcagttcattttgcaacttaaactgtataatacatgctttttcctgggactaccatggtgcttcagtagtccacagaagtactttatgtgtacctactattttgggacacaagggtattaaaaaccatgtactcaagggctgatatttaataaaattaataatttttactgccgtatcaaagatgttcttaagtgaggctggctttttttttctttcttttttttaatctatgactactggtgcagttggtacctctaccttgattagtgttaaagagcttgcagtttgacccactgttgattttgcaccatgggtacaaatgtgaacacggaagaaggcaaattatgtcctagtattatgatgaaagtagagtcttttgctgggacttgatgctacaggccagtagttctcaaagcctggttccctgcccagcagcattagcatctcttgggagcttattagaaatgcgaacacctgggcccttcccttccctttcagtgtccagttcctgtgggatggggctgggccgcttcagctgccccaggagactgagagagtctgctgaatttgagaaagtccactctgctttctggaaggactggcggggcgggagggcagggaggatgagtaagttagggacagagtgttctcgtgtttgtagaggatgtgatgcagcctggacttcaggcagtaggaagaagatggaatggatttgctagagacagattctctagaactttattgctggtagaccacataaaagcttagaaaacagctgcgctttgctccgagacctgccagccatcagggacgaatgagttttaaaggcccttactgctttgtgtcttgagggaatatcttttattaatcgtgaaaaaatcaatccagataacttgcctgagtcatttcagtctcctttttgaggatgcctgcttaaacagcgaccatggtctctggaggggtagagtctcacattcggagttcagtctcttagaaagtacagttcagtgtggaagaatggcagttatgatttcattcagatgtgcccagctgctgacaaattgaatacaacgatcagtggcaggcagaactctcatttgttgtgtgttgtcttgagtctggtgaggtgtatcctttcactattggattttaccattcagtgcagtcagtagctccatttgatgtaagtgtaaagatgggtctctcatttcagtttcagcaattattcttaaaacctttattttccagtgttttaaagtttttaaattttatatctttttttttttttaaacagatttgtaagactccagggcctcccagccgtgaataatctgatggttcctgaaatgactggggaagcagacgcttcgtatggcagttgaagagtgtgtgtctatgtgcatttaaaaccttctttctgtacttacacattcacacgggaagacaggctcattcttgtgcacacttgagagttttacaactgatgaaaattaatttaagaatcagatggagcaacttgacaccagtgggctcaggagcccggggagaaaaatacatcactaatggccagttttccatatggtctgcacgggtaaagaaagtctgcaaaaagaagaaaaaaaaatttgcgcagattaaaccacaaaaatattctccagtttaaagaaggaactaagtgagaaggtgactgagaaagaagtgtgatttcaaacattgcagcggctcacacagtgtttgttgcactttatttttcagtgggtttggtgatttggacggattaaaattctagactgaaaagtaactcctactgtggttatggctagaggaaagcaagttcaagtatgatgggacaagtttgaataatgaactgattcctttgcctatcttaattaactgtatttgagaaattttaatttattattcccccccttttttcctgcatctataggataatattgtaaaatagcaattgaaaccaataattattaaataaatatcaaggaaaatccaagcaaagctttctttttgttggactagtggtgtggtgtttggagacagtctctgaatgtgaacaggaaagcacccatcagcaaaacactatcactctctagggagacagctgggggaatctgactctggcttctgcttttgttttaagggattaacttccctgtcaagtccaagaagacttgcgtatgagaagattacctgatggacttaattctaagattagcttttttcatcaagatggaaaaagatctttaggagcagaaaaggggagtgctaactgggggagcgagaagggagacgagcaaaagaaacaaaatcttgccacgtggctctgttttgtcagcaagaggatttaagactcacccagggcaaacactgggaccactgtaagagcgctggaacattctgcctcttgagtgaaggggccttctttctagcctctatggcactgaggggtgcgccggctggtggaggagcagtccgatggagccctgcgttccccggggacacagggccaagctttgaggtggaaagtttctggttctgaaacaacaaggagagagtctgtttttcttcctaaaatttggactcttgtctgcacaaactctggtctgttttgcacggtttgtgtgcctttttttccctttatgcaatctttttcagctttagcagcagaaatttgtctagttcaggaaacatgctagagggtggcttcagaaggaagatgatcctgtgtattctgtctctgcatccgaacttttgaagagaaaaattcgagctagagggattcttaaagccttaagttacttgaaatctatgtatttgcaaccctttgtctctggaatcatattacactaaactggaatctcaggctgaatgagaataaccaagtggagtaaaaagaagaaaaccgtttcttgatcaccacttaattaacgatgctctttctccaaaggatcagcacgttcttcctctgagaacttgaaaatacaaatggaccccatgtttttttaagcattaccttttcttagaagactgccatcatcttttatagaggaattttttcactatgcattcggtggatctttataaaatactgaccttctaattagattcaggtcagtcttaattaaagggggaaaaaagcaacgcaagccaaccacaaaaacacatataccaatgaaagaaattggtttaaatttcacagcattaacattactttttaagtaaaacagttcattgaagaaagtatgtatgcagcagtggaacatgggcctgtgctttgcagcgattccaacatcctgtgcctgtcctggaaggggcgtgtccccaagagtgagaaggagaagcctgtgtgcaggagacgctactatgaggaaggctggctggccacgggcaacgggcgaggagtggttggggtgactttcacctctagtcactgtcgcagggacaggagtactccacagaggataaatttcaacctccggggccacaatagcgaggtgagctgtggttttgtttcactttttggtcacttccagtggtgtttttgagccccttgtggacttgaaacttccttcatttcagtttcatagacttgctgcctagtgagacttcccatgctgtgagttctgtctcttattctctggcagaaaagatgctaagatggacatagttcacagtaggctgcgcctccccaggtgggtcagttgtccctggcacccctgctgtcctctccctgcactgtctctcttagagggtccgggcagtgggaagacgcccagcagtagggaggccagggcgctttctaaccagggtggggggttaaattagatgatcctaaccaacttttcgtgctccaagtctacatggcaaagagttacccccacccctgatgtcccactgacagtgtgaaaaatgaaagtggtgctgcctttaccttgcacggttaacatctacgttcctttggtgatggcttaacacttggcttgtatgttttcgtacttggaggtaaagaagtagttaatggacaaaaaccatagtttttcacatgtatagggtatattatattgaggctattatgccatatatttgtacatgtagattcctctgggcttctaaaatataagcagtgggattatgaaattcatgcaaccaacatttattgagcaatacttaagtgttaggcattgtgttttaaagaagagcgtgattggtaatttcttgcaaagttttgcttgtatggcaccttcgcaatattcatgttttactcttcactagcttatttgggtatttttaaaatgaggaatccatgactatttcaggcatcttaaaaatgtcattaaatggttattaaatagctactgtaaaggagcaggaattttttcaagtataggtcttagtccatttgtgctactataacaaaatatagacagggtggcttataaacagtagaaatttatttctcacagttcgggaggctgaaagtctcaagatccggggctagtatggtagagttttttatttcttcttggtggaaagaggatgagagtgtctctgaggcctcttttatgaggccactaatcccatacatgagggctccattctcatgacttaatcacctcctataaagaccctacctcttattaccatcacctagggagattcaccatacaaattttgggggcacacaaacattgagatcatagcaatataaacattcagtaaggtgcactaaacttaactctcgattatttttatatgcagtcacccatgtaagcgccaacaatatcaaaatatagagcatttccagcaccagttacgggtacttggtgctccttcccagattttacattctgtcttaatccattcctgctgctgaaacaaaatatcttagactgggtaatccataaacaacagaaatttattgcttacagttctgaagactgggaagtccaagatcaagatgttagcagtttcagtgtctggtgagggctctctcctccataaatggcacctcgttcctgtgtcctcacatggtggaaggggcaagggaagcttccttgggcctatcttacaagggtaggaatcccatttatgagggcagagccctcaagacctgatcacctcccaaaggtcccacctcttgataccaccacatggggattaggtttcaacattgaattttgtggggatggaaacattcagatcctagcacgcccctcctgagaagtaactcatattctgacttctgtcactgcttaatggaaatggaatccttcattacatactctctgtgtctggcttctttcactcaacgtgatgtctgtgagattcatccctgttgtgtatattattagtttgttctttttaactgatgtgaattgtccactgaaggaagatacctggtgtttttcttctcctgttcctgggtatttggattgcttccagtttttggctgttgtgactaatgctgctatgaacgtttgtgtgcgtgtggacctgtgcattcagaaggtggaatttctaagtcatagtgttgcatgtgtttaggtttagtagaaattgcttgttttccaaagtggttgtactatttacacctcatcattaatgtatgaaagttttagttgtaaggccaagagtattttgagattcatttttccactgagtttaatttatgaagaggcttcttttgaatttgaactttttccattaaaaacagtggttttatgcaagaaattatgttttacaaataatatattgggcatatacatacaggcatgcacacatttccccccctcaacacacacacatatctgtacctttgaagtggatacgcttcaaatttttttttttattcttatgtaacaaatcaccccagacttggtggcttaaaacgttacccatttttagtctcacagttctgtagttctgaagccctgttatggtatgtctggggcctctgcttaggtctcccaggctgggaaacgtggtaccagccaggactgctagctcctctgaggctcagggccttcttccaagctcattcaggttgttggcagaaatcagttccttgtggttgtaggactgaggacctccggtcttagaggccctcactagtcccagccatgtggccctctccacagcatgcagtttgcttcttcaaggccaggaggagagtatctgctgtagcttcaaatctttctgacttttcatgtctgaaaaatggcacccctgagccggccatgctcacctccactcctggggaggggattacactgggtgtgcataccagggggtgtggttttagaattctgcctaccacaaaagagaagattccaattcacagacagtagtctggctgtctcactgctgaaactgttttgcatgatttttccacattgcatttttacttttttggttttttttgaagggtacctgtgcacaacatgcaggtttgttacataggtatacatgtgccgtgttggtttgctgcacccattaactcatcatttacattaggtatttcttctaatgctattcctccccctgccccccaccccacgacaggcccccatatgtgatgttccccgccctgtatccaagtgttctcattgttcagttcccacctatgagtgagaacatgcggtgtttggttttctgtccttgtgatagtttgctgagaatgatggtttccagcttcattcatgtccctgcaaaggacatgaactcatccttttttatggctgcatagtattccatggtgtatatgtgccacattttcttaatccagtctatcactgatggacatttcggttggttccaagtttttgctattgtgaatagtgccgcaataaacatatgtgtgcatgtgtctttatagtagcatgattttgggtatatacccagtaatgggatggctggatcaaatggtatttctagttctagatccttgaggaatcaccacactgtcttccacaatggttgaactagtctacactcccaccaacagtgtaaaagcgttactatttctccacatcctctccagcacctgttgtttcctgactttttaatgatcaccattctaactggtgtgagatggtatctcattgtggttttgatttgcatttctctgatgaccagtgatgatgagcattttttcatgtgtcttttggctgcataaatgtccccttttgagaagtgtctgttcatatcctttgcccactttttgacggggttgtttgtttctttcttgtaaatttgtttaagttctttgtagattctggatattagccctttgtcagataggtagattgcaaaaattttctcccattttataggttgcctgttcactctgatgcatttttacttttagttaatttctgttcctcatattagaatctgttccatttggctgggcatggtggcacatgcttgtaatcccagcactttgggaagctgaggcgggaagattgcttgagcttaggagttcaagaccagcctgggtaacatagtgagaccctgcctctactctcccccacccaccgcaaagaaaagaatatgttccatttactgaatgcctgtcaagtagagtgaccaactctcctagcttcccaggatgtgggactgtcggtgttaatacctggaaaatcccaggcaaactgagttggtcatcctactgcccagtgcctgacgtggtttcagacatcttacctcatgttgtttacagcagactcatgggaagatatcattatttccattttatagggaagaaaactcaggctttaaagatgttaaataacctgcctaaattcatgcagcttgtatggaggagaactggaatctaggggtctaacattttcctacaactttattttcttataacttgtgttaaatacaagtctataacttgtgttaaatacaagtcctcaatcccttatcctcaattgttatatcttttttttttatttaattttttcagacagagcttcgctctcttccccaggctagaatgcagtggcacaatcaccgctcaccgtagcctctgcctcctgggtttgagtgatcttcccacctcagcctgccaagtaggtgggactacagacatatgccacaatgttcagctagttacaaattttttttttttttttttttttttttggtagagacagggttttgctgtgttgcccaggctggtctcaaactcctaaacttaagtgatccgcccacctcagcctcccaaagtgctgggattataggtgagagccactgtgcccagctcacgattgttaaatctaagggctctgaaaatagcaagtttttgtataattgtttcaatggcaagacctggcctggactgatgtgaagccgctggttgttgttattccatcacttcagctgcagaaatactgtgttttattatgggggctgcccagacctgtgggtggcactagataattgacaggagctccccttgtaggactttgctaagatttaaaaaattctgaattcaaaatacttgtctctaaggattctcaatcaggggttgtgaacttgtgtcttcatttaagggaatcatcaaaagaaaccttgggttttatttaatttggtttttcatttccgggaaggctgacatttaactcatctctgcccttaccttatcttcactcccttctaccacaagaagcagaaaaaccctgtgtccccaccggccatcccttaagaacactactgaaagaaccattgcaagattttatttctggccacggaactaactaaattgaaggggtcagatctagtcgtctgctaatttcacaactgaattaaaaaggaaaaaaatctgaatgaaagataatttatttcaccctcagctagtatgtaaaatctgttttatattatgtaagtatttaacaaatcttaacagttttggaattataaatgtattcagttagataaattgaatctgaaattaaatactgtgataaatgtttgtctagtctttgagactagtttgcctttctcacattgtgtattctgttgttagaaatttgtgataaaatggtattagctatatttgccagagttaaacatatagtagaggaattcttatcctgtgatacatagcttcatatttggtaaatatgttaatggttctaatcagatggtgaaaatatatgcccccctcaatcctgaaagcacctttcataaaaaagaaccactaccacaaaaaatgaatgatcagccaaaccaacttttcccaaagcaactttctatggcatttggggacggaaacaaaataatccttttaccagtatctcttttgaaacctttgattagcagtgttatggaagaggaatagatgtgtgcttacctactgaaactccaagggggactcttcgtggctggctgagaagtgatgcttttttagaattatttgtccttttactgtgaagcagtaattcaagaaagatgagtttttcttttaaaagagtcctcaataggtgggcaggtatgtcaggcaaaataatgattatgttccataatgaagattatttcagaaaataattacttgggaatgtttttattctatgaaacaatttcttacagatattgtagatgtcgtgcaaattaatcaaggttatttgtactgattgtcatttaacaggaattttttttttttttttttacacagagtctcactttgttgcccaggctggagtgcaatggcgtaatcttggctcactgcaacctccgccccccaggttcaagccatttttctgcctcagcctcctgagtagctatgattacaggtgcccgccaccacacccagctaatttttgtatttttagtagaaacgggattttgccatgttgaccaggctggtctcaaactcctggtctcaggtgatccacccgcctcagcctccccaagtgctgggattacaggcctgagccaccatgcccggctaacaggatttttttgacttgagaataagcaggcagctatgtgtagttgctggaattcgttttgttataaggacacgactactgtagcaatggtctcacctgatttcttggattgggtacatcttctccgatatgctttctctgaccctgccccttgtccctgttgtacacttaacagacttctctggttgcgctgatcatgctttattatagttatctgcttgcctcgtttggtaaaacttattggaagatcaatgtaccctgtcattcttaacttcctcacctctcattgtttagaatatcaattatttatttattttttaaaaaaattttctttaactttttggcccacttcagtgtgctttctttccttattctactgaaatgaactcctcaatgaccacacattgctaaactcataggtttttggtgttttgtttttgtttttaaactgcacttgatgtctcagtagcatcagtagaattgaaatgttgtccaggacaccaggctctcctggttttcctgttactgttctggcctctgctttccgcctttctttgctggctctgccttttttttgcctcatctttaaatgttaacgggcaccaggcatgcatatttttctgtatttcctctctatgttggctttaaatctccctacatgctatgactccagatacctctctctgtctgccatctccttctagttccagacttcattctccaacttgatatatgagatacaaaagtggacaccagtcaggcctcgcagactatcggtcacccagacagaactcatttccccccgccccttgaacctcagatcagttccatgcactgtttccccattttagtagatggcccaagaccagccagtcagttcagctctcaactcaggaatctccctgcgcttcccttgtccccaagtcttgttattagcaagacctcccactgtatctgacttccagataatatctgaaacgtgctcacttcaccaccatgcctagcataaacctcctcatgaatctcttgacttaaactctactatttttctattgtggaggactcaacaatctatgttaagttttttaagtgttttaaaaatattataaaaatttacttctaaagtacttttctttttcctaaaaacattgtatgacacatcttaattccaaaaaggatgggaatttctagattgtaagaatggtctcccttgcagttgaaagaccctcctagtaccattgtctgattcaccctctcctgaagaaggcccagagccactggggactggcaagccaggttctgtgtccacctcactgtgcatagtgatgaccaactttctcaacattcagagaggttagaaaaccattttattttgaaacatttatacagtatttaaagtacttaatctgtacaacagttttagtgggaaaagttgactcattttggattaaagccagcaaaaactcactgcagctcttttatctctcataaattctacatagaaagtgacttttagtagatttgtgaccaactaaggtattataatggtggatataatggagggctgttttatttcctttagtgatggcctgttcttttttcctttctgtttctgtttttccatatcttgattccaagaagttctagctttacctgtccaagtcattcattagtttactcaagtcagtagtaagttgaaaataataattctcttctatcagagttgtagaacctgagataatatgtttttggaagggctgtgaaaatggtatataagtgatgaaatagtaaagtactctataccctttgtacttaaagtaatatacttaagtatattactttccagtccttacaataccacttagtacctggaaattcagttactgttctgactcatgaggttagaaacagtgtttgttgatttttgttcctcagtttagatttgaaaacacatgcattaatttttagcaggtatttactgcatctctgttgtgtgccaggtgctgcgtgtatttgccactgtcggggggcaagagaagtcccagcttatacctcatggaatctacagtctagcatgagggtgaaacgtggacttcgccttcctctatttgcatttccattaggaagagaaagcaagctttcaattgttcaaagaatgaagaatgaggcttcctagagattgtgtggtgaagatgatctttgagcagggccttgagaaatacttaggatttagcacgtttagcgcgtgcttttctcagtggtgcaagaagattaagccacattctggctttagagaggcatttctgagagagatgaaggacacttcgttccccagccccaacctaagcatgtgactgtactcaccttgtcagatgctgttggaacctggctgacaaggacaaggacctatgcattttttcctgccctggaacaaaattgcccttgttggacaggcagtgatgttctgtgcgccttttgactatactgtgaaatgtttgtggtttgtaatggggattttatccatctgagcatgctacactttttattagtttccatggcagatggttaaactagggtgctgccttaataatttgacttatgcaggtgctcagatatgactgtttctgtgcttaatgtattcagcatgtggttgtagtcgtttgaaaagttacataatcatgtgttcatgacctgagttagagataatttattagtgactcagcattaatgactcattttatgcaactcttctggtaaagcaacgtttctgttcatgtgagcatattgtagcatgctaggtgaccacatctaccttgtttccttcctaggtagtacctttaggtattccattacaggagggctgccccactcccggaggtgcattgaatacagagagggcatagttggtggagaaaagccctccttgggatcatctgtagctggtaatagggactgagaagctcagggctacatcatggttgaatgtttgtggattcagtgatctgcatggcaggtttcaaaaccatataatgttaagagatatgaattgcaaaaccacaacccctcagacttttctatacagtaagtcctcaatattgttaagttcttggaaactgcagctttaggtgaaacaacacttagtatgtagtatatacgtaggatcttttttcttgtttatatcagttagcttaaggtaaaattgttttcatatgcaggtcatttttgcttaaagttcagcttctaagaacctatccttgaagttaagtgaggacttaactgtactttttgcaggtaaatttactgtattgagcgaaatgaatagtggaaacttacctagttttttaccctggaaaggaatttaaaccgataaaatgcacttactagaatttgatggatgttccgcttttatctgccagctttatcacgaaggatttcctcagtgggaacactgagagaaaggatctgcatagtgggactggaagggtggagtagtgtgtgaatgaagtcaactaggtatttaaaaaatattcttacattccctgactatagccataattaacgtcattgtcctggtgagtctgtcttctttttttagaccaagtctgaagaaatgggtggcagatgttgtactgttctgatgtactgcagagtgctatagtaggtcagaggatgaagcactgtggaccagtgtggtcagggaagcttcctgcagagtcagggagtgagctggaccttaatgttcatttcggttccgtaaacatttgagagctcgctctaggctagactctgttgggctttggctctacagtggtgaaaaaggcactgttcctgcccagatggatcgtctatcgtgtgtcagagggtggatattgtttgcatggatataatgttgtctttgctgatgacaattgccatatatattcctgtaatttgtgtgtgtgtgctatgtccattatttagtgtagccctcataacatctctctacagctttgtattaatatccttgctgtacagttggggaacctgaggttctgagatgttaatgaaattgtctgaggttgcagagccagatgatggcagatctgagatttgaatttgtgtctgtgtgtttttctatctataagacactgcttcaaaaaggtgaagggaagaggcacccttaaacagagttatgaatgactgtggtatgtgtgtgttttggacatggaagagtttggtgaagtgttggagagtagtggaaagcaaagcgggatcgacaggtgggaccagacatacatagtcatgattataaacaatagtaataaatgtttgtggcatgaaagaagacagtgcttttggtttgggccgtattccaagaccataagaagactctcatattcaaatagaattgtcaaaaaatcaaatgtgagtgtaaaaattaccattcaattcagtgcattttttcaccaatgtggataactgacagttgacagcactggctatgcttaatcaattatggaaataatagtcttaaagaagtaacagacatcagtcaccatgatactatgataatgtacacatgagcctaactcttaattgtagccagttattgtaaactgaagggatttgaggaacagcttttctttttttttttttttcagacagagtcttactctgtctcccaggctggagtgcagtggttgaatctcggctcactgcaagctctgcctcttgggttcatgccattctcctgccttagcctcccgagtagctgggactacaggcacctatcaccacgcctggctaattttttgtatttttagtagagacgggatttcaccgtgttagccaggatggtctcaatctcctgacctcgtgatccgcccgcctcggcctcccaaagtactggggttcaggcgtgagccaccgcgcccagccgaggaacagctcttcttttaaatgtcttaggaattcttattttgaataaggaacctttctagcaaagaggcagaaatgaaacttttgttttatatttaggtcagaatttcatttcacctaaactggcttatctatttttataccaaagctcagtagtgtgagttaattttttatcactgtaatagttatacatattggtaaatgctaagaatgaaaaatagcaatgttctaactcctgtctccccccctccccccacctgttgtcctggccacttaacaaaggctcatactattatttttttgatgaatcaattttaggattttgtctattgacttcattcccatctcgttaggctgagatttagcactcttctctttctttcatagtcactcaacccagctttgccctatcatctaatcattccagtattactgtatcacaaatattggttattattcagtgtttacactgtttaaactatgtcactgttattcccagatgagccaagtagggtactatgattgtattccttcattatttaactcttttctcctcatgataaaaatttcccccccagtggtttagtttatctattgcaaaaccttcctacatcttcagcataatttcatacattcaaaccaattagatggtttatcagttcatttttttgttttgttttgtttttgtttttttcctgaacacctccatctgagagtcctttgtcatccttctgctctctggattggttgctcagtgggcctgctgcccaggtgatttcctgaacttccttttaatcatcatcttgggaattctctttgccccctatttattccacgtgtcgtttatggaatcttgtatttttttggttaaactcctttttgttggaacataatctccagtatcttcctaagaaagtatttgtaagtcataaagtataagacttttaatctctgtaaatgtcttaattgctttcacacttgatagtttggctgggtacagatttctaggtagttttcttcagaattttgtcttcacatttccagagtttttagaagcatagtagttaagagctcaggccccggagctagactcagtttacgttctagctccatcacttagtaatgccatgactttaaatatattatctaatttatctttatagttgtcccttgactatcatggtttgaactttgtggatccacttatatgtggaattttttcaatcaaatacggatcaaaaatacagtatttctgggatgcaaaatccatgtttatatggagaggattatacacaaaatcaacgtttgtatgcttaagttcttgtgggctgactgcgggatttgagtatgtgagaatttgggtatacgtgcacagtcctgcaaccatcccccttgtgtaccagactgtactatgattttctcatttgtgaaatggatttataaataatactttcctcatatgggatttgttgtaaggattcagtggttactatagccatttagaaaagtggctggcacatgatgagggctttttaaaattgactattattactctaggtcctttatatgtgacctaaaaaacattcaaaagtttatgcatgtgttcttttttctaggtattctgaaatttcataatggtctgctttagtaacttttttcacattaacaaggtagagacccatttggtggaaacgatgctcttcagttccagggctttttggttgttgttgctttaagaattactacccacctgcatcctggattttctctgttttctctaacctactagtcagatgtttaacctcttagaataacttcctgacttttaaagttttacatgtttgactttctgagagatttccttactttattttttaagcttttctaatcaaaattatttcagagccatgatggttttcatttctaacatcttgttctaatctactggctgctccagttcttattttatgggcactatattttctcatacttctgtgaggatacaaattatggttttaaacaattttttttttgtccatgcattagatctgctttttttgaggttttttaaagaggtgtgtgtgagtgtgtataggggtggttctgtgtgaatctccccaccaccacccagattttttataattgaggtcttctttaaatgtctaatgatccttgactatttattcaaatgtaagagtagtgcaccatgaatctctttggcatcttttgtgtgtgtatatgtagggggtgtttagctggtgagctttattgtattatataatgacctgggggagaaccagctgttttcttgggactgccaaaggtcagcatccaagcagctttctccgtagtggtccagtttctttcagtaagaaacttccagtcacacacctgtgaatatactcctgttgccagcattctcagagctggtgtgtgtgtgtgtgtgtgtgtgtgtgtgtgtgtgtgtgtgtgtgtgtgcgtgcgtgctgggaaagaggtagacctagttatatgaaagttggaggagcaggaggagggaggaggaggagctaatattgagtatttattttgtaccagacaccatcctaagtgctatagctcactcagtcctcacatcagctctgcagctttgcacctgttattgtcatcttttttttttagatgaggaaagtgaggtacagagacgttaagcagcttgcccaaagtaaggcatctctgctaattgacagagctgaaattgaactcaggaaccttctagattctatgtatttggcttttcacaacatcattcttgttttcaatccttgtcactatctctgctgtgcctgagattcccaaaacgagttgtggctaacccagagaataacccttcagtgcctgatgttggtggagagaagaattgcctagttacatctcatatggctcagcaggggagaggagtgccctcatggttgctaaatgtgggaatggaatgtgaggcaggaggcaggtgagaggttagtacaggtgggaggtgtccccgctgtgtggggaggagggacttttgccactagttctgttacaggtttgggattctaggacactggacactaatgtgcctaatctgtaaggcattctagactcatcttgtgcagttcattcatcttcccgcctcgcaagccagcagagcctgacttggggcctcagctctgcatggagctacctattgggccttcaacagcgagggttttagtcagaaacacagaaatgaatccttagtgcactgggcagtgggtatcgtattttactaggaggtttttgtctagaagttggtcatttctctgggatatggtataggatgggtgggaagggtgccacaaggaaaaacgtgagaatttgtactgtgcaacagtttggtgtttccagttgggtccacccacaaccttgactccaaacttccaaaacaaacacacctgtgcattttgcccaagattctattgctgggtgtttttattgtaccttctggcaacctacatttggtttctcttcctcattgttgctgttttagggaattcttactgacatgtgttgttttttccacttggcctagttagatttggtctactaaaatacagaggagattgtctctatcttagggacttttctttatcctcctagtcaagctcacttccagcctttctttttcctccctgtatataatccctgtgacaacgtttaaggcaaaaccgagatttgtatgttttagctctgttctttctttgctgattaaatttttagagtttaaggaagagttcattaatcagaaccttaacattaaaaaaaaaaaagaagaataacctcgaaagcaccatccttgtcagaaagctctattttgtaaactccttggtagcagaaataaatgtttgatggctttgtttaaaaaggcagtatgagttaatgtttaggacttgggaagttaattttatacagaaaacaagagtgtaaaaaccatctattgtctctccattcacttgatgtttttcacaattttagatttttttttaacctcttcaggaaattcgctacagatggcatttgtgactaattagggaatcacttaaacatgaccaaagagcttttgcttgtctcctaggccttaaaattttgttttcctttaattgtgctttgaaaaacctaactattttcaagattgaaaacaccttaggggagtcaggctctgtaatgtaaactgaaattttcccctagtaatgaaacacttgtttaagtgatcaatatctcttttttaaaaaaagcattattatattttaaatcagcattgtgcaatagaaacataatattaaccacatatgtaatattaaattttaaatagacacattaaaagtaaaaagaaacaggtgaaattaatttttaatatactttaactcaatatatctaaaatatttcagcatgtaatcgatatacaaactactaatttgataaccgatactcttttttttatactaagtctttgaaatctggcacatctcaatttggattagccacactggcaagtgcccagttgccacatgtggctagtaactaccatattggactgtagttttagacaagtctctttctttttgagggctgtggcagagctccatgcttacccagagaacttgttaatgaatgtccaataggaccttggataaaaggcatttaaaaacccttttatttggaaataatttcaaactataaaaattggaataaagtacaaagaatactcttactcaaattcagctatgaacattttgctttattctgtcctttgcacttccatgtgcacgcatacactctctctctttctctctcttgttatatatgtaaggtgttcttcccccctggatcatttgagagtgtacatcttggtcctttactctaaaatacttcaatgtgtatttcctaagaacaagaacataaccactatagtacagttagttatcaacttcaggaaatttaacgtcaattcaatacttaaattattctccatactccacttttgtcaactgatgaactatcctctgtagtttttctttattcctctacacaggatacagtttaggaccacacactgcatttagttgttaggtatctttagacccctgtaatctggaatagctcttcagtttttccttatgttttatgacattgaccttttagaagaatgctcctctttctttttaatagaatgtttggtattttgtgtttttttcccttttttcttttgtttttgttattaaatttagattaatcatcccaagccagaatactacataaatgatgtgtccttttcagggtgtcacatgtggaggtgcacagtagctatctgcccctcattggtgatgttaattttgatcacctggccaaagtgctgtccattttctcaactgtgttgttattggtttttttccccctgtatttgataatctgttgagagatcacttcaaaaccatgcaaatatcctattccttatcagaatttcttccctagatttatgatccattgatgattcttccatgagccagtcttttctatgatggttgcaaaaacggtgattttccaattccactactccctccatgagtactggcagctgacagatgtaatcaagagcctcctgttgttccctatccacccacctacctatctgtgaactcttggatttccacttttttcttcaatgattatttcctttgattatttggattcaaatttggtcaaagtgtcccagatttggccagcaggagcccctttaggttggctcgtgtccttttggtgcaccccagtcactggcagtggtaggtgggcacctctttatttattttctagcttaacaagatgtttcagcatcatcttgtacttaccctgccctgggtctggaagcagtaatttctctgaggaatgctgtttcaatggggaatggtattagaaaccaacatctggcctctagaggtgttcattgttaccggaatatctttgctgctggactcgttcaacagacacacacacacacacacacacacacacacacacacacacatacgtatatatatacgtgtatatacacgtgtatatatacacgtatatatacacacacacatacctacatacacacattcagtagcagtctgggttcaattaggagacggaaaccacacagtgggttaaacacaggaagtttaatataaagaataattaactgccgggcacggtggctcacgcctgtaatcccagcactttgggaggctgaggtgggcggattacccgaggtcaggaattcgacaccagcctggccaacatggtgaaaccccatctctactaaaaatacaaaaattagccaggcatcgtggcacacacctataatcctagctactcaggaggctgagacaggagaatcatttgaacccgggaggcggaggttgcagttagccgagatcacgccactgcacttcagcctggtcgacagagtaagactctgtcaaaaaaaaaaaaaaaaaaaaaaaaaaaaaaaatatatatatatatatatatatatatataaattgaaaagagagaaacagtaagatataaagagactctgtatagtaccctagggccgaaggagatgatgcaagggaggataagctgggaaggggttcagatcttattggagaaggtgtggttcagcctagcacatagcacggaagtttgttagcttagttagactagagctggtctagagttgttgggcaatcagtaaataaccctctggagtgcaggcaagggaggaggctgtccctccatggtagtggtggagtgtgggcagagggccttcaaagtgaatggcccatgcaggggatgggatggagagggacttgcagaaggagtgactactcactttttgaccctcaggccattggcagctgggagtatggacaagtggcaggatcactggtttctatgttgaggagctatagaaagattgtcactaggccaaagctgtaaggtcataggactgtgtgctgggctattggataggcggactttcctggattttctcataccttcatggcatcttccactctgaagagccctggaagtttcaggaactattttcatcttgtggtgtccctctagtcctttttctggagaaagcttaaccttgtgctcactttaaaggaggaatgtttaaaggaattctattgtttattatagagcacgtattgatgggttgggagctgagaggcaataaactgacatacacacacacgtacatacatgcatatatgtatacacattacatatatgtgttttagaaatcatgaatttacaccagtatttccaattccagaccacccctataccttcccccatttcgtttttgtaatcccttcttccatagtttgcttaatgctataatacatctaaaaataatttcaggtttactacacctgtactaatataaaaaccaaacctaccaaaaggatgtcatggactgaatgtttgtatcctccaaaaattcatatgttgaagccctaacctccaatgtgatgatgtttggagaaggggcctctaagaagtaattaacattagatgaagtcatgagggtggggccctcgtgatgagattagtgccctaaaagaagacacatcggagagcttgcgcgaagaagaggtcatgtgagctcacagtgagatggtggccacctataaatgagaagagctctcagggtgaaacctaccttgccagcaccttaaccttggactttctagcctccagaactgtgagaaataaatttctgttgtttgaattacccagtctatggtatttgatatggcagcacaagcaggctaatacagaaaagttcagaatttgcttgcagttcttcttcaccttccctctgcccaccttcccaaactagctatgtacagttggcctctgtgtgagtctacttattctcagattttcaataatatattggaacaatttttagagatttgtgacaatttgaaaaaattcacagatgagctgcatagcctagaaatattgaaaaaattaagaaaacgtgtcatgaatgcataaaataaatgcaggtactgttctattttgtcatttactggctaccctaaaatatatacaaatttattataaaatgttaaaatttatcaaaacttacacgcacaaacagaccacacgtggtgctactttcagtcaagggaaatacagacaaacataaagatgtagtagtattaaattgtaactgcataaacttaactgtagtatgtactacactactgtaataattttgtagcctcgtcctgttgctattgcaatgagctccagtgtcgcgagtatccgcttaaaatattgtgtgatgcttgtcatcccagtgtgagcagtttgtccccagtgaattgcgcatcacagtaaaaagtgccctctcactgttctcatgtatttttcctcctgtttcgtgcaatactgtaaaccttgaataaccaccatgagatccatatgaaatggcactagtgatgctggaagtgctcccaagaagcagagaaaagtcatgacattacaagaaaaagttgaattacttgataggtgctggagacaggtctgcagctggggtggctgccatttcagacagatagttcatcttgtaaacaggaagtgtaaacttgccatatggataaatacagtacagtacggtgaatgtattttctcttccttatgattttcttaataatgttttctttttctagctttattgtaagaatatggtatataatacataaaacaaaatacatgttaatttactgtttatgttattggtaaggctactgatcagcaatagacatgagtaaataagttttaggggaggtaaaagttatatgcagatcttcaactgtgtgggggttggcacccctaacccccgcattgttcaggggttagctgtagttaaatacggaagctcctaagttgcttatattgattaccctctactcccctttcagtgtgtgcagtggtctgaatgtgtcctccaaaattcacatgttgaaactttacagccaatgtcatcatatttagaggtgaggccttaaagaggtgattaagtcatgagggtgaaaccctcaaggatgggattagactccttataaaagggcttgaggaagggctttatttctctgttctgctcttctgctgtgtgaggacacctagaaggtggcatttatgaggaacaggccttcaccagacaccatctctgctgacaccttgatcttggacttcctaacctccacaactgtgaaaaaataaatttctgttcttggtcaggtacagtggctcaggcctgtagtcccagggctttgggaggttgaggcgggcggatcacaaggtcaggagttcgagaccagcctggccaacatggtgaaacccggtctctactaaaaatacaaaaaattagcagagtgtggtggcaggtgcctgtaatctcagctacttgggaggctgaggaaggagaatcacttgaacccgggaggcagaggttgcagtgagctgagatcatgccactgcactccagcctggtgaacagagcgagactgtctcaaaaaaaaaaaaaaaaaaatttttgttctttataagtacccagtctcaggtactttgttatagtgacacatatacttaagtaattatacttaattacttaatgtggttaagtaattcatttaaaatacagttgtttttgtttcagtttgcttttagttttttgatcttttcctcttcattcttatgattttatgttttgaatatatagaacattaacatgcatttgaaagtcaaaaccacataaaaaggtatatccagagaagtaacattacattcatccctcccacttcatccacccatcttgtagatactaacttcattattttctgatttattttgttccttctgtaaaaataggcagatgtgtgtggtgtatatttatgttttcttattttcttctctgcctttgacaaaaggactgtttttgcacttcgctgttttcgtttaacatctggagatcattccatgtcagttcatgtgcatcttcctcatttcttttttacagcacatggtgtgccattatgtatacacatatactactgtatatcgtagtactatattttacccaacaactctccaagtttgaatgcttagggagttcctgtattttgcaattacagataatgctgcagtgaataatttgtgtgtatgttggacgtgtatcttcagggtaaattcttagaagtgaaatcgctgcattgtaatgtgaagacatatatagttttcttagatattgccaaacttctttccataatgatgaaccattttgcattcccagcagcaatttatgagaataccattttctcccacagcttcacccatagtatattaccaagcttttacattgttgccaatatggtagaagaaaatggcactgcagtgtggttttaatttggatatctcctattatgagtaaggttgaacatattttcaaacatttaagggccattttaaaaatcttgtgaattgtctatatctttcatctatttttctatagaaattttggtcaccttcaaattgtaaaatgtctatgtatattggagacagtaatattagtcttttatctgtggtgtatattacaaatgtcttctctcaatttgttaactttgactttgcttagtgtattttttgccatgcagaaggtttaaaacttttttttatctagtcaaatttgtcagtctcttattgcgctggattttgagtcataattggaaagtctttttccacatgtaagtgatagaggaattcacccatattttcttgtagcttagaaaaagactcagaaaaaagaatactattggtaagaaaatcaacatgtattttgtcctcattaggggatttttcattcatgacttccttatagcaggacaaatactaatcaagcactttgagacctgccaggcaatttgtttttaaatgccttctaaaaatagataaagaacagagagataactaactattcaggtaaagttagaatttcacttagggacaaaaatgggaatataagtcatttttttaaaactttgattttttggtctattttgaattagtccctatgaccaattcacttcttttttttaaggttcttgcctgttaaacgggtcattttgtttaagatgttttcttcctgatttcatagagcattttgctcagaatagaatccaagtctcactagtgtcttagagctctgttcattttattgcagggctgaagttatttggaaaggaaaggttatgagctgtaaaattttctttctttctttttctttctttctttctttctttctttctttctttcttttctttctttctgtctctctctctctctttttttctctctctctctttctttctcttttttttttttttttttttttgagacagagtctttctctgttgcctaggctggagtgcagtggttcaatcatggctcactgcagagcattaatttcctgggctcaggtgattcttccacttcagcttagtagctgggctacaggtgcacaccaccatgcccagctatttttttgtattttttgtagagatggggtttcaccatgttgcccaaactggtcttgaactcctgggctcaagaaatccacctgccttggcctctcaaagtgctgggattacaggcatgagccaccactcccgttcagctgtaaaaatttttagccttttctccctgatacagactgaagcaatggatagtgaatgcatctgtgtgtgaaacaggtggaggactaaaaataggtcctcaaatacctttctgccatcagtgtcactaaagccctggcactgattcccttcctggaattaaagtgagtacaagaagaaatacatgatttaccttttattttaaggcaccaaagccaagtccctgcacccacagtgtgcaaacaaatagaaacaacaaagtgtcaagtgcactggataccaatcaatcgacttatctgaccaatactcctaaagaccaagagtattcaaaaattatttctagaaagaagtgaatgtttgattttttttttttaaagcagttaagcacttttgggactgaaacaaaggtactaaaagtaggaaacagaagaaaccagaggaatatcgaatcttggaaaggccttagaaaccatctcatttttaagattaagaaaattaaaggctagaaagtagctgaagaaaggtcaagtgggtaaagtcacactttcacccaacctgtctccacccaacagtgaattctcatgactctggccgtagttattgaagggtaggtacaatttagggccatgaaacagtcaagttactggtctctatggtaacagtcttcagagcacctgatggaagcatttccatacaagtcacactttatgtatttatttatttttgagacagggtctttgctctgtcacctaggctggagtgcagtagtgtgatcatagctcactccagccttgaattcctggcctcaagtaatcctcttccaaagtgctggaattatagtcagtcttccaaagtgctggaattatagatgtgagccaccccacccagcccaaattatactttaaagtgtaatgaataataacaatcaaaaacagacatttaaaatgataggtgtaaaggacacataatttagtgaacatgatattgcaattaaaccttattttggacactctcatgcagccagcttattgaagtgcatgtctcagtctgcacctgccagctcattctgggccagtctctgctaaaggagtgctgctgaggtgtgaaccgttccaaagctgggcagtgaccctgtatcctttgcggaatttagcattccacatttccgcatactagaggctggtttgatatttgtgacattgaatcagccatgttatgttgcacctgcagtggggaatagagaggctagcaggttggaaggtaaacttggcccagggacctaaattactactttggggtagagccaggaccagagagggaccaggtgggattggtagttacaggtaaagagggtactctgcaggtggggaatgatcacatttcctgaaccttgcttttgagataggtcttgattgacaaatattctctctggctctgggaaatgttgcctcactttgttttcagaactcccttcctgtgagtctctgatgacagctcttctcatgcaggtataagccctcctgagcgggcaggcattccctgtgcttgcatgtaagactgagtcttacacttgggaaaaagtcttgcacttgggaaaaagaaaaaaacacattggtgtgccagatatcaggggaacctgcccccagtaattcaacgtgagtccttttctattttccctaagtgtcggccagtctgagaaataaaggaaaagagtacaaaagagagaaattttaaagctggtgtcctgggggagacatcacatgtcggcaggttctgtgatgcccccgagccgtaaaaccagcaagtttttattagcagttttcaaaggggagggtgttacgaatagggtgtgggtcacagagatcacatgcttcaagggcgacaaaagatcacaaggcagaaggtcagggcgggatcacaaggtcagggcgaaactagaaccactaaagaacttctgtgtcccgctgtgcacacattgtcagcgttcaagagcagagaaccggtctgactagaattcgccaggctggaatttcctaatcctagcaagcctgggggtgctgcaggagactaggatgtgcttcatccctatctacatctgcataaggcagacactcctagggtggccattttagaggccccaccctgggaatgcattcttttcccagggctgttaattattaatattccttactggggaaagaattcagcaatatttctcttacccatttttggtaataagagaaatatggctctgtcctgtgcggcccacaggcagccaaactttaaggttatctcccttgttccctgaaaatcactgttatcctgttcttaaggtgcccagatttcatattgttcaaacacacatgctctacaaacaatttgtgcagttaacacaatcatcacagggccctgaagctacatacatcctcagcttacaaagatgacaggattaagagattaaagacaggcataggaaatcacaagaatattgattggagaagtgataaatgtccatgaaatcttcacaatttatattcttctgccatggcttcagctggtccctctgttcggggtccctgagttcccgcaacaggccgtggagctcaggataccttaattgtattggccaggtgagcttagttgatgtggatctgctcgtgcaaggtgagttgaccttactgtaggcagtaggacatgttcagagatctgtaatttcatttggtggaatgtacagtaaccttgataatttggtgactagagaaaaatgggttttttggggggaaagaagtgtatcagaattgttttataactaattagccattaaaatgaacctgaaatagtagtatagacatgcaaattgtaggaccactcctaagtgttgagtataatcatatttattgaattaagtcctcattaatttagctttattttcttatgtttgttcctgagtgtgcctaagtgagtctttccctcctgccctgacgctgcttgggccctcctctgtgtgcacacagggtgagcgtgtgtgggtgtgcatatctcgtcagctgatattatccctctggaggaaaggggtggttccacagagttgaccgtactgctcccaaaccaggccctgcacctgcattgagtcctgggtcttctgagaacatgttctgatgtccttccctagcctgccctcctggagttccctcctcaagatgcaccttctctctttctaagaggagaaaaggtgactccgctgagtcctacctcctcgacaaagcgccctgaccacttggacccagtgattccagagagtccttcgcaggccctcatccttactgtttgtaccacttgctgggcatataacttactgccttctgttatttttagggatgtgtgcacatcttgcatctctagtttaacaacggttgcttgagttagagcctttgtgggattgctgagctgcttgagagggcacaaatgaagcaagactgaggagttaaagaattttaaggctctctctgtttttttgtgtgtgtttttttgtttgtttgtttaagcctttgcagagccatggattttcctagtatgctactgaacactagatcttattccttctatctgactgtatttttatgcccattagccatgttctctttattccctcctccccacaacccttcccagcttctggtaactgtcattctactcagaatctccatgaggtcaatttttttctttagctcctacgtatgagtgaaaaccacacgtcatttgtctttctgtgcctggcttatttcatttaacataatgtcctccagttccatccatgttgttgtaaatgacaggagttcacttttttttatggctgaataatattcccatgtgtgtatatgccacacttttctttatccatttaactcttgatggacacaggttaattccatatcttggttatttgactggtgctacagtaaacatgggagtacagataactctttgacaaactgatttcctttgttttggatatttacctagcaatagggttgctggattgtatggtagttctatttttagttttatgaagattctccatactaaacgttccgtccaacaatatatgagggttcccttttctccacattcttgccagcatctgttattgcctttcttcttggaaaaagctgttttaactggggtgagatggtatcccattgtagttttgatttgcatgtctctgattagtgatgttgggcatttttttttcatatacctgatggccatttgtatgtcttcttccaataaatgtctgttcagatcttttgccaatattttaattgtattatttattttttcctattgagttgtttgaatttcttatatattctgtttattaatcccttgtcagatgggtggtttgcaaatactttctcccattctgtgagttgtcttttccctttgtttattgtgtcctttgcagtgcagaagctttttagcttgatgtgattccccgccgcctctgagctggagtcttgctctgtcgcccaggctggagtgcagtggtgcaatctcagctcactgcaacctctgtctcctgggtttaagcaattctcctgcctcagcctcctgagtagctaggattacaaggatgtgccaccacacctactaatttttgtattcttagtagaaacagtgtttcaccatgttggccaggctggtcttgaactcttgacctcatgatccgcccatgtcggcctcccaaagtgctgggattacaggcgtgagccactgcgcccagcccagcttggtgtgatcttatttgtccacttttgctttggttgcctgtgcttttgaggtcttactcaggaaatctttgtaaggctctttctattttgaaagcatgtttaagaacttgctgcactttaaaaagttgagtttacataagattgtaatatttatcaacatgagtcacattttcactttcttgttcatttgcacactttagatctaaatgccgagaactaggtttttgtttatatagcctcggttgtctctggaaggaaaaatagttccacgtgcctgatccattcagagatgtaattgcatagcctacctggtagcttaagcatataagtttcctagaataatgagacaactaatgtacaatatgtgttttaaattttgtatttgatactttaaatacaaatgcaagactgtgtgctcagttgcctatatttactgacttcttgaaagggtggattgaaggcaccatggcataaagaatgtaggatttggactcagaccttgaatcagttgttagttctgtcacctactagctgtataatcttcaacatggccccttagctgtaaagcaaggataaaaaatcatatagggctgttgtgaggattaagtcgaataatgtatatttatttcatatataaaatatctggtacagtgtttgaccctaagaataggctcaataaatgatcactgctaggcttcctatagtgaacgatgagattaaaaataaatgtgtgtgtgtgtgtgtgtgtgtgtgtgtgtgtgtgtgtaggcactgcctccaccaggacagcccccgggtgatgtgtagagaatctgtacccaccacagcagggaaaatggaggacaaagggggttcctgtgatggcgtgttcaggggcctccaggaggagtaggagttgtgcatgcttggagccctgtgtgagcgcgcctgggctctgtatgttctttgtctatgaaggggaggggctttgactccacaggggaggtttgctgtagttcctgtcaaagggctgagctagactggaactcagattctggttgaaactgtgtccaaaatggtgttgtgatttagattcttcaaacttggttagttaactcattgctggtctgctttttcttttcttgtgtttctaaccaagccaaatgcaacggaaggtaatgcagggaagggaatggtgagtgttacgggctgaacatttgtgttccctcctaaattcagcttaaaccttaacctccaaagtcatagtgttaggaagtgaggctttgggaagtgatttgggtcatgaggatggagccatcacgaatggccttcttaggccctagagagctcgcaccctctttccctcacatgaggatacaaggagaaggtggccacctgcagtccagaaaagagcccttgtcacagccccaccatgctggccccctgatctcagacttccagcccccaggactgtgggaaataaatttctgtggttcatagctgcctagtctgtggtactttgctatagcagcctgaactaagacaggcaggaaaagactaatggctcctcactgatttaaaatacttttaaaaaatctattgggacaaatagtttgtcttaaaatgaaaatactaacaaagtgaagtgcatggagaaaatactaataaaattaagtacatgtggatgtcaggcccctgagcccaagctaagccatcatatcccctgtgacctgcacgtatacatccagatggcctgaagcaactgaagatccacaaaagaagtgaaaatagccttaactgatgacattccaccatcgtgatttgtttcttccccaccctaactgatcaatgtactttgtaatctcccccacccttaagaagtttctttgtaatctcctccacccttaagaatgttctttgtaattctccccacccttgagaatgttctttgtgagatccaccccctgcccgcaaaacattgctcctaactccaccacctatcccaaaacctataagaactaatgataatgccaccaccctttgctgactcttttttcggactcagcccacctgcacccaggtgaaataaacagccttgttgctcacacaaagcctgtgtggtggactctcttcacacagacgtgtgagacagcggactttgttttactgagcttccctttattggactttgcagatagtgtgttttttacaaattgaagttcccgcatcaagcaagtctttcggtgccatgttttcaacagcgtatattcactttatatctctgtggtacattttggtaattgtcacaatatttcaagctttttcatcattatatcttttatggtgatcagtactttttgatgttactgttgtaattgtttcagggtgacacaaactgtgtgcatataagacagtgatcttagtaaatgttgtatgtgttatgactgttccaccggctggccattcccccatttccctttctccttgagcctcgctgttgcctgagatgacaatattgaaattatgccagtgaataaccctacggtgatctctaagtgttcaagtgaaaggaagaatcacaggtctctgactttaaatcaaaagctagaaatgagtaactcaatgaggaagacatatctaaagccgagacaagctgaaaaccaggcctcttgagccaaactgttagccaagttgtgaatgcaaaggaaaagtttttgaaggaaattaaaagtgctactccagtgaacatgtgaatgataagaaagcaaaacaggcttattgctgatatggagaaagttttagtggtctggatggaagatcaaacagctctaacatttctattagccaaagactaatccaaagaatgtcctaactctctttaattctgtgaaggctgagagaggtgaggaaactgcagaagaaaagtttgtagctagcagaggttggttcatgaggtttaaggaaagaagccatctttataacataaaagtgcagggtgaatgcaatggtgcaatcatggctcactgcagcctcaaactcctggattcaagcaatcctccctgccttagccttccaagtagctgggaccacaggtgcatgccaccatgcctggctaatagacaagatgttgctacattcatcaggctggctttggactcctggcctcaggctatcctccttcctcagactactattgggggaacccacccccaatatttcagtgtaggttctttctattttccctaagtgtcagccagtctgagaaataaagagtacaaagagaggaattttacagctgggccgccaggcgtgacatcacatatcggtaggaccgtgatgcccacctgagccacaaaaccagcaagttttattaaggatttcaaaaggggagtgggtgtaagaacagggagtaggtcacaaagatcacatacttcaaagggcaaaaaacagaactactgataagagtccaacaaagatggcaaggcaaagggcaaaagcagaattactgataagaatgtattttcagcggtgcacgtattgtcttgataaacatcttaacagaaagcagggttcaagagcagagaagtggtctgacctcaaatttaccagggcagggtttttccctaccctagtaagcctgagggtactgcaggagaccagggcttatttcagtccttatgtcaaccgcgtaagacagacactcccaaagcagacgtttatagatctgcccccaggaatgcaatccttttcccagagtattaataacaatattccttgctaggaaaagaatttagtgatatcttccctactggcacgtccgtttataggctctcttcaagaagaaaaatatggctccttttgcccgaccccacaggcagtcagatcttatggttgtcttcccttgttccctaaaaattgctgttattctgttctttttcaaggtgcactgatttcatattgttcaaacacatatgttttacaatcaatttgtacagttaacacagttatcacagggtcctgaggtgacgtacatcctcagcttacgaagataacaggattaagagattaaagtaagacaggcataagaaattatgaaagtattatttgggaagtgataaatgtccatgaagtcttcacaatttatgttcctctgccacagctccagccggtccctccctttggggtccctgacttcctgcaatagactaccaaagtgttaggattacaggcatgagccactgcacctcatctgaacataactctcgtatgcactaggaaaccaaaaaatggtgtgactcgatttattttgatctttgctttattatagtgatctagaaccaaacctgcagtatctacaagttatgctgatatatggattattcctatcacttttgtttggcttatcaaataaaaaaagcatctgtaactttatacttgggtttcttttagcaccaaaaagttcagtgttttgggttctaaagattcatttaggcagagtatttaatgatttaagactggtgtagattgaagcttttgctgaaatgaaacccctttagccactcttcctttcctttcttccttcttgaaggtttacatttttctcctttcctcatgacttgatgatgattctgtaattgtctgatctgctacttgctaatttggcattaaatttcaagttaatatgtgtgtgcatcttttttgcccctcaaaatttggatgaaagatgtgaccatagctgcagcagacatgaaaggtgaagttcctcctgcaatcccagaatgtggaaatggtagggagggttttttccctggcaaatcacttttgttgtgcttttttctaaaataagccattgcaatatttcttatagggctttcagcgacagaaatccgtacttgcctgcactttgaggataattgatattaataatgtgatcttaagggcattattggattccagagtgtcttctgaattattaatgaaagattatcttaagcatagttttttagttcattgcattttattgcattataattaactgaaaagtagaaatttgtatatttcatataaatgagaaccttttcatttaacagtagcacataatccattaacatatgtatagaaatctgtaagtatagaaatatgaaatatatacatgtttctaaggcaatcacttcctaccattctactgctaagcctggtctaagctcatcccttgtttggattagtgcactgacatacttggttaccaggcttctcttctggacttttcttttagtccacataacggccaaaatagtatttacaagcatccagagaccaatctaccctctgacttgcttagccctctactggccccttgactcattactgtgctgtcaggccctcttcatcgcttgtgcctctgacttcatctcctgccatctctttgaggtaaagtcttcctgcctgctgaccttcctgaagtgagccaagcttgctcctaggggcctaggcccttagtgccagctgtctcccctgcctgggtggtgccttcttgacacttagattctactgtgtttaaggtgacttcctccggccttccctgactgcatcacaagttatcccttctccaccttttttatcactattagatttttttttctgaaataacacttggattattttacttctttgatttaagaatctataaggtagaatgtttttggatgagaaaaaaaaagaatctgtaagtgttttctaaattgcatatttcatcaaatgaaaactctccaacctgggttttttttttcttgatctttatttctcatttgaacatttatgttttagagaaaatacttagagtccctttccttgctgagattctgtatttctagcaattgatcacttaaacaacgtaaaccttaatagataaatgccataaatccactggccctgtgcattattttatgttttggtcttttttttttttttaaggtttttttttttttttagtatttattgatcattcttgggtgtttctcggagagggggatgtggcagggtcataggataatagtggagagaaggtcagcagataaacacgtgaacaaaagtctctggttttcctaggcagaggtccctgcggccttccacagtgtttgtgtccctgggtacttgagattagggagtggtgatgactcttaatgagcatgctgccttcaagcatctgtttaacaaagcacatcttgcaccgcccttaatccatttaaccctgagttgacacagcacatgtttcagagagcagggggttaggggtaaggttatagattaacagcatcccaaggcagaagaacatttcttggtacagaacaaaatggagtctcctatgtctccttctttctacacagacacagtaacaatctgatctctctttcttttccccacatttcccccttttctttttgacaaaactgccattgtcatcatggcccgttctcgatggtcgctgtctcttcggagctgttgggtacacctcccagatggggcggctgggcagaggggctcctcacttcccagatggggcagctgggcagaggcgctcctcacttcctatacggggcggccgggcagaggcgctcctcacctcccagacaaagggcggccgggcagaggtgctcctcacttcccagatggggcggccgggcagaggcgctcctcacctcccagacgaagggcggccgggcagaggcactcctcacctcccagatgaagggcggccgggcagaggcgctccccatttcccagatggggcagccgggcagaggcgctcctcacttcccagacggggcagccgggcagaggcgctcctcacttcccagacggggcggccaggcagaggcgctcctcacttcccagatggggcagccgggcagaggcgctcctcacttcccagatggggcagctgggcagatacactcctcacttcccacacggggcggctgcccggcagaggcgctcctcacctctcagacggggtggccgggcagaggcgctcctcacatcccagatggggcggccgggcagaggcgctcctcacctcccagatggggcggctgccggtcagaggtgctccctcacatcccagatggggcggccgggcagaggcactcctcacctctcagatggggcggccgggcagaggtgctcctcacttcccagatggggtggcagccgggcagaggcgctcctcacatcccagacggggcggctgggcagaggcgctcctcacctcccagatgggttggcagctgggcagaggtgctcctcacctcccagacgaagggtggccgggcagaggcgctcctcacatcccagacgatgggtggccgggcagaggcgctcctcacctcccagatagggtggcagccgggcagaggcgcccctcacttcccagacggggtagcggctaggcagaggcgctcctcacatcccagacggggcagccgggcagaggtgctcctcacttcccagacgatgggcggccgggcagaggtgctcctcaattcccagacggggtggctgggcagaggcactcctcacttcctcccagacggggcggccgggcagaggcgctcctcacctcccagatggggcggccgggcagaggcgctcctcacctcccagacggggcggccgggcagagacgctcctcacctcctaggtggggcggccgggcagaggcactccccacttcccagacggtgtggcggccgggcagaggcactcctcacctcccaaacggggcggccgggcagaggcgctcctcacttcccaggcggggcagccgggcagaggcgctcctcacttcctcccagacggggcagccgggcagaggcactccacttcccagacggggcagccgggcagaggcgctcctcacttcccattcggggcaaccgagcagaggcgctcctcacttcctcccagacggggcggccgggcagaggctctcctcacttcctagacagggtgggggccaggcagaggtgctcttcacttcccagacggggcggccgggcagaggggctcctcacatcccagacgatgggcggccaggcagagacgctgctcacttcctagatggggtggcgggcgggcagaggctgtaatcttagcactttgggaggccaaggcaggcggctgggagggggaggttgtagcaagccgagatcacgccactgcactccagcctgggcaacattgagcactgagtgagtgagactctgtctgcaatcccagcacctcgggaggccgaggcaggcagatcacccgaggccaggagctggagaccagcccggtcaacacggcaaaaccccgtctccaccaaaaatacaaaaaccagtcaggaatggtggcatgtgcctggaatcccaggcactcggcaggccgaggcaggagaatcacgggagcccgaggcagggaggttgcagcgagctgagatcatggcagtacaatccaggcttggcaagagagggagaccgtagaaagaaaggaagaggggagaggggagatgggagaggggagagcttttttttttttttaaagaagagtcttgctctgttgcccaggctggagtgaagtggtgcaatctcggctcactgcagcctccgcctcccggtttccagcgattctcttgcctcagactccttggtggctgggattactgccaccactgctggctaacttttgtatttttagtagagatagggtttcaccatgttggccaggctggtcttgaactcctgacctcaggcagttcacctgcctcggcctcccaaagtgctagtattacaggcatgagctaccacgcctggccctgttttggtctttatcagtggctgtgtatgctttcacagagttcaaatgggtgcgaacttgtccctggatactttgcattgcatttttatatggatggtcctgagttatacagtactgaaccccgaatactaacacttatgtaggcaccttgatgaaaaactagagtgatgttaggtatgaatgcttgattaagcccattcttttagtgcagaactgccttgtggctcagcctgtgtagctgagatgagcatttcttagccttgcactatatatttttgtgcctcagttctctgtgaagtcttcttatgaggctgaggctgtgcaagacttggtgagagtgttagcttctgaatagagaggcttcagcaacccgtttttgcaaattaatcaaaagttgaataaggcttgttgttaaattaaaattgtattgcctgtttacaagtgatagttatacatactgtgttcttaagatatgaaaaagcactggtggcatttcctgggaaaaacgtagtggatttgctcccttttataactgtatttgtggactttacaaacttagacaccttatgtaactcagggattgtctatattgacaaagctgatgaatttgtgatgtgtaataattaagtagcatctttttgtgttgttaaactttttttttttttttttttttttttttttgagacagagtctcactctgttgcccaggttggagtgcagtggcgccatctcagctcactgcagcctccaccacatcctgggttcaagcgattctcctgcctcagcctcccgagtagctgggattataggcatgtgccaccccacccagctaatttttgtatttttagtagagacagggtttcaccatgttggccaggctggtcttgagcccctgacctcagatgatgcgtctgccttggcctcccaaagtgctgggattacaggcgtgagctaccacacccagccccattatttgtttaaataattacttattggggcatttaaaaatatatttatattttccttagaataaatactgtgttagtctgtacaaattcttttggggctgcagtctcaaaagtggaatgaataggattaaaaacttgaatagtttaaaatttttcttgtatatttccagatatccattggaaagactggcaaaatcatgaggaccaggttttttaagaagagacttctggagtctaaaatttctagatcttatgaagtcttaatttgttgttaattaaaggatataaagtggtttatcaagttttagtttctactttttcatttattcattagatgaaattttaaatattatccatttgtcatgatatggactgacactggttctttttttgagacggagtcttactccgtcaccaggctggagtgcagtggcacgatctcggctcactgcaaactccacctcccgggttcaagtgattctcctgcgtcagcctcccgagtacctgggattacaggtgcccaccaccacgcctggctaatttttgtatttttagtagagctggggtttcaccatgttggccaggatggtcttgatctcttgaccttgtgatccacccgtcttggcctcccaaagtgctgggattacaggcgtgagccaccgtgcctggccccgatactggttctttaacttttgggaggatagtaaattttttaatgttggatttggcgtgttctccccatccattaaaacattgttttttatttaaatattggaaaaaacctttctcctttaatcacaccctctgtatctctaataatcacatttggctttgttttatagttaaatacatacatctatttattttaagatgttattatgatttaagtaataaaggaaaagtgtatgagtttttgctctcaaaatattctttcgtatttgtgtctacttaatttttctgataaattttacaatcattttttattcgaagtaggcaagcctgcagagagcaggctccagctgatgaaaaaagttttcaggccccaaataagggtgaaccagctagaaaccttccttaggattgatattgctatgtagcatggctgtccccatcgacctcccaggcctcctggcttcagtaatttgtgctgtgtctcccagtccctgcctctatgtggctctttccacagagtttttgataatgcttcaaacctacatatgaattgggcagatgtctctgttgctgtatttagtattccagatagaatcctcatatatctctccacttgtctttctttattcccattagggttttaaaattttctttaaatagattgcttatatcctacttaaagttaattctcccaaattggtgttttgcaaatgtgattgctttgcaattttattttcagatcctgtagctatgtataattttttgaaattttgaaaccaaggacaatacacatttatatatatttaaatttatttattacggtactctttgtaaattgagggtggtgtacctagtaaaattctcagtgtgttcttttttctgcactacctgaaaataccttttctattttcagtctacaagtttacagcttctttaattcgttcaggtgtcactttattgagtgctatttgtggagaaacagatacagagtctgaaaatactgcattgcttgtttgttaatatgttcaaatgcacttttatcttctatctttaaatctctgtgaatagatcattcttaaagtccttgcaagcactgaaattgtttctggagattaaaacaaagtgaattctctaacaataaaaatattttaaatagacttagattttattgatggaaggtagaagtacctgggcattccctaaaggggttttattttatgtgggcgcttgttgagaaatgtctgagaacagcatcttctctgaatcagctgcagtggttgctgtggtcatcggccccagagtcttcggggagcaattttgttgacacaggagatgttctcatctagcatgtgtcctcacctgaaggcccatcaggattcttagctggcaccgtttcctgaggagtgcctttggaaggaatcttcagagtaattgtgtgaccactggtaaccttagggaattttactagaggattgtgtctttattttccctagtatttgtacttctccttggaggaaggtatttaataattttggttgacggaaaaacaaaggagtgaactaataaggatagaagctaatatatgaatagcctttatgtgttttatgtttttttaagttgatctctaaggcatttggagagcatccagctacatgatgtcattaccgaacaagtgaagccatggggcatacattctgtcgtactcacaggctggcattttccattatgttaccacatttgtcgactggtgtcaccaagaacaaatgcaaacatctgtcttcttgtagatgtggaatatttgtaataggcatacttaacacggtatcagctttttcttgtttcattgctttagggaaaaaaatgtattgagatggcttgctgacagatgtgaataaagaataaaatgtttgcccttggctgggcatggtggctcatgcctgtagtcccagcactttaggaggccaaggcgggaggatcacttaaggtcagggatttgagtctagtctgggcaacgtagcaagaccccatctctaaaaaacaacattggctgggtacagtggtgcacacctatagtcctggctgctcaggaagctgaggcgggatgattgcttgggcccaggagttctaggttacagtgagctataactgcgccactgtactccagtctaggtgacagagcaagaccccatctcaaaaaaaaaaaaaaaaccagaaagccctcaagatgctcatttgctcattgtcaagtataaataattgccatacaggaaaataatagttgggtacagttgtgtacgtggtgtgagaaattctgaggaagttcttcaggggatgattcagaccagctgaattataagcagaagttttttgttggtttttgttgttgttgtttttgagacaaagtcttgctctgtcacctagactggagtacagtggcacagttatagctcactgtaacctagaactcctgggcccaagcaatcatcccgcctcagcttcctgagtagctgggactacaggaatgtgtcccagctactgtcccatgcccaggtaattaaaataattattttgtagaggtgggggtcttgttctattacccaagctggtcttgaactcctagccttaagtgatcctcctgccttggcctcccaaagtgctgggattatagacatgagccactgtgactggcctataagcagagttttgaagggtaaatgaaaatttatgaggagagtggtttgtccaagagtccaggtagtagacaaggaagctggaagagtggatggagccctgagtaccaaggaaaggatatcctgttttatctgcatttacaaaagctctgttcatgtgtagtgtaggttctgaataggaggggaggagggactgggagctgggactttggttaaaaggcttttgcaagaatctaggcaaaaagggtgggctcaggaaatgggaatggagaggttaaatttgaaagatatgtagggagtaaaattagtgggatcatggacaggtttggtgtaggtggcaagtaagaaggttacagcccagaatgactctcaacttatgagtggatgccattgacccatatgaacaatacaaacgagaaatctgttaaaaattcaagttcaaatttatacatgcaacaacatggattaatctcaagaacattatactgagtgaaagaagctggacatgggtgaccacacatagtacattatttcatttatatgaaactctagaaaagacagaagactgaccagtgattgcctggggccactgagtggtagaggtacaagaagatttttggggtgagaaatcttgattgtggtggtagttacatggatgtataaatgtgtcaaaattcgttgaaaggtccactttaatgtttgcatcttatttgtttacattatacttcaataaagttaatttttaaaattcaatttaggtctgggccagagagaagtaaacatttgtgagttagtggtgtttaaatcgtggctgaaattccaggaatggatgaaatcatccaagccacatattgaggataaaaaaaggaccaaagaaagtggcctagggggtcccaagctttaaggggaagggagggaaataagagcctttgaggacaacaggagtggttagagctgaccagaggacagtgacatgaatccagggaagagaatttcacaaatggaagggtgcagaagtttccctcactgcaaagatgtcaagatcaggactattggattcagcagtttggaggtcgttgtttttcagtgaaattgtggttgattgcagatactgagcatgagagcccagagagggtagggaagactgatactggcattctttcaggaattctggctatgcagggggccagaaaaatgggcagttaggtggttggggcttaggtggttggggcatccagggtccaattcttaacaacgtcaggatcctttcatcttttatacattgaggggctctggtagaaaaagccagatggtagatagggtaattgacggggaggggctcaggagcatgggacaaaaggagagggcagtgctgtaaggtagatgccaaggtgatgaaacagaggggacctggaggctggtgtaaggaggagctgaagctgtaaagtaactccttaggaactgggaaagaggactgaccatgagtgagtagaggggttgcccaggagagttaggagttaggtcagaaaccacgcagtggttttctggtaattttccccagctgtgcctagcaacatgggggtaggcacttccatttccaaaaaaatagatctctgtcacagaataatagtggctgacattttcttaaatctgctgactaggaggcttcaggatacaacctctgcccacagcccccaggccccagggagtgcccgagcgtcctccagatggggtgggcagcacggcccctagcttctcccgtctgcagcaccctctctggatatgctattgctaggagttgtatttgtggtggattttgtgactcttcgagtcaaggttttatttgtctagaaatgagagccttgtctgaggagaacatgcattttttaatgaaacgtgacaggatttgccactggtgttaccagcaggcctgggcagaggcctgtgtcaggtttaaatgtgagctgcaggcagagtcatttgtttgtggtccatcttctaacagtcattttgaaatgtcagtgttcacttctggttggaggaccaccctgagaagattctctttcccaggagtcagtattggcttgtgatgcacgtctaagatcctacataaaaatgactatagtaagccagcagccctgcggcggccagcaattccattagatgagtaggaagagagctgtgctttctgctgttgtttttactggctggtgaagctatacctttgctctgatgttatacccagaaagggaatcgtctcctgaaacttgaagtgttcctctgatgccgaggcctggccttccctgagggattgccccaaggtccctacaccagtgctggcccaggcttgccctctccagtcactctggtttgttgtcaggcagagaattttcactttcatctttgctgctgacttcgccctctcacctcttaattttttttctttgtaaaatttaggaccttagttacgtgtcgtattgagaaagcatagatgactgaagatccatcaggcttggagtcttcattacatacttagtaaggaggtgaggttgggtgtgacgctcattcttctggacccagtgtcctcttctgtgagcaaaggattgtggttgtgtctgccctgacacataggagtgctctgtgggttaactcagaacagaagtgggactctgaacattttaaagcagcacacacattagttgtttttaatgttactaatccagagaagacctttcaacctttcaggacttttcatgcttctcaagatcggtttctcagaatgttctctgcaaaaccatgcaggggtgcaagtggaaggagggagagagtccttggacctgagaacctctgagatttacagactttgttaagataatgaaacagctctgtgaactattcttagagaaaagtgattctgtgtgtaaattttaagtgtacttggtgatattatgctcagaatactctattctcaccctactgaggtattttatttatttaaacaaacccatcagtccttgtggtatatttacttagcactttatttaattgaattgcttcatttgggaaaacttaccgactcatatggatttatgccttgtttggggcagttagcccttgagggtgaagtatttctcagtgtcactgtgcataacagagatattaataataaatgaatttgttagttcttgcagtaaaacaagtatcctctataggctggttacatcccacatctatttagcattggtataaaaagacatatgagaaacggttctgcactcaaagagctcttacttgagggccagagacatgcttgtaaggcagtaatgtacaaatcatggaaaactctagtgtgataacttagcagaaaatgcttgttttgatgatatcagagaacccatttcaaaagcagtaacatttgatttgagtcttgataggtaacgaggtttcctgactaaagaacaggagacaagtgctgtctgcccagggtatttgtagagggtgtgagaagaccagcagctggtggtgggtggggctggagggctgagattagagacaggctgggccacaccgggcagcatgtgccaatctaagccgtttcagctttctcctgggcagtggtcagccatgtacattacatgcatgcttcccttcactacatgttcttttatattgaataaggaggaatgtgtaatacattaagatagccttcataggaagattctgcccctaatttgttgtttatgtgactttctatgccagccaccctcccctcttcctcttacctagaaaagaaatgggtgtccacttcgtttacagtggtctctactgatggaatttgggagaaacacccccttttgaaaggaaaaaaaaatcgttctttgccaattactgctgtgtaccttcctggttatattctcaaaggaaactaatgtcatcttgtattagggtactctagagggacagaattaataggacagatgtatgttaaaggagagtttattaaggagtattaactcacacgatcacaaggtggggtctcacagtaggccatctgcaagctaaggagcaaggaagccagtctgagtcccaaagctgaagaacttggagtatgatgtttgagggcaggaagcgtccagcacgggagaaagatggaggcttggaggctaagccagtctaatctctccacgttcttctgcctgctttttattctggtcacgatggcagttgattagatggtgcccacccggattgagggtgggtctgcctctccgagtccactgactcaaatgttaatctcctttggcagcaccctcacagacacacccaggaacaatagtttatatccttcagtccaatcaagttgacattgaatattaaccatcacacaactgaagctggtaaattaaaaaaatttaaaactcccagaatttatcttctcttcccagttgaataggccttggtacgaattttagacggcttctttgacagacttttctgtgggcctgtccctgtggactggctttctgtctgttctgctcttgcccattcacttattcatatcctttgtaactctgaagggcatctgcccttgactctggccttgggggacttggtgaatgtagggcccatctgggctaagggtcagagttaagtcttctgatgttggtaaaataagacagttgaagccttccccccttcccttttatgcctccaaaaaaaaaaaccaaacaaacaaacaaggaaaaaaaaaaagtgaggctagagtaactataaataacacaaattaacagatttcatgccagcacaatgtgcctgttggccaagaagcagcacttcttatagctcctgtatggctcctgtacagtgtcactccgggtgtagcacgatgcactcttgggcattcctggtatctgtccatcatggagggtttggtagggtccagggcctcaaatggaaatggtcgggaactgatagacccttaactcatcttgttctgggttggcagcctcgagtgcacatgtcagtgtctgcccaagaggctgtattcttatatgtcatatgctttaagaatcagtcttcaagttgatactatttttctaagtgatttggaagattgaattgaaagaccattgttggaaggcaatggcagcaagtagaatgtggcatttatgaagaattgggttccgttaaaaaatgagtgtagcaaaaaccagacagtcaggtaaaaggggaagaaaaatctgttaatgtttatttggcaggtaattgttgctgagatgtttacttaatgttggaagacatggaagatggtaagaataatcccacaggctctgagcaggtggaataggctgtatgcaagtaagaagccctgagcaagtgaaaccctacccaataaagaggtctagcaaaaagtacagttcatgctctgtcatgtataatgcatgtgcctatcagaaaatagcctgttactacagttatgccaccattagcataaatgccaccattagcagaattacattttaatgtaattattgatatagttgaacttaggtctccaattttgctatttgttttctgtttatctccttattttgttattcctgatcctcctttcctgccttctttagtgctaaccaatttttttccatgtatctttctgtttttagttttatttcttttttaaagtgattgctctaaagattgtaacattcatcttggatttatcacaatatacttaaagttgatgtagaattgcttctgtggtgatacaggaagcttgcaacagtgtacttccatctgtccagtcctttgagctgtccttgtcaggttcagcctctgcctgtgattgggacccctggtgggttttgagcagagtgatatcaggagcagctattgctgttagctgttcctgttagcagtacctccagacccactgattattctaatagagcagtattcaattctagtttttagcaagtttttaaaaactttgagtgcatggttttcactgtttaaaaatagcaatgtgttgtcccttataattgagagagatgagctttagggtccctgaaagagaatctcaaaagcccgtttaaccaatgtgccagattgcctgactttttatgacgtttttcttaattagtggatttgtgttatattttattggctcaaaagtgaatccctagctcatagcttatttctcaaatcacttagcattttaattacttttcaatttttgagatacaagtcacatattttctttttaaaattaatatatgtactttctcattgtaaaagacctgaactatacagaactgtaagaagtaaaagtcttagttttccttccagagagaacatgttaggaaaatctcttggcatctgaggagctggctgtctatttttacttctatattgactagctctttttccttctaataaagagtgtatattggtttaaattataccaacttcctctgggttttagaggttagcttatttgtagacgagtctacctaccacatctatttctccttatggcttagagcattttctgatcatcagcataaaattttaggtgccttattcattttgccccaagaatgttcaaactcctcaacctcagaaatgtttctagtagttgaaagactgttttgcgattacttttattggattctacacagaagtacccatagcatcattgaactagctctgttgcataactgtcctgtgtctaaaaatacactgctgagtagcatcagctcttgcccagggatatgaacccacactctgggttatttgtactgactctgaccacagactatcttccaatatatcctgcaaaatgatcctttatggaaaacaccaaacttcttccagtgaagtctgatactgttgtagttactgacagcataacagactgcgcttgttgtttgttcatccaagtttgactagccaacattgaaggattttttttttttcttaacagatgaggtctctctctgttgcccaggctggagtgcagtgatgcagtcatagttcactgtaagcttgacctcctgggctcaagcaatgctcccgcctcagcttctcaagtagccggcactacaggtgtgtgctcccatgcccagctaattttggtattttttatagagacagggtcttgctgtattgtccaggctggtctggaactcctggcctcaagtgatcttcctgcattggactcccaaagtgttgaggttacagatgtgagccatggtgcccggccagagggattttcataattatatttatacttctctgaggtctttggtgtctggggttgtagattgtgtccatctgtacttaacccatgcacacagagtgttgtttagtgaatctgacttgaaactccatgcaaagtcacagtcttggctgggtgcggtggctcacgcccttaatcccagcactttgggaggtcaggaggtcaggagttcgagactagcctggccaagttggtgaaaccccatctctactaaaaaaatacaaaaattagccgggtgcagtggcaggtgcctgtaatcccagctactcgggaggctaaggcaggagaagcgcttgaacccgggaggcggagtttgcagtgagccaagattgcgcgtctgcactctagcctggggggacagagcgagactccatctcaaaaaaaaaaaaaaaaaaaaaagtcacagtctttgtattagggccagggagtattgtccagctattcactgtttagagctaatacttcctttattccctgttctatcacataaaaaactatagaaccttctcttgctggctgtgtgtacagtgttacaataatttacaatgcttaaaaataggcagataattgctctgggatccagatgtggaggttgagatgactttattggggaatgtgttaacatatcacagatcgcagcaagggaactaacatttgtgtataaatcactgttacatctttgagggttaaggcatctatttttttattcacttagagtaccaactagatttttttcaactgtcattttgctgcctatttccatgtaagttgaaggtatgatagtcacattttttttgtttttgtttgttttcttttgaggcggagtctcactgtgtcgcccaggctggagtgcagtggcacgatcttggctcactgcaacctctgcctcctgggttcaagtgattctcctgccttagcctcctgagtagctgggactacaggcacgcatcactacgccgggctattttttttgtatttttagtagaaatggggttttgccctgttggccaggctggtcctgaactcctgacctcaggtgatccacccccccggcctcccaaagtgctgggattacaggcgtgagccaccgcgcaaggccgcgtgttttttttttcttttaattaagtgtatgcatacagttgccatttgcaaaatcttactttcataaatacatattaaaatagtgaaataatgtcatatgaaaagaaaaatttagttttgtttagagatgcacagaatttctctttatttagatgtaaaccaaagacaattatgaattatttatcaacactttacctttcaaaataaattaaaaaaacccacaattttgtgttaaatatggaggaaatagaacgtatcactgagagccaggtaatttgaccaaagaaaggtacagtcaataaaatgacttctcttggatctcttccttattctaatcacacttcaaggaagtttttaaatttaaaaaaataatttgaatgctatgaaaaatattgtataatatttaggaactgtcaagtgtagttttatatctaactagaagttaaaatatggaagtgtgaaaatgaagatgaagatgcagagagttagtttagaggaaagagtactaacttgggagtcaacatgccaaggttcctttggtctcagccatgaattaagaaacctaaaacaagtcctttattctgtcttagcttactgtatcaccttctttccctttgggtttttattatttttattgaagcatgtattttctagtagttcttagagtaactatctatagaaggtaaacctagtctttgtatttcagaaatatcttttgtttcatctttactcttcctgggtttggaattctgggttagctggttttgtcttagaactttgaaaatatgatgttattgccttctgttattcattgttactgttaagaagtctgctgccagtctaattatcattcccttttaactgttttttcagtctgctagttttcaaggttttctctttatccttaatgttttgcagcctcacagcaatctacctagatttgttttttgtttgtttgtttgttttttaagacggagtctcattctgtcacccaggctggagtgcagtggcgtgatcttggctcactgcaagctctgcctcccaggttgacgccattctcctgactcagccttccgagttgtgggactacaggcgcccgccaccacgcctggctaattttttgtatttttagtagagatggggtttcaccatgttagtcaggatggtctcgatctcctgaccttgtgatccacctgcctcggcctcccaaagtgctgggattacaggcgtgagccaccgcgcccagcccctagatttgtttttatccagtctctgcttggcactcattgcgagctttcagaattgagattcaagtcttcaattatggcacatttttagcgttagttctagtattgcctccccaccactccttctagctttatttctggaaatcctactagatgtgtttcttttcactctacctgttatgttacttcacttctcatagagagaagtgttttatctctattctatacacagagtgaatttaatttactaattctctcgtttactgtgcttggtgttgtttctccccatctactgaccatatatttcattttcaggattttgaataggtttttgttttcataactactgcctgattttgtttctaaaaatttttttttttctggttatttttcttgtgtatctctttggaagttttttttttctttttttcttttttcttttttcttttttttttgtttttgagacagagtcttgctctgttgcccaggctggagtgcagtggtgcgatctcagctcactgcaagctccgcctcgcaggttcacgccattctcctgcctcagcctcctgagtagctgggactacaggtgcccgccaccatgcccagctaattttttgttagtagagagggggtttcaccatgttagccaatagggtctcgatctcctgaccttgtgatccgcccgccttggcctcccaaaatgctgggattacaggcatgagctaccgcgcccggcctggaagttttaacacatttatattaaagttgttttcaatttgccatgtttttattttgtcaggagaaaatttatgttttgatggttgagttttggttcgtttttctttttttttttttctttttctttctttttttttttttttttttttgagatggagtctcgctctgtcgcccagtctggagtgcagtggcgccatctcggctcactgcaagctgcacctcccaggttcatgccattctcctgcctcagcctccctagtagctgggactacaggtgcctgccaccacacccggctaatttttttgtatttttagtagaaacggggtttcaccatgttagccaggatggtctcgatctcctgatgtcgtgatctgcccaccttgacctcccaaagtgctgggattacaggcatgggccaccgcgcctggccgtcagtctttcttgaagttggtttccctcacaagctttgggcttttagtttagaagcctgtcttaagtggacttctttgtccccctctgtgccctcacctttctggagtggttttgctattgtcctccccaggatcctagtttagtacatgatcttattttggaagttcaggctcctgcccttctcagtagtgagtagagggccaatcttttcccttcgaaggctgcaggctcttgagcttcctcctgctgccccagggatgggctttatctcagccatagcctccggtagtggccacagacctcttttcagtttctttccacagtggtttcgtgctgcgtcatactcggagccatttgcctctgctcccatccttcctaactggggtgtgcctttggcctcttcctgtttctgaacagtagagctgtggcctcagccttatcgccaggctctgttgttgtaccatgtgtcttgtttgttctgttggtaaacatgcctgccttccttgcttccttccatcctcccatctatcattgctaccatttgccatagtgagtgatacgtaaaacctgaactcacaaggcattttgcccagaaattgtcttagcttcttggtctttactaaataatctcaaggtcccgtccagctccaaaaattctaagttgccgtatacacagcaagagaatttacctatgaccaatcactttcctgtccttatgcgtctgggccaaacagtctcatgaattattgatcgcagaagatgtccaaagtattgtggcctctgcagaagcttttccagttttatttgccttcccaattcttattttctaagctggactttgcttttggattgaaaaaaaaaaatctgaataacgctttgggtcctgttggctccaagaccacatccatgggaatggagttggccactgtcacctcttttctttctcagtacccacctgctttcctctgacctggcttcagagacctggatgctcccggaaacagcttcttgggcactgaggactcatttgtactttctcttaggaagttataacatattgttcagcaagctattttaatgtggcccagaggggactcaagagggtaggaggaggagtcgtcagccagaaggaggtagaattcacttttttacaagcttctaaagtctcttcatagatgattgctggaattgtttgtttgtttgtgttttacgaatgatgtttaataaagaactgccaaaactgcagttagcattttttgaaaaataaataacttagtaaagaagcagccatatggtatctgtttagaactggaagtgcagaatctgttttcaaaaatagacctacaaaaagactgaacacaaaccaaaaacccttccaccttaataaaaataattcatggttaatttttttaaagatgtatgaatttaaaacttttacagctagtacattaaatttggcaagtagaaattctgaggaagaatgaatttgattccgtcaggtggttctcaaagattcttttattgtgaactttctaagtagaagaaagaattgtaaggccggtgcggtggctcacacctacaatcccagcactttgggaggttgaggtgggaagatcactgaagttctgggttttccatccaaatatcccacttcaggaactgcaggagtttgagaccagcctgggcaacatggtgaaaccctgtctctacaaataatacaaaaaaaaaaaaaaatcaaatctgggcgtggtgggatgtgcctgtagtccctcccagctactcgggaggcgaggtatgaggatcacccaagcccatagatcgaggctgcagtgagtcactccagcctgggtgaccctgtctccaaaaaaaaaaaaaaaaaaaaaaggagcttcctgaatctgacagattgagttgtacgtggacatttgagctttccgtaaattttctttctgtgattcctcttgattggtttgtctgtaaaagattatcattatctgaagagtaattatctaaaagtatgatttgaatttttgcataaaaaattatcattaatggtaaaatgatttgtatcggaattgagttgttttcttcattttaacttcatttatttatttatttgagacagagtctcgctgtcacccaggctggagtgcagtggcgtgattttggctcactacagcctccacctccaaggttccagcgattctcatgcctcagcctcccaagtagctgggtagtttaacttcttgattcagcaaaatgttcttagcccttttgaacagcatgtgacaggccatttgtcttataaagcatatcaggaatctatctctagtagtgtttcacggcatttgtgaactggggtagttaactcagttggttaaacccctctgttggagcttcagcccctggattgactggttcatttctttcagttttctgcacacagagccttcgtcttaaaagaggaatggatcctcacagatccatcccagttatgaaagcaatttcagggtatacagcctggggatggaatgtatgtcagtaccattttcattaaaatatacacacatactctctttttcttttttaaatacataaaaattacatacagttgttgcctatggtgggacaagcaagaaatttaacatttttaatctttgtagtaattgcatagtatttaatagattattttatcatgtagtctaggtctctgtgcagccataacctcacagaaaaatgtgctatgatgtagtttaacctgtcttgaaggtgtttgttggagttattttattttatagtgccacagaaatgtgccaaatttcaagaagtgtctctatttatatcttattagaattcatttaaaaaatacaaatagattttcatgcaaaggtcatgattataacttcaaaagagcctttattttatgcagcttttattttgttataatgtcttacagggaatgtcattttacaagggaggaaaattgagtatcaagctgctttgagtgactgggctcagtggctcacacctagaaattccagaactttgggaggccagactgggaggatcgcttgagcctaggagtttgagaccagactaggcaacatagtgagaccctgtctctacaaaaaattaaaaaataaaataatagctggatatggtggcatgcctgtagtgccagctacttggaagattgaggtgagatcatcacttaagccagggacatcacggctgaagtgagccttgattatgtcactgcacttcatccttgggcaacagagtgagacctggtctcaaaataaaaggaggctttaagttagcctctgattcacaatgaggcagaaatgggatcctgagacgcagagcattcatttgggtggaaaaccttgttatattttgcactgggacattttcacatgagattttcaaaggcgggagctgaagtggtgtgtttttaaaagcaaggtacagaacagacaatgctatcatttggttttagaaaatctatacgtgtttgcttctacatgcatggaatatctctggaaggatatgcaagaaactggtaatagtggttgcctctgggaagagaactaggtggcaagcagacagagggggagggagatttgctttctctgcatcccttttccatctttgacttttgtaccatgtacatgagatgcacattcaaaaaataaataacagtctggttgcagtggctcaagcctataattccagcacttcaggaggccgaggcaggcagatagcttgagccccaggagtttgagaccagccatggtctcaaactagggcagcatggagaaaccccatctctataaaaaatacaaaaactagctgggcatagctgggcatcgtggcgcatgccagtggtcctggctacttgggaggctgacacaggaagatcacttgagccctggaggtcgaggctgcagtgagtcaaggtcatgccactggcccggcatggtggctcacgcctgtaatcccagcactttgggaggctgaggcgggcggatcacctgaggtcaggagttcgagaccagcctggccaacatggcgaaaccccatctctactaaaaatacaaaaattagacgggtgtggtggcaggcacctgtaatcccagctactcaggaggccgaggcaggagaatcacttgaacccaggaaacagaggctgcagtgagccaagatcgtgccattgcactccagcctggacaacaagaacaaaactccatctcaaaaaaaaaaaaaaaaaaaaaaaaaagattgtggcactgcactccagcctgaatgacagagcaagcctctgtctcaaaaagcaaaaataataaataataaaaatacccaaattacataagtcttcagagtggacttattcaaacataatgaaatctgtttgtatttcttgtttcttttacttgagaggtattattagggaacattattatgaactgcatatggaagataatcttgaaactgttcatcagagaattgattcaaagtggtatattaggacagaaaacccagatacccaagtttaagcaggggtaccctcactagattgttggggcaaattgtgcagaggtgacaaaatgtgggtggagtcagatagtagctctgacattaggcagtttatttgaagtctctgtttctccattttctcttctagaaaacagggcaaatgtggtagacatccactgtttttgacatcctgcaagtgagctgaaatcgtgccactgcactcctgcatcctgcatccactgacccctcgtgccagttctagctcccttacaggctcctgccagaggtccagttcagctgtggatggctgatgacctcgcctaagctttactttttcctggaaacagcaaaatggaatcatggagtgggatcatgaccttctcagaacagtgagatacagagacactttagatagcacatgaggaaaaaaatatcgttctttcccactagacttaaatgagaggagagtgagaggtttgagtaacattcttccacaattctaacagtagaaactggagacaaagcccacacggaggagaactgggagcatggagtgagatggggccctagtgacactggctgggctggcttgagccacagctgaagctcattcggcccctggagatgattagcctccctacttcaggagccagttcactttttggctctagtttctgtcatatgtgttagaaatcaaaatcccaactgatacagggtgatatcagttaaatattagtattatttgatcattaaatgacgtgtttatgaagtgcactgcctgtcgtatggaaagcactcagtggtcatttttagaaaatttggtgagaagtccacctcacatttcactaataacttattctaaagtgaagtggaggctgacaagagagattataacagcgtcttttgttccttaaagtggtagaagtaaggccaaatactttaagataaaataagtcaaaataagtcttttttggtattttacagccaagaagcactagatctgcataggttcagagtagaggccatttgaaagtattcatttgagaatagatttgaatcccctgttgttttctagtttatgtttgtatgtttgagacaaggtctctttctgtcagccagactggagtgcagtggcacgatttcagctcactgcagcctcaacctccagggttcaggtgatcctcccacctcagccacctgagtagctggcactacaggcacatgccaccatgcctggctaatttttgtattttctatagagatggggtttctccatgtcgcccaggctggtctcaaactcctaggctcaagcgatctgcccacctcggcctctcaaagtgctgggattacaggcataagccaccatgccaagccattttctagtttttttttttttttttttaatacaattccattctatctgcttttttttttttttttaaagaaaaagctatttgggtgacttcaaaaaaaacaaaaacagtaggaattcaacaatagcaaaacaggaaaggactgatcaggctctctgaagaggacagtctatgactgcatgatgattttaactaccttccttcttctccagatcctccaaggcagaaaatcagaaaagcaactagagagatggaaatggattttttttttaagtaaagcatttaacattgaaccacaagacttactgagttatgtaatagcagaaatatcattgttgattttgtgacatgtcagtgctttcctaaaagtgcagtgtggcatattttttaaagattaaattgaattaaatatcaatttctattttaagaatttgagtagtgtgagataattggaaaggccccggagtgtttcagtaatggttgagaatcattgttcttaataatagaagtgaactctgaaatgccaagcattttatatactctggctaacctatctttaaagtaataatgtttctaatgcactggagctcatggcccccattggcaatcaccttgactcttcccctcaggactttcatatgatgatctcatcccagctccaccatatttctaaagtgtcatcttttattaccaggaagtgtaatctgcaatatatggttttgtttttgttgcttcattactttcatattctgaaaaaatagcacacactatagcaaattagcaaacgttaggcatataaagaactaggaaatcgagttgatatttagcttgtttttatgcaacagtaatggaaacttttagcattgtgtatcagcatgtgctactaatatcaaacaaggtctcaccaacttaacactgctcagacagaaaacttgaagattaaagtaggtcatgagtagagtgggatgggagttgaactgtaaataaaggctaagtcaggttcttggagagaaggttcttaaacatcagtgaaaatgtagtctactaatgatgctaataggagtttcaacaacaacaataatagcttatgcccatgtagctcttacatggctacgttctaggcactttacctgcattaacctgttcagtcaaccctccaaggcagggacttcatcaggaagcagaggcaggggttaagtgacttgctcccactgcacttggaaagtggaggagctggcgctgttcaccacctcttgtcctgtctccttctggagcattcctttgacaagccaccgcttgaagaagccaacgtgactgctgccaaggagactgagtgaacagttagagtgtggcagtcgaatcagtcatcgtcgtcatcgtggatggctttgcacttggaccagaattgaaaaacaatttgttcagttccacttacaaactatggagtttatctccacgtggtaatactgtcttaatgaaattaatacttttcaaggagaagacatttggattaaacaggttatggtgaccttaggtatctgaaaggctaactcctccaagaagctgcctttgttctcctgagtccacaaagatttttccccagaacttatttataatactcattcatcaactaccttgtcatatagtgtgtttgtagcattctttccatgttaatatattcagcaaatgtttattgagtccttgctgtgttctggtggttgaagacatggatttaggacaaactgggtccttgaaaactcggtaggtttcatatgggcggggagacaggagaccttactaatgagaatagggtgtgcagttgtcttgagatgagtgtgagaaaggcttaattttcttagcttcaaactaggaaactatgaatctctatgttgacatgtcctgctagttggaaatcttgattacacagactgtatcttgacttattttaatagtgccgttaggatactattaataacataatgatgcaaagtcctgctcagatgcagatattcatcagaagtaaacagcagccaagcacagtagtgcccctatagccccagctacgtgggaggctgagacaggaggattgcttgaggccaggagttcaagcctgcagtgcactatgattgcgccaccgcattccagcccgaatgacagagtgagaccttgtctttaaagaaaaaaaaaaaaaaaaacaagaagtaaatagcagacattttccaggaattggtagtgtggatatattgcaaatatgggtggtattttctgggctttattggttttccaaaatgggaagaaattggggaagagtttgaaactctgagaagctacttctttagtcttcttttgtattctctcatgggcgctctgccggatcagggaggagacttgtcacaggaatagaagagtgcaggggttttgcttctagcctgctactgacttaggcaacacagcttattccttttttcccatgtaatttcaaaaactcactgttttacttcttaaagtcttagaagtggacaaagctgtttataagagcagtatccttttccaatagcagtatccttttccaatagcagtaacaatgaacataggaaataccatactagcaccagctgccattagagaagagttcctggtttcagcttttcagccgtgaatttactcatgaatggtacctcctgggactcatatttttgttttaaaacaggtttgaaatgtaacatttttccaaagtagcttattaaggacatttaaaaatttattttcatagttatcaaggtgttattttttctttaacattgtggacttgctatgcttacctaagccaagtgttaaagaagttaaggctgggcatggtggctcacacctgtaatcccagcactttgggaggccgaggcgggcgggtcacttgaggtcaggagtttgagatcagcctggccaacatgcagcaactctgtctctactaaaaatacaaaaattagccagacgtggtggtgggtgcctgtagtcccagctactcgggaggctgagacaggagaattgcttgaacccaagaggcagaggttgcagtgaaccgagatcgcaccatggcactccagcctgggcagacagagtgagactccatctcagaaacaaaaaagaagttaagtaatgaagttggaatttttaatttagtatgttcttttttgttggcaattcagcgtgttccttttttgtccattcatcaaccacttgttgagtttctcctgcatattaacatttgccactgtgaataaaacgataaatgagaggtggtctttccctcagtgatggagtggtttggtgaggagacaggacacacagttccagtgtaaccagacaggtgaggaggatgagaagggtgtgcaaggtgcagaagaacaggagtgagaggtgtttcctctggggatggaagaagttaatcagggaaaagtgtacagggaaagttacatttgatctgagttttgaaggaggaaaagacacagaccatcactgagtggtaagaagaaggctagctttatcttgagaaggagtttgtaagaaacactgtagggtaaaatgcacgctgcttagtttcattagcaagtgcttattaaacagctactcctgaccttggatggtgtttggagtaaactaatatatataatacagaaatatgtagggatccccatgaacaagaacccaggctagatttaagaagccagagtagtgggggcaaagaatagtgtgactgaaagtaattaaacttaaaaatattttgtcatgggcaggaacaagggagatcattgtggcttgatggaagtgaggagacaggcttacgacctgcgggatggctctgctttgctagctagggctgggatttcaggtcagggaagagcaggggcatgaaggccggaaactgtggacgatgggggaagtgaggacagcagctggaggagcagagcattagtggctgtcacctgctgacccagcccccttttccctgcacctcctctcacctgcctccactcatgttgcagttgtctattggatagcacgtcactccagactcagttacttaaaaaagcggtaaccatttctctctcatgggttctggatcaggaacttgggagcatcctactgggcacttctggcttagcatctgtcatgaggccacagtcgaatggtgggtgggtgttgctgggcatgtggaaggctcttcgtcccatgtctggtgcctacactggacaaagcctcctgctgagcacctctgcctctctctttgtggccgatccacgtggcctcttccgcatccccggctccaaaggcatatgtccggggggagagaaatatgggaggaaggagcaccacctcttctacgtcaccctgaaagtcacacaacatctcctccattgtagtcagaagcccaccagattcaagaggaaagaacttagatcccacctctcaagagggaggtttcagtgtcacaattgaagaagagcgtgtggagtgagatctgttagtgtgggcgtctttgggaaatgccatctgccacagcctcagaggctggaagggctgcctgcatgctttctcagcctctgttgtgggatatcaatgagacataggagaagttggctggagccctgggaaaacttttccacataacaggagcagatgtggcagtctctgtctcatgcttaccctgttgaatgtggctgtcaggccagtagctgcggcagccatcccatgaccacagggagcagctgagggactcagggcagctgtctctgacacctgtgacagccactggagaatgacagcaactgcctacctcgaggctgtttgatggaaaagtaaaactgcttgtctgagacactgttacttgggtttctgttgcttatacctggatgtctttctcattgatctggtatgtgatattacataatatgggataggtgaggtggtaagatttttaaattattgctgtgtaaaagtagttaaaattttaatgggcagtgggaagccattgagatttctgtacagagagcagtccatgtgcttatgaagcacccagcacgcctgccacgtggccagcactgtcttacacacacagtaacatctctgtggctaagtaacttacagtttacttggaaagagaaaaacaggtgagtgataacacccaccacataggtatgattttatatgtgccaggtattatgctacagatgtggcatgaactattgcatttaaaccttaggagtattacatgaggaagacactcttatccccattgcttttataatgaggaaacagatatttagaaaagttgagtagcttgcctaagtttaaaggtaatccattttgtgtaatgcaatgcattaattgtaatgtaaatgtaatttgccctagaattgcagacatttcaaatcttcacttgacaattatttaacacatacattgaggctctaatttgtgctagacactatgctgagtgttgagaatatggagatgagcatgatagggctcctgcctttgaagagccaagtctagcgggtggctgacttctgcgtgaccacatttgggatggaacaagacatttattgagggtctaccacgtactaggactttttttttccttttatttccactgtgctcagagactcaagtactaggaatataatgttttaatgcactgagttaaattttataatggttatatattgtaatatgagaaaccattccaaaacacagtacttaaaacaactgtttatttagctcaggattccgtgggtcagcagttggcctgggctgagctaggcggttcttacactctcagctagactcagttatgtgtctggtcagctgcattcagcaaaacagttcttctctgagggctgataggctctcagctggaatgtcagaggcagctaggccacatgtctctctttgtccagtaggctagcctgggcttgctttcagtctgctgggaaaacacggttctgagacagaagagaagcccattaagttctctgaaggcctaggcttggaactggcacatcctctcttctgcagcattccgttggccaaagtcacaggatgagcccagattcaaaggataaagaaatagccctgacctcttgaaggaaggagctgcaaagtcacattgcaaggcgggaagaagatgaattgtgaccatttttgcaatctgcaaaattgtataccaaattttattataataatgtataccaagcatattaagacttaaaaggaaagaataattttagggtttctatcttgggagcatggtgatattatatataaaaattgagcagttaggatgggggagccagttttttttttttttttttttttggtgggggtgggggtgggagatggaatctcgctctgttgcccagactggagtgcagtggtgtgatctcagctcactgcaacctctcccccacctctccaggttcaagcgattctccagcctcccgagtagctggaattacaggcatgtgccactgtgcccggctgatttttgtatttttagtagagacagggtttcaccatcttggccaggctggtcttgatctcctgacctcaggtgatctgcctgcctccgcctcccaaagtgctgggattacaggcatgcgctaccgcgcctggccaggggagccagttttgaggggaagataaattcagtttggaaatgttgagtttgaggcgacagtaggttatccacatagaagtgaacttgtatttaattgaaaatttggacctggagaagtcagggctcaagagagagcattttggaatcatcttcccagggctggtgggtagattcatgagaatgatgccactttagagcaagaagggcagaaatctaagttttgtgtgggaagcagcctgtccttaggaggtccagagtgaacagagagaccagttaggaggctgctggagccgtctgggagagagtccaggctggcggcataggtgtgatgtgaaactggctggattcgggatgtattctgaaggtagagttgacaggacttaccagtgaatcacagttgaggtgtgagaagactcaaacttcctggtctaatgagttggatgatggagttgccatttactgaggtagttctcctcatatgaacctgtggccagagttgccccaaaagcagtggtagggaagttttctcaagggattgccccaactctcttgaggtagggccagtgaggattccagagaaagaagcactaaacgctagagtgctcagtccagagcagttattaggggacttatggacagagtgctgcagcagttcttgagactggactgatagtaaaaagaggttctacctgggcatgtccacaacgatggggcagagtgtaatgtttcatgacggtttaaagaatgtggctcagggagtgggagctagtttctacgtgtttagccttgtggttgatctttcagtgtttcaagcgataacctcaacaactgtatcagtgcttgggagtattcaagattgcggcttgggttcagacctacagggaaaaatatgcagctgccagagacagagggtccaggtactccatgcttctcgatcaggacaaagaaagaaagtgaggggagggggacctgggagaccctacagtgtttgggacaggcattccagagctctgctttgaacttgtgaagtttgagatccctgtttgacattgaaatggagatggtaagtgggcagtttgacaaagcagtctggagttagggaggagatacaggctgaagattaaaaaccggggcatcagactggatgaagtcacccagtggttgccctagtggatgattagggctgggataggctggtagcagcaggaatagagagtgagaatttcaagagttgtttaaaagaacaatgaaaaggacttggtggtagacttgatttaaggtctgaagggaaaggaggaactaaagatgctgcctaggtccgacaaagagtttgaaaataaaagtggacaagcttcctggtttcatttactttagggtcttgtccacagtttttattttaatattttatacattaaaactgtgatcagttgagatttcagtatactttgaggctctccacaaaggttcagcaagaactacggacagccccttgccggcatccaaactgtacagttccctttgctttggcaataacgtattatgctgaatcaatgtttctcagcccttaaatggcctttctgtgcttagcagccatgtcctcagtagctcagttggttctctctcacaacaactttcaagtaaaacaaaaggctagaagaaatgttcttgacctgggttttgtgtgtactgaagggcagggcaatgtggtaaaggttatttgcatagaaagttggggagattgtgtagacttgggggcttacacagatgactttctatttaataagagcccagatgcaatatgccaggcttcagataaaaagacaggaggccaggcatggtggctcacgcctgtatcccagcactttgggaggttgaggcgggtggattacctgaggtcaggagttcgagaccagcctggccaacacggtgaaaccctgcctctactaaaaatacaaaaattagccaggcatggtggaacacgcctgtagtcccagctactcagaaggctgaggcaagagaattactggaacccaggaggcagaggttgcagtgagccgagaccacgccactgcactccagcctgggcgacagagcaagactctgtctccaaaaaaaaaaaaaaaaaagaagaagaagaagaaagaggtttcaaacagccatctttgcctgaggctcttgtcctgacacggacagtggtggcatgctggttctgccaacttggaaggggagcccttccgagtcccatgatggcatatgtaagttagcaaggcttcctgaaggtgggtgggttgtaatttatttgtacatttggctctgattcttggtgattttgggagaaacgactgcaggcaagaagataggtgctttatggttgtttttttttttaacttaacactgagttttttctctcaaagtagtgtttctttgattctgacttcttctgtgcctccacaaagtaaatacagcaccataatatcatctgagcgtctgttcttgaattctcagtattttggattttagaaggtgtatgctacacataccatagagtatgaaagactccaaacagggctggggcatcaccctgtaatcaaacgtaatatttcagcaaagctcattaaatgggatgattaaaggcttaatagagccttatggcagttcaggacagattttatagccaaatgagtcagctcaagttttgtcatcaaatgaattagtgaaaaacaattggttttcagagatgtttagatttcagaattctggagaattcattatggacccatattccagtcatagggctctgcttttattttcttctcctttgcaggcttgatggtcattagaattgcggattgtgttttagagtgtggaggagaaatgactggctgtgtagggtggattttgcattatgaactatagaagtaaatggctacctagctaagaagaccaattcaggtgtatttattcttcagtaatgacaatagtttcatttatttttctaaaagctcaaattatgaatacatagcttctcttaatgaaacctcaggtaaatgaattttctcttaatcatttgtgtttacttggatttgggaccatcacatttaattgtgtgcaatgcagttgttattgtttttttgttattgttgttgttgttttttccaggtatgtctctcttactagacagtgagctcttttagggagggaacatgctgttttcattatctttgacatctggcataataaacattcatgttgacctgtttctagaaaaagcagccaggagtatggggaggaggtaggtgcattgctttggcttgaggtttggcatgatggtctcccagaggagtcattatgatcacttgtattaaactaactgtcatgagtaaaaccttaagaaacagatttctgggactgcatctgactgaccgactgctctgcgattgggaaaaactgatctgtgtctgtatctgtctattttgttttgggctttatccagggtccctgtgcctgctgacatcatcctttacctccttgagaagtagagggcaaggaatgggttttggtaccctgtgacgttaggaagactttttctcatcgttgtaattgcttcataattgagcgggaaaacaaaccttccaacattatagatatcttcctccaagtggataatgagctgtgtcctctttgcttttttgccatttgccatgctcctccaagcagcagcgagggtgagaaaactttggagtccagcagactggggattgaatccttggcttgcctatttgctagttcattttggtgaaattaccttcaatcactgagtcaggttctcacctttgaaaggatggtgattaatagataaggttgacctcacaggtgtgtagtaaggatgaaatgagataccttaaatcatgtgtctttaaatgaggtactttaaataactcaggggatgagccacttagtaagcctggagaaatggtaatttcctgtctcagctttggtaatctctttgtaagccatgagacttgtagatagttaactctggcatttatttgagaaatttagttgtcattacagcaagggttgacatattaattagagcaatgcccttttcacataactgagtcaaatatcataataaatgccattaatcttggaaagtcgaaaaggagatcctgagaggcgaattagtgctgtgccaaaaatggaatgagaactcaggttcaaggatcaaggtcgcagccaatttagccgtgggtcataagaagcatttgctggagcagtctgacaaattttgttgaacctggcaccagaatgcaacccctcttgccttagaccattctgctgtgcatcctcctcaaagtcccatggccattaagatgcggggcctggacttgaaattcagccttttgacttcagactggggtgcttctcactactgtatgcctccctgctctcacaaagctccacctgcccagtacacattcctagaggtgtcaaggggtgaggagagtaatagttggtaaatgttatgaaatcttacattcagtttctctgctgtaacatgggatgattatatctacttctatggtactgttgtgagaattataatgcaatgataaaagtaaaagtggcacacacaacaattagtgtcacccattttttagctaatactatcaaggtatggatttacatcattcgagttgaggtagttgcctattttcaaagttgtggataactataaggagatgaaccttataaagggaatagaaatgtgcccttaggattctagaatggacagaaaactagcccaccccaggtgagtccacagtgattgggagctggcattaaactggacttgaaagagcttgagggatgcaggagagcgagtcaggccattctcagtgtgaaggctgagcctggctaaaaacctgggccagcttctcggggcacatggtctgtggtcacttgccagctgggcataatgggaggtagtgtggtgactgcagaccaccaaagggaatttgtatttggtctttgcgattaaatgatgactttcagcagggctgattagatggacacacttgttaggctagggatgactgtcttccaggagttgaatgtggcttggataaggttttggaagaaaatgagagtaaagtagttggatttggcaggaagttaatagtacagactttataccaaagagtgtaacattatcccaagactgtggctagaggaggtgaatctatctgtgactgcccagtcaggttggtgggatgggggaaacattagtgaagctctgtgagctctttcttagcctttaattacagtaatattttgtttctttgcaatatagcatctcgaatattccaaatggaaatttctctagcatgtaaagccaattcttttattcatttttattaccataatgtagtatacgttatgacaaggtaatttaatttagaaaatttgactttgtgtaagaaccacatgcctgtttagctttttttttttttcttgagacagagtctcgctctgtgacccaggctggagtgcagtggcactatttcagctcactgcaagctccacctcctgggttcacgccattctcctgcctcagcctcccgagtagctgggactacaggcacccaccaccccacccggctaatttttttgtatttttagtagagacggggtttcactgtgttagccaggatgatcttgatctcctgacctcatgatccaccctcctcagcctcccaaagtgctaggattacaggcgtgagccaccatgcccagccagcatttatttttgtatctttttattagttggcagtggttgatcctttcctgaggccaagtatttgaatttgtttgacaggtgattagccagctgtctaaattgggtttgaggtgacattataaccccaactaggcatgaggagtgactccgtgttagtcagaggcctcagacctgaactcgcccttgctggtaacagctgaaagactctaggagcaagatattcagggacttgtgggacaaggagattgttggttcagaggatagtgtgaagggcttatctcataaatatctggattggctgtaacacaaagtgactgcaaaatcaaatgatctgcttggaaaacttcccagaggtagctttagaagttccaaagaaatgtcagattctatctcccaatcccaaagtcgggcttttaattaagttaagagttagtcgactaaggcaaatgacctgatgcttttatctggaaagaagttatcctcgcccacgtcagtgtgttgatgccgtgaatgtaggttcccgttactgagtataccattcagtaattaccaagaaaaatagaaagagtgcatggtcacctattggctttctccctccacactcaccgaaagtaccatcttgataaaaatatcaaaatatcaggagcttatgataacagtttattacaagtaaaacattcaaagactcatcttgctgactttcttttacatctggctactattatgtataatttctctgcagtcagggcatccagcgtggtgccctttagttaggttgtaccatagatgatagtccacagagaagcattttggtcccaataagcagcattttgtggcagaaagagctctggagtcagcagactctggctgcacatcctggctttcaggcgaataaatgcgtcacctttgtcaggctactctttgaacctcagattcttcggtgaagtggtgatactatctgtgtcaaggggttgtgaggattcaaccagtattatatgcagtatgtacatatgtacacatataattatatacatattatatataaaatataattatacatgtacaatatatacaaatatacatgttttatatacatataatttattacagtgtgtggtatgtaagtttcctgggttttttttttttaagttccttataacttttaccctctcttctccaaaatagtcttgccatcagatatgatgacatgcagctcagcttatgtcaggaaaagtctacaaatgtggaatatcttttttttttttttttttttgagaaaaagtctcactttgtcacccaggctggagcacagtagtgtgatcatagtgcactgcggccttgaactcctaagctcaagcaatcctcctgcatccgcctcctgaataactgggactacaagtgtgcaccaccacacccagataatttttaaattttttgtagagacagggtctcactttgttgctcaggctgatcttgaactcttggactcaagtgatcctcatacctcagcctcccaaagtgctatgattacaagtgtgagccactatgccttgccacatcatataatatcttgattttaaagactgcaattggctagctgagatactcaccctaaattttttttatttaaacctattcataactctcagatcagactcctattaattatatgttttattacaaatttcaggtaaggttggtttctgaattagaataataaatttgaaatttcagtactgaaaccttaataaaggggtcattactcaaaatttaacaagtaaagccatattaatttaaaataatttggaggacatccagtctttcatggtgacaaaatgaaatttatagagtactaatagatatatactgtagccctgtttcaaagaataaaacttgcataaggtgctaatagaggcaatgtaataaattttctttttactccttactatatatctattttttttacaaaataatgttataattgtaactgttatatgtaagaaagactctttaattccttgactgtaatttaatatagtcacagaattcagatcagattttccttaactagaaaggcagtataccatagtgtttaagtacagaggcataaaacagactgcctggattagaaatatgactttaccacttgctagctgaacaactttagctaagttactaaacctctctgttttctctatttgtaaaatggggacaataatagcttctatctcataaggtaattgtgagaactgaatgaattcatgcctgggaagttgttagaatgtctatctagtacacagtgttagctgtttctagaactttgaaaattgtcagagaattagtatattttctgtttatttctgtcaaagcgattgacagaaatgaacaggtgagaaaaattaggataaagtagtaaaaatgaaaaaacataaaaatagatgataaaattgggggggaaactgcataccatgcagttgagagagtgggtaagtgtgtgggcccacagtgctgctccccagtcctcagaaaagagaagctgtggcccagggaccacagcagcactgtaagtgtgatggctgtttttatagatctgtcaattaaagctctcaatacaagcttcttgtattaatgtcaaagtgcagatctaaacttgagacccctgctggtcaggaacatccaaactggtagaggccttaagtattagatgacgatctgtcagtcccgtatatctatcttaaaatttcatgacgttctgcaacacaacatgctgtaataaatgtcctaatttgaggaaattgggactgtacagtggctgattaatctaaaaaaaaggaagaaaaattgattataataggaaatcattttaaaataatgcataaacaccttatacgttttactttaacttaaagcataatttaagtagcagcctgatcagtaaatagttttttcttatgctgacttcatggataccatggtgtgttttccatcatccaaggcatgttctacttgctgtaaaacatgacactgccaatattttactaaaggttctcatgggatttcaggttgtctttttttgcatgtgcgtgcacacacacatacattgtggcttcttttttttcttaacttaaagctaattcacattatgcaattcagctgtgtcaagtttttgtgtacaatttaaatggttacaactgtttctgatgagcaagactctaaagccacctggaaatggaagctaagtagtgtgcactgcctcttaagattattatctctaattttttacatttcctctcttaattcaagtgaaacctttttagtgacttgccttcaatgagtctttgcaaatttaacttagttttcatagctaaattcatatttgtgaaagtaagtgtaactcagacttctccaacaagtgaattctaattgcaaataagacagtagaacagctaatcagttctactgtcttatttagtacatattaacatagttactgagagagaagtgtgctttaagagattcaagtatctaaaatggtttagccagagtaatctcatctttttctattttatttttattttagcagattgccaggctctaattcatatagcacaagaaagtaatttctatgcttaactagcaaataattaaccatgtaattttgtttctatagaagattggtaataaaattgaacttacatacattgtttaaagaaaaataatctgctcgtttttctttttttttttttttttttttttttgagacggagtctcactctgtcgcccaggctggagtgcagtggggtgatctcaacacactgcaagctccacctcccgggttcacaccattctcctgcctcagcttcctgagtagctgagactagaggcgcccatcacaacgcccggctaattttttgtagttttagtagagatggggtttcaccgtgttagccaggatggtcttgatctcctgacctcgtgatccacctgctttggcctcccaaagtgctgggattacaggcgtgagccaccgtgcccggcctaataatctgctcattttctaatggaaaaaaaaaaaaaaatgcctgcatcataggtatcctgcacaggtatagttatattattgtttaacaaatcacttgaaaaataaacttactgtttaaaaatataactttttgaagacatcaaagtaagttaaccttaaattatggccaattagtggcataattgaaatctcacaaaagaaggatatgacacagaccagagtggatcccagtgtgtccctgggttctgcagaagcactctgtggtgacagcagaggtggcacctcccaccacgggtagctgccatggtggacacagtgatttactgttgttagtctgtcgaggtttcatttctctctgattccttgtctgagttttgaaaatgactgtcccaactcaatgtgatgtggtgtactgatttatagtggaactacaaaccagaataaacaacagtttcataattttgccaggtatatgtttttgcttaaagtatcttgataggcaaaggatttaattttatcacaaaatttataaaaggcaccaggtatggtggctcatgcctgtaatcccagcactttgggaggctgaggcagatggattgcttaagctcaggagtttgagaccaccctgggaaacatgggtgaaaccccttctctacaaaaaatacaaaaattagccaggcatggtggtatgcaccttatgttcccagctacttgggaggctgaagtggtaggactgcttgagcctgggaggtggatgttgcagtgagccgagattgcatcactgcactccacatcctgggtgacagagtaagactttctctctctctctcaaaacaaacaaacaaacaagaattcataaaaggcaacttttccctgagacaaaagtgagacagcatactttttttttaatcatatacgtttaaaatttgtattttgatgtggagatcaatagaagtggatttcaggattttgtacaatttttttctaaggttttaattaatttattgcaaaatgctgtgaaagggcatatgaatcatgtggtgtgcctttttcctttgagctggcaaagagggcttttgacacagctcctgtgttctcattgtggacttggcccagtcattcctcccagacatcatttgcagagagaccctttggtttgaggttagaatatctattgtaaagtaaagcctggttaatcaaatttatgtcatatgagccagcagttatgctaggtagttttatttgatggcgggtggatcacctgaggtcaggagttcaagaccagcctggctaacatggtgaaaccctatctctactaaaaatataaaagttagccgggtgtgggttcaagtgattctcctgccaggaggcggaggttgcagtgagctgagattgcaccactgcactccagcctggacgacagagtgagactccgtctcaaaaaaaaaaaaaaaatttaaattacgtaagtcatttatgtgcacagtgagaaagtcaaaggataaaaaagtatataaaatgatataacttctctagtatccaaagaatcaaccattaacagtttggtattctctatgaactattttgcacatataaaaatgggcagaaaacacaattatgtacataaatgtatccagctttttaaaaaaatgaaactgaatcatagtatatctggtctgtagcttgcttttttacctctacctaattgtatgcgaactactttctttgcagatcttaaaaaaaaaaaagaaaaagagtgttattcagatgaatggatatatcattatttaattattcagccatatattgatagatatttacaacgttttgtttttagtgatttgttagcatcttcgaattaaaaaagaaaaactggattccaatttgtaactagaagtattttcagaggccatttatagagcgtggtccatacaagagtctcctagataaggaagttattactttgctcaacagataggacaagcaaatcacaacaggaaaaggagtgaacaatgctaagatcgaacgaagcctgtgtaccaaataattgaagagtcatatgacgtgaaggagaaaagcactcttcagtggtgtcatggaaattgaagtctcaagaacaaagaattttactcaatgaacatatttgcttattttgcatgggccctatgtttgttttaaaataggaataaaggccaggcacagtggctcacgcctgtaatcccaacactttgggccgccaaggtgggagcatagcttgaggccagcctggacagcatagtaagactctgtctctataaaaagtaaaaaaattagatgtgggggtctgaacctgtagtctggaaggctgaggcgggagaattgcttgagcccaagggtttgaggctgcactgagctatgattgccactgcacttcagcctgggcaacagagtgagactccaactctaaaaaataataataataagatgaaaatgaagaaataaaatgaaaacatttgaaataatagtcgaatgacacaactttaatgtcataaggatttctttcttatacagtgtagtgtttggggggcaggtaagggatgggtgttatttatttccttttgtaaaatttcaaataaaagccataaggaaatactttatgaagtggagtagcatgtgtgtatcttgaaaaactgaataaccagccattgtatatagcaaagtcattagctgttcttgtcttttgttttaataattgtatgtgtagagtgcatcgtgtcacccagggcaaaggcagggagccatgacttaggccagttcattgttaaccatggtttattgtcaactgtagtgtatgagggtgctcttagtgaattcaaacctacaaaggcaaagttggtgactaatttttaaagtatttttctcttagcagtgacatttttcactaagacaaaatttaaaatagactgggcagtctgagtggcaggggctttcaaatgacgtttcatacctagtgtcataaacatggaatccctcaattaaggagaatgaattgtgaatagggacgggctactttggtacatgccacctgtttgcttactgctgtatttgaagacagaagttttatcatgtctttgctagcatcagatatggctgttatatcttacaataactttgtgttgttattgtcattcattttacttatggagagccacctaatgttacctctagtggctaagcatgctttcctctgagatgtaaggaagccacaccagagctggtcttttctgctttgctcacttcttttttcttagtgcctggaatgtggcaggcacttagtaaataatgttaaatgttatgaagtatattagtccattttcacgctgttaaatgaatgaaatgtattagttcattttcatgctgctgaaaacgaaagacataccctagactgggcagtttacaaaagaaaggtttaatggacttaccattccacatggctagggaggcctcacaatcacagcagaaggcaaggaggagcaagtcatgtcttacatggatggcagcaagcaaagagagagagcttgtgcaggggaactaatctttttaaaaccatcagatctcatgagacttattcactatcacgacaacagcatgggaaagaagtgcccccatgattctgcccccatgattctgttacctcccactaggtccctcccacaacacgtgggaattcaagatgagatttgggtggagacacagccaaaccacatcatgaagtaacagaatatttgcctacctgtagcttatgcaaataggaatttgaatcacataataggaagcccagaggcaggtggctgctaccatttgtcataagctcaaggcagcatctctgattctcccggcttttttctcataatcacaagatgactgccatagctcgaccatagtgttaaaggcaggagaaagcaggatagggtggtgtcagcagatatctgctcacatctcaggggccagcctcaggtcacacagctgatgctgactacaaggggtggaaatcagcagaggcagacgaaggggattttgaggggactatggcggctgagtggtgaagcattttgggattgaatgctgggtacaccgccaccttcctacactgccactgtacctattgtttaaatttgtatttctttttttttttttttttttttttttgagatggagtctcgctccattgccaggctggagtgcagtggcgtgatctcggcttgctgcaacctccaccttctgggttcaagcgattctcctgcctcagcctcctgaatagctaggattacaggcactccagcctgggtgacagagtgagactctgtctgtatttaaaaaaaaaaaaaaaatcaacaacaagtgagttacttccaagatacagtgggggtacatttattgggtaaatgctcttgatccaaatgggaaaaattggccaaaacaaaggggctacaggccccatgcaagactgaaacccagcagaacagccattaaatcttaaagctccaaaataatctcctttgactccatgtctcatatccagggcatgctgatgcaagaggtgggctcccaaggctttgggcaggtctgcccctgtggctctgtagggtacagcccccatggctgctttcatggactggtgttgagtgtctgtggctttttcaggtacatggtacaagctgtcggtggacctaccattctggggtctagaggatggtggccctcttctcacagcttcaccaggcagtgccccagtggggactctgtgtgggctccaaccccacatttcccctcacattgccttagtaaaggttctccataagggctccactcctgcagcagacttctccctggacatccaggcatttccatacatcctctgaaatctaggcagaggtttccagacctcaactattgccttctgtgcacccataggcccaacatcatatagaagctactgaggctttgggcttgttccctctgaagcaacagcctgagctgtaccttggccccttttagctacaactggagctagagcggctgggacacagggtgccatgtcgtaaggctgcacagagcagcagggaccctgggcccagcccactaattcattttttcttcctaggcctccagagctgtgataggacgggctgcagggaaaatatctgaaatgacctggagacattttccccatcgtcttggcgattaacattcagctcctctttacttatgcaaatttctatagctggcagcttgaatttctccccagaaaatgggtttttcctttctaccacatggccagactgcaatttttccaaacttttatgctctgcttcccttttaaacataagttccattttcagaccatctttttatgaacacatatgacttcatgctgttaggagcagccaggctacatcttgactgctttgctgcttagaaatttcttctggcagataccctaatcatctctctcaagttcaaagttccacagttccctagagcagaggcacaatgcctccagtctctttgctaaagcatagcaagagttacctttgctccatttcccagtaagttcttcatctccatctgagacaacctcagcctggattttattgtcggtatcactatcagcattttggttaaaactgttgagcaagtctctaggaagttccaaactttcccacaatcctcctgtcttctgagccctccaaactgttctaacctttgcctattacccagtttcgaagtcgcttccacattttcaggtatcttcatagcaatgccccactcctggtaccgattttctgtattacttccattgttatactgctataaagaactacctgcatggctgggcgcggtggctcacacctgtaatcccagcactttggaaggctgaggcgggcagatcacgaagtcaggagatcgagaccatcctggctaacatggtgaaaccctgtctctactaaaaatacaaaaaaaaaattagccggacgtggtggcgggcgcctgtagtcccagctgcttgggaggctgaggcaggagaatggcgtgaacccgggaggcggagcttgcagtgaacccagattgtgctactgcactccagcctgggcaactgagcaaggctctgtctcaaaaaaaaaaaaaaaaaaaaaaaaaaaaggaactacctgaggcagggtaatttatgaagaaaagagatttaattgcctcacaattccacaggcttaataggaaggatgactgggaggcctcaggatacttgaaatcatgcagttggaaggcaaaggggaaggaaggttcttcacatggtggtagaagagagagacccaagcaggaagtgccacacacttttaaatcatcagatctcgtgagaactcactgtcatgggaacagcaagagggaaatccgcccccatgatccagtcacctcccaccaggtccctcctccaatttgacatgagatttgggcggggacacaaatccaaatcatatcaggggattacatttcatcatgagttttggaggggacaaatattcaaaccataccatcccatgtttccctgggttgatctgtaaaatttcagcagtgattccagtggctcactccttggaacagtcactgtcagtagaagtatggaagacctggccgggcacggtggctcatgcctgtaatcccagcactttgggaggctgaggcaggcggatcacctaaggtcgggagtttgagaccagcctgaccagcatggagaaaccccatctctactaaaaatacaaaaattagctgggcatggtggtacttgcctgtaatcccagctactcaggaggctgaggcaggagaatcgcttgaacctgggaggcggaggttgtggtgagctgagagcgtgccatttcactccagcctgggcaacaagagcaaaactctgtctaaaaaaaaaaaaaaaaggaagacctgattggctggcctgagtcatagtcctccatgtagctggctggccctgaggtaaagtgatgggcggggggggggtcatggcagaagcacctgggatggactaggggtcactgtttctgttgtggaagccaagagtgggaacatgtggaaacaacgagtgtctaccacagacctaaatttatgcagttctagttgagcctgtttttctttgatttttttttttccgttgcctcaaagtttagaagtctgtcatttttcaaagatgtactacaattctgttttatgctggattttgctatggtttggtatttttatacgttgcacagtcctcctagagttaatatgaaatacgatgtcgagtgagttagtgtaatgctaagggccatgagctcttgacccagattgcctggctccaccatttaacagctgtgattatgaaattttcctgtgcctcagttttctcagtgctaaaagtagggaaaatagttcctgctattttgaataatcttcgtagttcaatgagaaaatatatgcaataatgttagtagagaaccaagcagagtgtttgtacctagtaaatattagctgccattattattattgttgttctttgtatttcctctccccaacctctattctctcatgtcgagggcagaacccaggttggctcttcttttttgtcctgctctctttgtcagcttgtcacttgcattctctcggctagtatcacccttgcgtaaaagcaattcagtcaggcaatgaagaaatatttacacagagcttaaaccgtgcgtgttttctttgaggcagtggtccattttatcaaatcaaataagtaacataatcaacttttggtttccttacctcaggtgcagtactttaagaaggtagtgtggaggaaataatatatatacaaggaattaattagtatgaagttgatcctcagaaaatataccaaatggacagaatttaatgtagcattctctaatttttatgtaattacatatatgaaagcatataaataatatatatttttaaagtgtaaaatgcataaaaagaaggtaaaactccatcataaccccacttcctagaaataaccagtgtttacagattgatgtctcttaggctgctttctatacagatacatacacattgtaatataacttaagatatttcatttaaatagtcacaaggaggaaaggtttaacttccctaaagaaatgtatgtactttccccccaagttctggcactcggaatcccgagaaatcggtggaggctattctgtgtaatctgatgagagtgcagctggaagaggcgggctgcgtggttttacatgacattaactagggatgtggggaagtggatcatgatgagattgaatagctgatgcagttatggaaggtgagaaggtttgctcagcaggagagagattttcaatagtaaggtgaattttaggcagaaacagacaaccaggtagtgagcaaccagagggaatccatgggaaatggccctggaagaccaccaccagcaagtgtctgtccatctgacagcagtttatggaaactcccttgagtgaggggcaagggtcagtcctggccagggtcacaggtacctgctggaatctgggatggaagcatgtggtcacttgtgctgttactctgacttgtctagttctcccctatccaggcacaggataccatcacacttctcctttcctgtcaggttagatgtttttagctaattggccttgtccaatagagtatgcgtggagaccttgtaaatctctgcctgagtgtccattctccctcttcctggtactgcagaagaggtactagagcaagtctgtccaacctgtgggcctcatgcagcccaacacaaattcgtaaactttcttaaaacattgagttttttttgcaattttttttttttaggtcatcagctattgttaggtgttttgtttgtttgtttgtttgttttttgtcatcagctattgtttttgatgtgtggcccaagacaattcttcttccagtgtggcccagggaaaccaaaagattggacacccctgtactaaaggctctcccactcatgtgcctgagtgaagatagtgtagaacagagcctcagccggcccacgtggccgtgaagcatgattaaaaaataagccttggctattttaagccagtgagatctggggcattgtttgtcattgcagcaaaacatagcctcttcgtgattgatagtggtgtcatcctttagcctcaaccctgcaaaaccaatttacctgttcctggggctggtatgagttacaggtgagctgggccaaggtgaaattctgatgtagcttctgtagattggcaatcttaagctcctacctaattgaaaatagtaggtttattttggtatataaaatatattaatggcctcctattttttcatatattatggaaatttgaaagtaaaaaggctgaaaacaggatagatacagatgttttgtaaggcagtgaggacagcaccataaaacaataggtctgtgctgggcctttctcccatagacactagcagtgcagggctgatgcctcaggtacctggtgcccccagcataccagccataggccttttgcctctttcagcgggtactgtggctgatacttttggaacccacagtcattagtctatctgtgtactataaatcccctagtacatacaaggtgtgggaagagatttagcagttctccaaaccaagctaccaaccagagcaagcaggctcctgttggctagttcacaatgtcccccctttccccctcctcctcacccacccactgtgatctctggagtaagctccagccctcacccagttcactacccttaaggagtgagccctatgaggaaggagcatgggcacttactctgtccactggggttttgaaggcctccacctcacgatgaagtcagaggatgcttctgtttagcactggcctgcattgctgcaaatgccagcctttcccttcttactaatttttaaaaaagactttctgaggtggaggaggtggtcataggagacagcagcttagtataattagttaaggtggaaaggcaatttgtacaaaattcaattgttcttctgtaagaaccaccactatagattcaataaaactgttttccattaatagaattttcttatctttaaatgccttgacaaaattacaaaaccaatgtgacctctcagtgtactggtatttgctttgttttggtaaaatgactttgccactccctaagtgacaagccagtgtattagtctgaggtgcgggttatttttctcttagagttgtcagacattttctgagggagaaagagcctggatttgtgtgtgtatgtgtgtgaacgttgtgtggatacaggtgtatgcaactgccagtaacttccttttacagggattgatgttttcacttataaaatagatgcttttctctgcctcagttttgcagctatatagattaaatcctaatgtagtgaggagtctgaagattggtagtttattttaggacttttgaagtaatagaaaaaagggcagaggcaagaattgttgtttctaggcagtgaatgaccttatgggcttatcttgctaacccttggcagttttcatctcacttgtttttacagatgctgaacagctaatccagtgacctgaggaaggaagcacttgccattcatcctcagctgagttctgtttcagcattttacatgatgttacagccaatgatttggacttttagttctcctttagttcattgccttgaaaacttcaatgtgtatgtgaaatacctgttcacatgcaggtcctgattcactggaactggagtagagcctgaagttctgcattttaacaagctcgcaggtgctgctgctagtccaaggaccacacttgagttagaatcagtgaagtgtacttactggtggtggtaaatgctggcctcagaccatactgcctgagagcatatttcaagtccagctgctgggagatcaggcacttcatatatgtgtacctttacgtaaaaaataatcatacataacgcttattgaatctttctgtgtgccagacagtttttgttttatttctcacaacctctctatttgtgggtgagacttgctcaaagtcccaagttagtagttccgcagccagaattcatacacatttgtctgacatcagaccccatccttggaactcttacactgtactcaaagttctttagcattcatgtggattttgacgaaagaacactctaaaagagcttgagaactttacttctctctgcctccaacttcccagtcacccatgacactcaggtaattctaacttagctgttgagatcccagtgttcaggcaagagaaggtgctagctaccattgtaggctgttgtctaattgtctgttttgcctcagaattgcataacacaaatcacatttaaccagataaagtgtttactaataaacttggaattaactgtgtgatcagtttattgagatttaccattttgataaagtttaccaaattgaaaaaacattttctgtaaattgtttaaaaatttactgaagtgcattattgtaaaggtatttttatacattggcatgatttataggcttttcttgaataagtacctgtcggttaaaaaaagttgaacaggcaccccaataaatgccatatttatatgttatatactactgtgccaataaaagtatatacattacagtcaacccaaaagaaattgtgaaagcatgagatgtcagtgaagtacagtatttttaatgtcttgtcaatcagatggattcattctattatacagtaacatctcaaggtgtagtgtgtgtgtgtagatccgtatctaaaatggtcatcttggtcatttctttcttgataattttatttttttggccaatgtcttgtcagatctgatcagatcatctttgcatttactccatatatggctggtgaagaatccattctgggagtagaaaaaatgtcacctctgccattttcttgtttttgcttatgcttaatttgttttattttcactctttggttttttggcagtgatgttttaaaactacttgttcatttcctgcagttagttgagctagattcacaactcagacgcacacctacctgggtggatgtgtgcaacagagctcagtaagctagccgaggtgtgtgttatagatggtgcctggcccctgtgtacctgcctgaggtagggaaaccaaacattatacagtacaatgtactgtataatgtgaaagaatgatatttcagttcttagcagagaaccgttgatacaggtgttctaggctatgtactcaagtaagtaagcagaaaatagcttttctggattaagaagataaaacctgcaggtatttccaggttggccgccttttatgtttgtttgggttttttgttgttgttgttgttgttgttgttgttgttgttttgttgttttgagacaggttctcttgtacctgggctgtagtgaagtggcatgatcacggctcactgcagcctggacatcatgagctcaagtcatcctcccacctcagcctcccaagtagctgggattacaggcacgcaccaccatgcccaactaattttggtattttttgtagagacggggtttcaccgtgttgcccaggctggtctcgaactcctgggctcaagcgagctgtcagcctcggcctcccaaagtggtagaattacaggcatgagccaccgcacctggccagccctcttttatgaagctgtttttccctggcaactaacaagaactgtataaaacatagtgcatatgtgtgcacgcagtttgcttttatctgtggaacatattgtgtgtcagaagtgtgaagtgacccacaactcaagaagtaaaatgtgaatgttagacaatagttagtgatgaaaaatggagttgtgccgagcctctttcatctggaagcactgcagaaaacccgtgcagagtcaagctgtgggcccagggtgtggtcaagccgttctaagcatgtggcaggtagagtcagctctggacatgaaggagctcatctccgtctgtagtgcatctgagcactggctctgcattcatttcctctcaggtgctagtgttgtgactagctctgtacttttggaattgctctctagtagatggatacaacacctcctcactttttttttttcattttaaaaaatatataggacttctttataattttgagtgatcattggtttttgtaagagtgtttccatctgtatctcaatatggttgaaaattaaacagtcaaaaccagtgtggtattctagactgatgttttggattctgaatgttggcactagctctacaaataagtgctggaaaggtcttagacaaaacttcggtgtatatttttctgtatgcaaaatgcctcctgatttatgagaaagttgtgaaggtttccatggatattatgaggacaagttaaataaaattcttttgagctgctttgagcttctcagaagtctaaaagaaaaccaaaaaacaaaacattgcctaaacctagctcttcctttactcaccatagggagcttttcctgtcctggcatcccatgcccccacaccctactcccaccccttccccacccctcagttacccttcagctttgtcatattcccagtgtggcaacactggactgcaactttcagtatctccagtgcctggcacaaggttaatgctcagctgttatctgaattagagtttagagaggatgtggatggagtcacagattggtttttcttttaattcaattgggagatagtgttgactgtcattactgttacaaaattatttgtatgaattgagggaagtgcagactgtctgagaaaacaaatgaagactggtgttctgaatagagaatcatactcaaaattaactggactttctcacttcccaattaaagggggtaagatgccagcattttagacattattgttggaatatctttgataactcaaaaacattgtacattttgttgtagatcagttttttaaagacatgtttatttggaagataatgccatattaaaggtctgaactaagctgttagctttcaagccttaagtttagaaagtatacagtgtacattttgaaatggcagttgattttgtaaaaggtcttcaggttatttttgtagctatatccaaaaataaatgatgactattggagttattagaaagcaaattatctctgtgccagaatgctggctttgggagtttttttttttttttttttgacaacttatgttgggagaataacaaccgataacagcacacaataaacatctcaatgatttgttttgtgtttacttaaaacaagtttatatatttatagtcttgttctcaagtggctgacatgaacagtaaaagtgatactggaaaacttgtgggaatgaatatccatcaattgccggaacgctgatggttaactggaaatttaagtcattaaaaatcttcccagtggtttgctgtgcactacttgagctagaccagctttctgcagcccacctcatccactgagctcccgagctctgcttgaaagcaggtgaggaccctagctcattccctacttggtcttccattctactgttccccttcccaagctgcagtctgtcctaccaggataagttccttgtggtggccctttttctacagtgagtgtctccagggacactttttctttttgagacggagtttcgctcttgttgcccaggctggagtgcaatggcgtgatcttggctcaccacaacctccgcctctcgggttcaagcgattctcctgccttagcgtcccgagtagctgggattacaggcatgcgcccctatgcccggctaatttttgtatttttagtagagacggggtttctccatgttggtcaggctggtcttgaactcctgacctcaggtgatccgcccgcctcggcctcccaaaaagtagaaggagctgtttccgcccggttttgaaccggggacatttcgcgtgttaggcaaacttgataattactacgctatggaaaccctgggacatttctaattagccctgcttaactagtattttaatttgggcgtctcattgctcaggtatgttccttttgccttagtcacctagatatcttgtagtcagtcagctagttcaggtttctagctaaaacaacaacaactcttctcattagaattcacttgtgtgcgtgtgtggcgtctttacatgtaaacttaggaactgcatctaggtttgagtggttggtgccactaccatgtggctatgggatgttggacaaaacacctaacctccctaagtctcagtttcctattttggaagataagaatggcaacatttgcatcatatggtagttgggagaatcaaaagctcttacccaccacactctcctaatgtctgatgtggaaatgtcagtctccactcatgctccggctctcttcagtttgctggaacctttcttatggtgagttcattgtacttttaggatattggatgtccttgaagaccagaatgtctactgcaatacagatcagctttcatttagatttttcttcctagcagcatctcctgtggtgttaaaagatcctgacttctgcagaaagatggtagaaagttccatagccctttcataagtattgagtgatagtttctaaccatacctgcttcttaggtttgaagtgttccatggagatgcttggaagatgttaggccagggatctctttggtgtatgttacattttttctgtaacatataaaataaaacccttaagaataatgtattgaggatatgtacatgtataattaaggtataaaaatgcctgtgaattggccaggtgcggtggctcaggcctgtaatcccagcactttgggaggccaaggcgggtggatcacaaggtcacgagtttgagaccagcctgaccaacatggtgaaaccccgtctctactaaaaattcaaaaattagccaggcgtggtggtgcacgcctgtaatcccagctactcaggaggctgaggcaggagaattgcttgaatccaggaggtggaggttgcagcaagccgagattgcaccactgcactccagcctgagcgacagaggagactctgtctcaaaaaaaaaaaaaaaaaaaatgcctgtgaattaaaaacatgaaatatccataaggtcatttttttcctcagacaagaaaagattgaggtctgagaggaatacagagggctctggatagtactggtgatattttaagccgaatgagaacatttcatagtaaatttttctttaaactgttatatatgtcataaatattgcctaagatttttaagttaaaaaaaaagtctatggagagagtttaaccttctttcagcttcacttacctgaaacaaggtaatagtcatggcagtacctccttctaagatgtttgtggagctaaaataagctatgtaaaataatgtatgtaaaaatgacttaaacttattgttgctgaaatacattgtttaaattcactgtctaacaagatagttttttcagacgtatgagaagatggaagtaaaatatggtcattgtgggaaaatcagaaaataaggaaaagtttaaaaatcatttataacacacctgttggggtgatcagacccaacaccaggtcgtgggggtgacgaagtccagcggagtcaaaggaattagaaaagacagtttgagagagaaagtgggtccagggggccatcgctagtgtgtagaggctgcgaaggccccgagctctgggagcccagactatttattggtgatcaaacaggtgttgagaatgtgggggtcaaaagggcaccgttgcattaagcacatgatttacagctgtgacggtttagcatatgctctgctacttgagataatggagagcaggttcttttaactcaagatacaatcgatcctgggagagcaaggagcaaggagcaaggagccagcaagtctagacacattccagagccacgagccctggattctatccaagccacaaggggtttttatgccctgggctgagattatggtgcgtcagggtagccttccaccctttagcacagagcttggcgttccaaaggccacaaggagttttagaccctggatcccggacatgttccaagaatcttttacattatgtcagacgtacaagccttgcctcggcgtctcccaacacacaccaccaggaacgtcttagtttatttctctttagtgtgattttattttctttcctcagaaccagaactaattgatacagttgttttctaggacatttttgcattgtagaagtatgacagcaagaacacatgcttaaaaagcaaagaatgaagtggctcctctgagtgttccaccaggtgctccttgggcaggcgtctctcccctctttgtgtcctccctgaatgcacctgtttggtgcttcctgaatactcattggctgagtgattgacggccacaggtgacagcttggttaacaggtgctctgaacaagagagagaagacagagcctcttggaccctgacctaaccttgaacttgctttgtgaccttaggaaagcttattcacctcattagcctacctttcctcatctgtgagccagagcactaaacatttatgtttagagctaaacagatgtctgttttagctctaaattaactattaatactaataactactagatacaccaagggtatttagttgagagtgagtgaaaagaagtgatgaggaaaaatgtgaatttcacaagttttcaaagtgatttgcaacctcaatgaatagtgcatgtgattgaacatactttccagtagaatttttactcaggagtttgcagctatgatgagtggaaaagaatagaagttagagtcatagggggtactattccacaggattttgaggcagatgaatgcctgaatatggtcaaaagatgaaagtattaactgttgggtttcctccagaccgtaattataatgtagctcttcagcattgttttatcttgctttaatggaagaatcttgctgccacttaatagatgagaagcatggaatggtagtttcgcattcatatcagatttggtgtggagttcactttttcctaattcaggcctggctaataatataaactctatccaataagaagatatattattttctgacaaaaaagtttggaaaatacaggaaggaatgtgtaactgtgtttcctggtacatgtcctaaggaagctgggactagaaggtcaccccccagcacatgcaggttcagaactggttagaggcacggcggtccccagattccagggctttgaccacagatctgttttctgagttcctgtattatctctaggccatttcattcacagattcttgccaaccaactgagattaactgaattgtgtttgaatgagaactggatttgtgaacattcaaatgacagaaataaatttggctatctgaaagtaaaatctaaagttttcttcacatgtagttagtgtttcagagggcttaagagaaactcagtaatagtaaagactacccaactaaaaatgggcaaagaatctgaatagacatttctcaaaaaacacacaaatggccaccaagcacatgagaagatgctccgcatcattaaccatcagggaaacacaaatcaaactgctgcacactcaccagggtggctgtcattttttagaagacaggcaatagcaagtattagaatttggagaaactgggaacctcagccattgctagtggggatgtaagttggtgcatcattttggaaaccagtcctgtagttcctcaaaaagttgaacatagaattatcatttgacccagcaactccactcctaggtatagacccaagaaaaatgaaacatgtttatacaaaaaaaaaacttgcacacaaaagttcatagcagtattcataatagctaaaagttgatgaacagatcaacaaaatgtggtctctcaatacaatggaatgttactgggctatatttaaaaggtaaacactgatacatggtacaacatggataaaccctgaaaacatgctaagagaaggaagccggtcacaaaagagaacatatcgtatgattccttttatatgaaatgtccagagtaggcaaatctgtaacaacagagaattggttgcttagggctggagggaaatattgtggggttggttggtggtagctaaaaagtacagggctttgagggttgaggtagatgttctaaaacatattgtaaaggttgtacaactctgtgaatatactaataaccattgcattgtacactgacaatgggtgaattacatatgtgaattttgtcccaataaagctgttatccaaccccttatcatttgaatcagttttaacatcttactcttgagagagagagagggaacagataacggttaatcatctttcaagaatagtttaatagaacaaaagctacaaagttctcagtctggtgtggaacatttgtgtgacggagcgcagtgtaccgtatgggccgggactgtgcagaaggtgctgcacgcagagcaagcgggagtgcttggaacttcagggaaggctttactcaccaggcggcaaggggcagaagggtgttcctggccaagggtggcacgaagcatgtggtgatgttgctttttaagttacagagttgggtaaggggtgcaagtggtgggagacaggtctggaaagggagattacctttcaaaacatttatcttttattaaagaggaaactgtatatgtaaatactgtgctgaagcagtctttatcttctggagttttgagtttgtgaattaataacacagagctctcatttgctgaatgtttgcggtgtgcctggccccggtctgaggtcctttcttaagatactcctcacaactccgtgaggggtgtgctaccatggcttgcgtcaagcagacgaggaaaggggcagcaagagggtcctggtggccacagctgtgcagctggtgagtgaatgacgaggcccggagtcagagccaggcagccagactccagagcccgccttcctcaccactgacctcccggtgacatctctgggggcagcagtctgcagaaccattgttctagttgaatttcttccagcctccttttcagggtgcttttggttcgttaaaatgaccacatgtgtctacaattaaattggcaatcactttgtttttcttgcacaattgtagttgttgctggttcacttaataaattgcagaataagaagaacagagtggtgataatcacagggatttcttccttgagctgtgtgtatttagtgttcattcaaattacatttgttttaggttgagagaaatccttctgaatagtgatgacattggttgttccctgagatggcttcttgtgtaaatctatcaacaccctttggagggctcctgactcagaagatgaacgtccttgggatgggcaaagtgatgcttgttttgccttccctaaaagtagttctaggtgtaagaagtgatgtgactgacttagggccttagattatggcccaaatgtaggctttctgcagttctgccctatgtttttttgtgtagattttcctgcctttaataacttcactgataatagtaacactctaaaatgagagaacatgtcttatattggagagggtaataggttggtatctttttgaaccatcaaaggcctaggtcaaaactaaccctttcctctgacttcttagtcaaagaacatacactttagctaataccccaagacagaagttctttggtgctgagagtcaacgagagtcacattctccttgaaaagggaagggaagctctatacctggataactgcgcagatccatggccccatagcacaaaattcgggcaactgagaacccagctggcccccagctggtaattcctcaacattctggtgtgtcctaacattgccaaataggctggaaggatttagagaacaggaagtaagctactgggagataaggctgcagctgtgaattatagacaggggaggaaatgagaataacagcattagcagtttggctttatttttaaaccaaaaatcactggaaagatttctgtctctaatttaagggtgttactcaccttttcgtttatactagttggaactcttagcaaagtatgtaaatgggactatgtttccatgtactgctgcatctcaactgattaagaatcttttttttttttagaggtggagtcttgctctgtcgcccaggctggagtgcagtggcatgatctcggctcactgcaagctccgcctcccgggttgatgccattctcctgcctcagcctcccgagtagctgggactacaggtgcccgccaccacgcccagctagtttttgtatttttagtagagacggggtttcaccgtgttagccaggatgatctcaatctcctgacctcgtcatctgccctcctctgcctcccaaagtgctgggattacaggcgtgagccaccgcacctggccactgattaagaatttctaaaagatgaaattgagtctgtgaacatttcgtttatccaacaatggcaactgtgttgtcataagaccaaaaaatcttcaatttcacattagaaatcatttaaaaatatgttttgcctccactcttttgtgtttgtgtcatgctgtgactgtgcagcctttttcatggagaggtttgtttttgatggatattaaaggcaaaaatgtaaatgtggctagcctctctcctctggagtatgacatcttgtcatcaagtattattttacagagagagtcatagtggatgagtattcattggtattacatttaaataaggaaataatttaaaaactgatcagtcatgaacatcgtgttcttaatttgtcatgttctattccacagtggccattctgaagtacatgagtgactatgggcttaaataactaatgtgttagggaccaaattgtagccacatgcacatttgtggattctagtgcttgggtcaaatcattggcagatctgaaagatgtctgtgaagtgggcttttatttaccatttggaaatcctaaattttatgacatgttcaatgtcatttaaggacttttgttgatgttggtctaacttaaaaaaaaatcagtaattctaatacaggattttttaaactaagctaaaaaaatgaatctgggtttgttgccctgctccccacatgagttgagccccctcctttgtctgtgtacaaaggactgtattaatgtctgtttaggaaactgaactccagggagacaagatgtcctaatcgcggtccttggcacctaacaatgtctggtttatcataggcaggcaggcagtatatgctgttgttcaaatgcctttgggaattgaaagtaaactacttgagggagctgcggtggctccagccggttgtcctggcgtacaaggaggcgaggctatgcggtcgaggccaacttaggtaaaagtgaaaaaaaaaaaaaaaaaaagtaaactacttgaaatagtttccaataccttctatatagttcaaagatataagttaacaaggattacaacttctaatgatatattattgtttgcacaatatattcataattgctgtgtgtcagtattcaaaggtgaacatgcctctgtccttttcctcaagcagcacagacctgtggggggtgggtggtgttcacaagctgatagttctgtaagcactgcatccacagagctatgactagagcaaggaagagggtctcaacagagaggattccgctagatggggccacctgggagttctcagtgtccacatccatgcaaggtgagccatcaactggattcagtttttctagtgatcaccaggtctcaaaagattgcaacctcacagctgcctctgatttttgcagttttaaaaaagagctatgatattcttcacactttaagtgggtaataatttctcttgaaaaatttgattttattatacattttacaacaagtgcagataacaccaagtgtggccaaccaaggctgctcaaggcacactaaatcaggtgattcctgggggttcctcctagccctctggtgccctagacacaagtttaaagacctaaaatcaggtgtgtccatggcatcgctttgagaagtcccggggtttatgtgttggtctgaaagcagaaattgtactttggacagagggtgtgaggagggtcctgggcactgtggaagtctttaactatcagtcctttttattttcagatataaattagaatttggaaaccattaacaccagtgccacatgttcacaactattataattagctattaggcacaaaatgctgggagtagacaagggttcaaatcttcttttattcatagcaagagtactcttgcctggttagtaatagctcttattttattgatatatgtcagtatctagctgcatgtctggaggttctgacttcccagctggaacttacctgagaacaacaggtgtgtttcatagccaccaactcagtattagtcacatagcatgaatgtaaaaaatgtgtgctgaatgtgtcagactgaattaattcatgattaccaggatgggccaatcaggaacagcctcagggaacattctccagggtgagccctgccgtgttggtttggtggctcatggtgtccggggaccattccataaccctcagtccctcgctacttttactgggccctgtgaggcttccctcagactcctccggcactcacctattctcaaaagccacctagccgagttgctacctttttagataagtgatcagaatttttcaaattaaaaaacaaagttcttatactcagaaaatttgaagcttataatttcttgttatttcctctgtgataaatcgtaaacaacttagatttttcaagtatgtatttttttttccaaattaaccacatttagatgatttagatgctaaactattcagaaataagttagatacggaaaattttgcttctggaggaaaatgaacctaaatagtactcaccctttcctctttccatactaaataaataataccctgattcaaatccatagtaaatgttgttaaaatagtttccccacagcacaggactagcagatgaaggaccatctgagaggcaggtgctgggtgcggatgggccccaggtcgcctctttgtttttgtagtagtgggcatgttcgcactgtctctcattgttaggaagccgtgtcagtggggctggttccctgtggactctcgtgtgagctctgtctgttccctgccctgatccctgcattcgcccccagtcttctccctttattgactgcattctaattagttcaagtctgatcacatcacagaaataatcctggcccacagatttatttcctgtggtaaatgtcttcttggtggttttctaggttgtgctggtgaggtggaatgagccctaccagaaactggccacgtgcgatgcggacggaggcatattcgtgtggattcagtacgagggcaggtggtctgtggagctggtcaacgaccgcggggcgcaggtgagtggcaggcgcagctctgccagtgaagggctgcggggtagaggactcccagacaggcattccggagccagtgcgttagcaccacacagcgccacgtgctccagagctgggggaagagaaatcaatcaaattagaatcctacttttcatttctctcacatatgtcactggataaaaagagtacaggatcatgcccccttttcaaccatgctgctgttgtgagaactctccaactttcaaactttaatcagatctgtgaagtcattttttacccttcagtgttgtgattccatgttaaatttggggcctctggcatatcactgttttgcccccttcgaaaggtatcttccctgtgttgtcatctcagcggtctcatggagagcttcacgtgacttctcacaacctgctcaacaaggaaagggtgctacaatctcttccacaggcttcaatcagcacggcctcctgttgtcatcctccagctcttcctttctgacacagtttgtctctgctctcaggaaacagttgcacccaggacagcctgctgagctgcgctgtttctagaactgctccatagattgttctggtttacaggacggcttcatggtgcaccttttgtatgggtttaaggacacacattggagcaggcagctcccatcctggggattgtacaaaactgggacttaagaacctgaatcctcaggggatgtcaattaataattaatgaggggtttcttggactattttaactctcagaatgatttccctgtggctgcctttctatacacttctaaggtacttggattctcatccttccctcgcccacctgttgcttaaataagctgtgagcttcctaagctacagatcagtcaagtgacataaaattacaatgaatgaagacattattgtcagcggctattagcaggccgaggatttctgtaagatatcatcacagaagaccctgtgtgaaaacagcatttttttctgagttgatttggtagagtaaatgtaataatattgactgactgataaggccttaccagtttccttcaggctccttcagagcctgccccttgaccattaactggccttcttgaaggagagccacagatgtagacatcttcatgtgagtggacatgtgattaagagcatgagctctggaatcagacaatgtaggccggaaatcccaccccatgacttctgtgtgggagatacttgcctgtgcctcaggatcacagaggattacataagactgtatatgaaaagtgcccatggcaccgcttgcatcttatcacagtgcctgtagcatgtggaggttctaccaccttgtctggcatggaactgccctgccctgaagcagtagccataggtcatcaccaaagatgagtttcaggccttgaggtagcagcttttcttggtttctgtgaaatgaccgcctctccgagttggcctgtaaaggttctaaaatgctgtcattcttccattaactaaagcatgggattctcttccctagaaaggcccagtgatgaggtgagacatatcttcagatttagggtggccagaggacttgaaatcactgctcagaaaaggaaatggaaggggagcaaggataaatgccaaatgagtgcttgattttttcatgcgttatatctttcagtctccaggaaccctgttccaaaaatatcattattctcagttaatagaagagaagaatccaggtcaggagttgagtaacttgtccaaggaagttcatgggtggtaagccagaactcaaaccctagtttgtttgagtctgtaatgctccaccacactgtcatgttcccaaacaagaaatgattttctcttttggcagagatgcgtgtattcatagtgtagttacatgctgcataatgacgtttcagttatcacagactgcatatacgacggtgatctcataaggttgtaatggagctgaaaaatttctatcacctagtgacactgcagcatgacacatgactcgtgtttgtggtgttactggtgtgaacaaacctactgtgatgccagctgtataaaagtatagcacatgccattagtacagtccataatgcttgataataacaaatgactatgttactggtatttactgtactttttattattttagatagagtgtgcttcttttttttttttttttttgagacggagtcacgctctgtcgcccaggctggagtgcaggggcacgatctcaactcactgcaagctccgcctcccgggttcacgccattctcctgcttcagcctcctgagtagctgggactacagacacccaccaccacgcccggctaatttttttttgtatttttttttttttagtagagatggggtttcaccacgttagccaggatggtctcgatctcctgacctcatgatccacccgcgtcagcctcccaaagtgctgggattacaggcatgagccactgcgcccggccgcttctacttattaaaaaaaaaaaaaaaagttagcagtctcaggcaggtccttcaggaggtattcctgaagaaggcattgttatcataggagatgacagctccgtggatatgttactgccccttgtgttagggttctctagaggggtggaactaatgcggtagatgtatatatgaaagggagtttttgaaggagaactgactcacacgatcacgaggtaaaatcccatgataggccgtctgcaagttgaggggcaaggaagccagtggtggatccgtctgagtcccaaaaccacaaaagttgggaagttgacagtgcagccttgagtctgtggccgaaggtccaagagcccctggcaaaccactggtgtaagtccaagagtctaaaagctgaggaacttggagtctgatgttgagggcaggaggcatccagcacgggagagagatgaaggctggaagactctgcaagtcattcttccatcttctccttcctgctttattctagctgcgctggcagctgattagatggtgcccacccagattgagggggggtctgcctctcccagtccactgactcaaatgttaatctcctttggcaacaccctcacagacacaccaggaacaatactctgcattcttcagtccagtcaagtttgacactcagtattaacgatcacacccctgaagaccttccagtgggacaaggtgtggaggcagaagacagtgatatgaatgatcctgaccgggtgtaggcctaggctaatatgtgtcttagtttttaacaaaaacatttaaaaagaaaaaaaaaattaatagaaaaagcttacagcataaggatataaagaaaaacataatttggtacagctatatgtttgtgttttaagtgttattacaaaaggatcaaaaaaagtatcaaacttcttgaaaaactgaaaagtttaaaaagtaaaacagttacaataagctaaggttaattcattattgaggaaagaaccatttttttaatgaaatgagtgcagcctaagcatccagtgttgataaagtctacagtagctacaaggtaatgtcctaggccttcagtcactctccactcactctctggctcacccagagcaacttctagtcctgcaagctccattcatggtaagtgcccttttatagatgaaccactttttatcttttatactgtattcttactgtatgttgtctatgtttagatagctttagatacatgaatacttgccattgtattacagttgcctacagtgttcaacacaatcacatgtgtacaggtctgtagcctaggagtagtaggctgtcccatacagcctaggtgtggagcaggctctactgtccaagtttgagtaagtgcaccctgtgatgatcacacaacaagggaattgcctaatgacatacttgttagaatgtatccccattgttaatcgacatgactgtataccccaaggagctcaggcttcattaccattaaaaggcccaccctaccagccaagcagtgccaccagcacatggattctcctagcagtagcctctgtgagcaggggccctctatcatctccatagcagctgtgcagtcaccaccatccaacacttcccttgtgtttctttccattgagggtttggagcagatattagaaacaagaaagggagaatgagttcagccctggaggcaaatgagcttccctgggccacagaacatctggaagcacccagaatctcataaatgcctgcctaccaggtttgactaaagtaattactgtatgttgtgatctcattttagagttttgtttacttttgccatttggaactcagatttttcaaatcttagaacccactgagcaactgtcatcattaaacagtggcattctgggggaggcttggttgcctttaatcgtgttggagtcagatcttacccgactaaaaaggacaccacacactggtgacgatggatcactggtcaaggaactggtggctttctgcacctggaaaagttctgtggcttagaagaggagtgtccttgaaaccagctcagagaaaaagactactttttagaagaaatgacagattattttcattatatagcatgcttttcattgtcacaaagtaatcaaacatttggcaaaagctaagagatgctttaacaatttctttttcaggaaatgattaagagtcctttatttcaaaaatgagtttggaacagtacatgcattattttacagtattagtcaccaggggcggctgtaccaggcacacacactctgagacagtctgatgaaaagctgcctgggtcaatggcatggtcagcctgctgctcagcttcaattaatccatgcctgagaactctttagtaaagcaagagcattgcaaccttctgcagttgaaaaactaaaagaactggagtttctgcctttttgtgtgtgtgtgtttttttttttttttttgggagcgggggagacagggtctctctgtcacccaggctggagtgcagtggcgcatcttcggctcactgcaacctccacctcccgggttgaagcaattcttttgccccagcctcctaagtagctgggattacaggcatgcatcaccacacccggctatttttttatacttttagtagagacagggtttcaccatgttgcccaggctgttcttgaactcctgggctcaggtgatccacccgtcttggcctcccaaagtgctggaattgcaggcatgagccaccacttttttttttttttttttttaagcaattcgatacttggttttctctggttttgtttttccagttgtgatatagtcttatcacattatgttgacctaataaacccaaattgagccaagtggctagttgggagactgagtcaagaggatctcttgtgaccagagttcaagatcagcctggacaatatagcaagacctcatctcaacaaaaatagttttaaaattagcttggtatggtttcacaaccctgtagtcccagctactcggaaggcggcaatgggaggattgcttgagcaatccatttgaggctgcagtgaactatgactgtgccactgcactccagcctgggcaacaaagcaagaccaagtctctagacaaataaacagaaacccaattagtccatgtgaacatcctctattaccagtttttttgtgtgatgtaaaattgctggtatctctaagaagcttcattttactggctatgtgttttggctatggattaaggagatttcccaaaatagttttctcttttagtacaaatcttttttaaaatacatagttaaaatgcatgtaagtaaatagcattatctttgcaaaatgaaagagctttttatttttattccagaatgtaatgcgttgtttctgaaaaacattgttttatgttaatgagaaaaaccagacagtataattggttggaacataaagtcagtaaagccaaggttctgagtttatctgaggaaacaacttttttcagtaatctcagaccagctattcaagagctatctcacaaaccatgccattgtcatgatagagacattgctgataacacaacataaacccataacccctacttgaaaaacagcaagaagttcatgttcttttggtgtttgttcatttattttctcattacctgaaatgtaatatatccattaataccatagattttttaaaaagctaaatgtttgtagctataagcaacattgaagattatagatagcatttgttttgttagataagattaaaaagaaacacaatgtaggacaaattgaaaaagtaaaccaaggtggtagaaaacaggaacaaatataatgctaattagaataaatgtaaatggattaaatttaccaatcaaaagatacagcttagcagattacatttgtaaaaatctagataacagtatatcttgtttagagccacacctcaaacttaaggacataaacacatttaaaggatgagaaagatgtatcttgcaaataccaagaaaaaaaataaagctgatgtagctgtatgttagtatcagataaagtagatttgaagacaaagtattatttggttcgtagaagacagaaaggattatttggtaagctgtagtttaccaagagcatattttaaatatgtatacacttattaatagcatcacaataagtgaaggaaactaatagaactgaaaggaaaaattgataaatccattgacatactcagacattttaacgacagtcagcaaagatgtagatgatctgagcaacacaattaacaagcttgacctaaaggacatttataggttcttaattcaccaattagacaacatacttttttctcaaacacagaagggttataaaaattgatcatattctagggcaggattctgcaaaccttttctgtgaagggtcagatagtaaatattttaggttttgtggacaaggagccaaaattgaggatattatataggtatcatataacaagaggaaaatcagatttccaaaagatttttattgacaaaatttaaaatttgatttatgaacactgaaatttgaattttatgtaatttcaaataacaaaatatcattcttcttttgatttttttcttctcaaccacttaaaaccattctcagtttgtgggccatacaaaaataggtgacaggtcagatttggctcacaggccatagcttgccaatccctgttctacgacttaaataaaaaacagatttccagtgtcaggcatgatgattatagaccacgatctctgaacacagtgcaactgggttagaagttaataacgacgagataagagatccctgtctgttttttgttttgttttgttttctgaccgagtttcattcttgttgcctaggctggagtgcaatggcgccatctcggctcactgcaatccttgcctcccgggttcaagcgattctcctgtctcagcctccagagtagctgggattacaggcacccgccactacacctggctaatttttgtttttttttagtagagacgaggtttcaccatgttggccaggtgggtctcaaactcctgacctcaggtgatccaccttccacatcctcccaaagtgctgggactacaggcgtgagccacctcgcccggcctatttaggcattttaaaatatattgttaaatagctcatggtttacagaatatgtttaatagacatttataaaatcctagatctaaattataatgaaaacatgtcaacaaagcgtcgaactctgtaaaatatttgaagagatttattctgagccaaacatgagtgaccatggcccatgacacagccctcaggaagtcctgagaacatgtgcccaaagtggtcgggccgcagtttggtttttatacactttggagaggcgtgagacattaatcaaatacatttaagaaatgcattggtggccgggcgcggtggctcacgcctgtaatcccagcactttgggaggctgaggtgggcggatcacgaggtcaagagatcaagaccatcctggctaacacggtgaaaccctgtgtctactaaaaatacaaaaaaattagccaggcgtggtggcacgcgcctgtagtcccagctactcgggaggctgaggcaggagaatggcgtgaacccgggaggcggagcttgcagtgagccgagatcgcgccactgcactccagcctgggccacagagcggggctccgtctcaaaaaaaaaaaaagaaatacattggtttggtccagaaaggcagaacaactcaaaggggtccgggaggttccaggctatggtgaatttaaatattttctagttgacaattggttgagtttgtctgaagacccgggattgatagaaagataatgttcaggttaaaataaaattttgtgcagcccaaagttcttttgcagtcttatagtggctgtccttagagacagtaggatgacaaatgtttcctattcagattttaggtagtctctttagaattgggagggtctggaatcaaaagatctagcgatgttaatagagattctttacagatgcaaatttttccccacaaagaacagctttgtagggccatttcaaaatatggcaaagaagcacgttttggggtaaaatatttttattttcttgtcttgtaatgttacgccagagtgaggttggaaagtaaatcatgatatatagtgttaaataaaacccaacctatgtgatgagagtttatgatttgtagggcatgactccccagaccccttagataggaatttgggcaaggtaaaagaataagaatttagtccttcattgtataccggaatttgtgagatatgattaaagtggtgctgtgagagaaatgtatatccttaattacttatattagcaataaaactgtgatcattggtcagataggtatttatcttaaaatattattaattgaaaaggagagtaaatccaatgaaagaaaaagtaagaaataataaaaatgaaagtgaaaattagtacaatagggaaaaatgataaggtagagatcaacaaatccaaaaattagttctttggaaacaaatcaacaaaatagacagatgtcttgcaaaactgatcaagagaagaacacagaaataaacaattttatgaatgaaaaattgggcatagctataaatagagattacaaggtaaccaaacgtaaattataagatgcaggtagttcaatgggggaaaggtaaatcttttcaacaaatggtgctgaaacaactgaatatctgtattttttaaaaagaaaaccttgattcttacctcacaccgtgcataaaaattaactctagatgaatcagagataagtgatacggctccagtgagtggaggaacaccagggttcttaattctcaggccagtttagacaaaacacggacacatgtggagcggttttaaggagcggagagtttaatagacaagaaggaagcggaaggcagaaggaagaggctcccccatacagagatagagggagaggaggctccaaagccgaaagaggaggtccccaagtgcggtggataccagccaggtctatatgcagaggctgaaggaggcgatgtcagatttgcatagggctcaggggattggtttgaccaggcatgtgattcaccatgtagcctgcggaaaacgctggccctcccaccccagcctttaaatatgcaaatgcaggacgccaaggatgttccacacacgtggggatatgtgggggcggccatgttgccaggaacacctgggacaagggccggaaggcgcccgaatcgccatgttggatggacccagtttctaatggtctgcatttgcatatcaaaggttgctagcctggctctaagaaacttacaggctcacgcctgtaatccaagctctcagggaggcagaggccggaggatagcttgagcccaggaagtggagacctgcctgggcaatacagcaagaccccttcctccacaaaaaagagggggggggggggaaagaaaccttcccaggaccccttttcctctctatctgcctacaataataactcctgcaacgtaagtgtaaaagctaaacctctagaagtctttgcagcctggggctaaataaagatttcttagactggatgcagaaaacgtgatccataaaagaaaaaacttgatattagacttcatcgaaatttaatgatacgaagttacagttagacaggaaaataagttttggtgttctgttacacagtagagtaagtatagcaaataacaatgtagagcatatttcaagattgctagaagagaaaatgttaagtattgtcaccacaaagaaatgataaatgtttaacatgatatggcattaactctgatttgatcattatactatgtattcatgcattgaaacatcacattgtactctatacatatatacagttattatgggccaattataaattaaattttttcttaatttaaacttgtttgttgttatttgtttttgttttttgttgttgttgttgttgttgttttgagatggagtctcaccctgccacgcaggctggagtgcagtggcgcaatcttgactcactgcaagctctgcctactgggttcatgccattctcctgcctcagcctcccaagtagctgggactacaggtgcctgccaccacacccggctaattttttgtatttttagtagagacggggtttcaccgtgttagccaggatggtctcgatctcctgacctcgtgatccgcccacctcagcctcccaaagtgctgggattacaggtgtgagccaccgcgcctggccaacttcttctctttggaagataccattaaaaaaatgaaaaggcaagccaaagactggagaaaatatttgaagtacacatatctgataaaggattatatctagaatttatagagaaattttatgacagtaagaaggtgaaaactgatatttactatatatttttaaaatatatttgcccgtgttcatacagtcatcccttggtatccatagcggattggttccaggactttccacagatactgaaattcatggaagcacacgtatatgatgtaaaacggtatatttgtatataatctatgcacatcatcttgtatacttacttatttacttattttgagatggagtctcgctctgtgctggagtgcagtagcttgatatcggctcactgcaacctccgcctcccagattcaagtgattctcccgactcagcctcctgagtagctgggactacagatgcgcactaccacacctggctaatttttgcattttgagtagaaacagggtttcaccatgttggacaggctggtcttgaactcctgacctcaagtgatctgcctgccttggcctcccaaagtgctgggattacaggtgtgagccactgcgctcagcccatcttgtatacttcaaatcatttctagattacttataatacctaatacaatgtaaatgctaaataaatagttgttgtattatttaggggtaatgacaaggggagaaaaaagcgtacatgttcaatacaaatgtaatttttttccaatttttattcaaagttggttgaattcatggatacagaatccatggatacagatgacaaactgtatatggaaagagatttgaacagatataccccaaaagatgtgtagatgatcaatcaacacatgaaatgatgcccaacatattagtcattatggaaatgcaagttagacaatgtcggctgggcacggtggctcgtaccggtaatcccagcactttgggaggccgaggtgggcggatcacaaggtcaggagatcgagaccatcctggctaacatggtgaaaccccgtctctactaaaaatacaaaaaaattagccgggcgtggtggtgggcgcctgtattcgcagctactcgggaggctgaggcaggagaattgtttgaactcggtaggcggagcttgcagtgagctgagatcgtgccactggactccagcctgggtggcagagtgagacaccatctcaaaaaaaaaaaaaaaaaaaaaaaaaaagacaatgtcatacacctactagaatagttaaaattaaaatgactgacaacaggctgggtgcggtggctcacacatgtaatcccagcactttgggaagccgaggagggccgatcacctgaggtcgggagttcgagatcagcctgaccaacgtggtgaaacctcgtctcgactaaaaatacaaaattagccaggtatggtagcaggcgcctgtaatcccagctactcgggaggctgcagccggagaatcacttgaacctgagaggtggaggttgtggtgagctgtgatcgtgccattgcactccagcctggaaaagaagagcaaaactccgtctcaaaaaaaaaaaaaaaaaaaaaaatggcagccgacgcaagtgtaaaatgacgtaaccacttagtttttttgtttctgttttaggtttttttttgtttgttttgttttgtttttttgagacggagtcccactctgttgcccaggctggagtgcacgatcttggctctctgcaacctccacctcccaggttcaagcgattctcctattttagccttctgagtagctaggattacaggcacctgacacaaccccaggctagtttttgtatttttagtagagatgggaaacccatctctggtctcgaactcttgagctccaggtgtccacccattttggcctcccaaagtgttgggattataggcgtgagccacctcgccctgccctgttttttgactttttaatcgtagccattccaactgatgtgagatggtgtctcattgtgtttttgatttgcatttctctaatcagtgaagttgagcctttttaaatatgcttgttggctgcatgtatgacttcttttgaaaagtgtcagttcttattttttgtccactttttaatggggttgttttcttgtaaattcgtttaagtatccttatagatgctgtatattagacctttgtcagatgcgtactttgtaaaatttttctcccattctgtagattgtctatttactttattgatagtttcttttgctgttctgaagctctttagttcaactagatcttgtttatcaatttttgcttttgttgctattgcttttggtatcttcatcatgaaatctttgcccgttcctatgtccagaatggtattgcctagattgtcttcagaggtttttattgtttgggtttttacatttaagtctttaatcttgagttgatttttgtatattgtataagaaaggggtccagtttcaacattctgcatatggctacccagttatcccagcaccatttattgaatagggagtcctttccccgttgtttgtttttgtcagctttgtcaaagatcagatggttgtaaatatgcagccttatttctgggttctctgttctgttccattggtctgtgtgtcgtttttgtaccagtaccatgctgttttggttactgtagccctgtagtatagtttgaagtcaggtagcatgatgcctccagctttgttctttttgcttaggattgccttggatctttgggctcttttttggttccatatgaatttaaaaatagtttttttctggttctatgaagaatgtcattggtagtttgataggaatagcattacatctgtaaactgttttgggtagtatggcccttttagtgatattgattcttcctatccgtgagcatgtagtatgtttccatttgtttgtgtcatctctgatttctttgagcagtgttttgtagttctctttgtagagatccttcacctcactggttatctgtattcctaggcattttattctttttgtttcagttgtgaatgagagtttgttcctgatttggctcttggtttggctgttgtttgtgtgtaggaatgctagtgatttttgtatgttgatttcgtatcctgagactttgctgaatagcaatttggatagacaaattatggtatattcatacaacggaataatatgtataaaaaggaatgaactactgacacacggaattcagatgacactcaacatctttatactgagtaaaagtagtcagacagagaagttgaacatactatatggtaccattcgtgcaaaattctagaatgaacaaccagtgacagaaagcagatcactgtttgcctaggactagggttggggattgacttctggggcgaggagggactttactgcatgtaaattataccttaataaagttgatttttaaaaggaaaatattaacaactacttgccagcagttttgaaaacttacatgaaatggacaaattccttttcaaaattatcagacctttttttttttttttttttttttttttttttttttttttttgagacggagtctcgctctgtcgccaggctggagtgcagtggcatgatctcgtctcactgcaacctccacctcccaggttcaagcgattctcctgcctcagtttcctgagtagctgggactacaggcgcgtgccaccatgcccagctaatttttgtatttttagtagaaacagggtttcaccatgttggccagatggtctcgatctcttgacctcgtgatctgcctgcctcagcctcccaaagtgctgggattacaggcgtgagccaccacacccagccctaaaattaccagaactgactcaagaagtaaaaaggttgaaagtttagactgggcacagtggctcatgcctgtaattccaacacttcgggagaccaaggcagacagatcacttgaggtcaggagttggagaccagcctggccaacatggcaaaaccccatctctactaaaaatacaaaaattagctgggtgtggtggtggtgcgtgcctgtaatcccagctactcaggagactgaggcaagagaatcgcttggacccgggaggtggaggttgcactgagccaagatcatgccactgcattccagcctgggcaacagagcaagactctgtctcaaaagaaaacgtgaaagtttagtactaggactattaaattgaataagtggttaataatcttcccattacaaaaatacatagtcagatgatttggcaggcttgtctaccaaactttcaagcaacaaatcatctgtttatacaaattcttctgggcattgaagaaagagggactacttcagctcatcttgagagggtaacgtaaccctgctaaatccagagacgcacattaccaaaacaaaatcacgggtctactacattcatgaatgcagatgcagaaaatctaaagacactagcaaatcagcttcaactgtgcatataaaagacaatacctctaaattggactctggtaggtatgcaagaatagtatgatatgtaaaaatccatacaaataacttaccacaatagattaatagagggaaaaatgtggtcatttgaatagatgcaatagcatttgataaacttaacactcaagtataagtaatgtttttcagttagatttttttttttcttcattctgattgagggggtattgttagcaagactgaggggcaatataatcagaaacttagagctttactgttttggtaagggaccaacagactctgatggagaatctattactaaccataagtgagaggcagtgtaacagtggttgaaaggaaagaccctgtagccagatattcctgggatttttcctgtttctgtctcttgcctgctatgttgactgagtcttctctgtagatgagaacagtaataccttccgcagactgttgacttgaggcttaatgaattaatgtacatgaaacatacagaacactggtgatgcacagtatgcactgaagtcagtttcaatcatttttcttaaaaaaatttctttagagacaataccttgttctgtcacccaggctggagtacagaggcaccatgatcgctcactaaggcctcaacctcctaggctcaaggaatcctcccacctcagcctcctgagtagctaagaccacaggtgtctgccactgctcccgactaattattttgagacagagtctcactctgttgcccaggctggagtgcagtggcgctatcttggctcactgcaacctcttcttcccaggttcaagtgattctctcacctctgcctcccaagtggctaggactacgggcacgtgccagcacgcttgcctcatttttgtatttttagtagagatggggtttcaccatgttaaccaggctggtctcaaactcctgacctcaagtaatctgcctgcctcggcctcccgaagtgctgggattacaggcatgagccactttacccggccccgactaattcttaaaatttttgtagaggtagtatctcgttattttgtctaggctgggctcgaactcctggcttcaagtgatcctctcactttggcttcccagcattctgggtttacaggcatgaggcactgtggctggcctcagtaacgtttttatagctttcaaataacatatgttatattttaaggccatctccatcttagccaaaagtctaagttaatgactatgtctagactttgataaaatgttttccttttcagattacaaattgactcttttctgtgtgtgtccccaaggtgagtgatttcacgtggagccatgatggaactcaagcacttatttcctatcgagatgggtttgtcctggttgggtctgtcagtggacaaagacactggtcatccgaaatcaacttggaaagtcaaattacgtgtggcatatggactcctgacgaccaacaggtaacacttctgaaatgtggtgggtgtgtgacgttaaaaccatgagggctgggagggaagaaaggggcaggagaggggagctggtgcaaaagcctctttaagaatcacaatggaaaagaacaataaaactgtccaggtaaaaattaaaataaaaattctaaatgaaccataaattggaaaaacaacatttcccaccaatatggtaacattaagttaacattttaattatataaaatgttcatacaattttattaataaaatctgcataaatatgcagttgatattagatatcaagtaagttgatactaagcttaaaaaaaatcaggataggaaatgggatgtttggtatattgctacatcgtaagacaacaaagaagcccatccacatggtaaaaagctggagggaagtgaatcaaaaaattataagcaattttatagtaatgagcctctggttcgttttttaaaaattgaatttcaaaatgttctttaatgtgcctatttgactttcatgagaaaataacatataataacaataaaattctatattgataattcattttggaggccaggcacggtggctcacgcctgtaatcccaacactttgggaggtggaggcgggtggatcacctaaggtcaggatttcgagaccagcctgaccaatatggtgaaaccctgtctctactaaaaaaaaaatacaaaaattagccaggcatgatggcgggcgcctgtaatgccagctgcttggaggctgagacaggagaattgcttgaactgggaggtggaggttgcagtgagccaggattgtgccactgcgctccagcctgggtgacagagcgatactccatctcaaaaatgaaatgaaaatttttaaagtataaggattgactagttaaaatctttataaaacttgtgttttccatgtatagcagaatacatataatgccagaatgttttatcccagagatttaagtttattattggtaaaaaaccaagcagtataatatggaaccgtaactttcatttttgagccacttttttttaactgaattgctttcctctagtcactatatatttaatgtttccatttttcaagtaaaaagacaaatattttttctcttctcaaaattggtattatgagatttatgaaaaggtattttcagctccatgtttcttcccttgctttccccagaggcttccaattatcccctagtatttgtgtgtatttatatgaaatgcttagattcctttattataaagctgcatttttatgggtttttactacccccgagtctcagaagtgcgttgcattaagtgaccttgcccgaggcacctgatctttcctgtatcagtttctcctgtgtgacaaggactgtgtattatttcctgcctaatccccagggctttttaatgatcaaatgaaggaacagatgtgaaagcccttaaaaatccaggagtggatgtcttggcttcacattcttccctcgcctagagtgatggaacccatgagccatctgtgaggctcatctcatggtcctctgatgagttgtgccagccagtgtccccagcagactgtgcacatgtaggacaggcaggggacccactggggatacagcagtgagagagacgcagctcttgcctttgaggtacaattggacctgttgaggagacagacctctccttacacagaatctgctgccgtggcttggcaacgtgtggaggaggacttcccaggaagggctggctgtgactcccaagtcgaatctggggtacgttgttccaggcagcccaagcagagttccagggtattgacaccatggtgtgcacgtaccacagggagtggtttcctgctgccgtggaacgtgaagggggactcctggggctggaggagtcggtaggacaatggccatgggaagcatggaggccatgctgacgtgcctggccttgagtctgtagaccttggcgtgaggaaagagctgatgtggcaagcaattgggtacgtggccgcagcctctgtcctgatgactgcttttactaacaggtgggattttgttctaggaaagcgcccccactgcctttaaataaaatggttgcagcagggtgcctgttgtctcagctagtcaggaggctgaggtgggaggctcacttgagcccaggagttctcgagaccagcctaggcaacatagcaggaccccatctctgaaaaaaaaaaaaattaaaaaaaaaaaaaaaaggatttgcaggtcactgaagcaataaggaccctgggaaaaatttaccacagagaacatgtgtatcaggcactcagtcttgtttgaactgagacatagagcaggaatactcctcctcctgtctctaccactcattcacatctcttgcttggtttgattttatcaatgaaaaaagagtccatagacaggttgtgggccagcctgatgtctgtaatgtcaggagttggatgtggaaagcgcacccctgcagctcaggggctctgaacggtggacatgaaggtagagctgcaggaagccggatgagtctcttcctgcttccctgagaactttctgcctttaatgtgagttaaaatagcttccaggagtaaacctcttcctcacatcttgagctatattggattatagtgggattttaggctacttcctgtcaactttaaaaaatataagcagtgcatggctgggcacggtggctcacgcctgtaatcccagcactttgggaggccaaggcgggtggatcatgaggtcaggagattgagaccatcctggccaacatggtgaaaccccgtctgtactaaaaatagaaaaattagctgggcatagtggcatgtgcctgtattgtgcgctgttttgccaactttctattatgaatatgttcaaatgtacagaaaagttgagaaaataaaccttcctgaaacattttgccatatttgcactttttcctcaccactccccacttttttgtagttcttgtttttgaaagtaagtggtagacatcgtggcacatcacccttatatatttcaacatgtgtttcctgagaataaagcctttcacctgcacaggcacccctaagaaattagcaatgacattatctggtatctaggctacctttttatttccctaattgttacaggaatgtatttcatagtcttttttggttttttggaaccaggatccagtttaattcatgtacagcagttggttgttctgtctctacagtcttttagtctagaacagtttcccgttttttaaattgactttttcatgaggtcagtgtggccaccttacacgctgtccccacactctagatttgtctgattgtgtttacttatagtatcattttccttccggcccttgtatttcctataaactggaagttaagtctagactagagttggagtaaacaattttggcaagaatactttaaaggtaacatattctttactctgaaccacactaaaaagtgtataatgtctcatcctagtctgagggttgctgagtttaatggaacctttgtaaaaacaaaagttgctaggcgcagtggctcacgcctgtaatcccaacactttgggaggccgaggcaggtagatcacgaggtcaggagatcgagaccatcctggctaacacggtgaaacccgtctactaaaaatacaaaaaattagccaggcgtggtggcacgtgcctgtagtcccagctactccggaggctgaggcaggagaattacttgaacccaggaggcattgcagtgaaccgagatggcgccattgcactccagcctggtaacaagagggaaactctgtctcaaaaaaaagttatttttcacagcatgttgttaatgtcatctacacttaaacagctgatttgttcaaaggatgtgttttacttcaggctaaaattcatcttccattaaattgcaagaagggaatgtaatcctacctggaatttatttagtgggtgaggactctgtattagtttgcttgggctgccatgacagaatatcacagactgggcggtttcaacaacagaagtgtatttctcacagttcttctggaggctagaagtccaagatcaaggtgttggcaggtctcatttctcctgaggcctgtctccttggcttacagacacctgccttcttattgtgttctcacgtggacttttctctgtgcacccacatttctggtgtctcttcctcttcctgtaaggacaccagtcctgttggattaggttcccacccatattacctcatttaactgtagttacctctttacaggccccatctccaaaaatagtcacatttggggttcaacacatttgttcaacaaaattcaacatatgagttttggggcacacaattcagtccataatagactgatagaaaatattttggagaatataaaagttacagaagaaatagtgatataaactcagcttgataaacttaggatatatttgtaaatagaacaggttttatagggcttgggagcaaaccagaatgacacaaagagaaaatgtcaaataaatataagtatgactgggaaaaatatctgggtcctaagttgacgcagagtaatgctgcaacagtgaagcttttgcagttctggaaacatccagcatcacagcagggtctgccagagcgaatgtttcattgtctgtgttctccttgggtttaggagaataccttgccccttgatatgtgaaaattatttgagacgttgacattttgaaatattcttccagcatgttttggatcttagctaactgtcaattcacttggaaagcctttcaactagagaatgcaatgagaacctgagctgtgtttccatgaaaaaggttgacatgctgatatgccacccagcatttccatgctgagtgtggtcctcctagggcggtgaccagctgatgtgcctgaggccactgaggaaaggtcaaaagaagagccccaaacttcaatttgagactccagtttaaatgtggaagaattttgtggtaacttctgaatgaaagttaccacatacatgaaatggcatgggaagaagactctctccttgttcctgccagtctgggggagctccaagaagcagcccccacacgtttctctgctgtgggagacaacgggctctgcccagaactcttcccaggctgcggctttgtccctgtgtcatctctgataccccatctccagagagctcctgcagtgaggcacatacataatatgggtgcatgaaccattttttaaatcatcttaagacaatttcaaggcgttaaagcttatggaagttagtgacacccatttccccccacagtcagggtagccccctgtcctgggtcaagcaaagatgagtatcttgtgtatgtcttccaggcatttgcagcttccctccccagtcagtggttcctgtttcttgccccaggagccacagagcatgcttctctctgggctcttggcctcagatgcggtctccttggcagcctggtgcttccatcctctgctcggctaccttggttggcgtcttctggaccctgtcagcacatccaggcacgtcctttctgcagtgcctctcccagctggatcttgcctcctcctcccatcgctgtcatctccctccccggctcttacatggcatgcctttccatccaactcggtcccccttcctaggttccaacctcagacctctccccttttttccatcctttgggtgatttcctccattgccacagctgcatcagctcccatctgtttgctgctggctccccacacctatcccgcgctcatcgctcttgtccttcacactgcgacaccatcaccgtcaccaccaccaccatgcttgcagagcaactccggatagacgtagacgttgctcaagtccactgtggtctgaacttagcttcctctcccccctgcctctcctccctccggtccctcatctgcactcttatcttgcttatcatttatgccctaaactgggaattgctcatcgtttgtgccctcaactgggaatcctttatcccctaaactgggactctttttttttttttattttgaggtggagtctcgctctgtcgcccagtggcacgatctcggctcactgcaacctccgcctcccgggttcaagcgattcttgtgcctcaccctcccaagtagctgggaccacacaggcatgcgccaccatgcctggctaattttcgtatttttagtaaagacggggttggctaggctggtcttgaaccgctaacctcaagtgatctgcctgcctcagcctcctaaagtgctgggactacaggtgtgagccaccatgcccagcctggactctcttttctgtacctccaaccttcacttagtcaccaggtcctgttgattccacttcctatgtttctatctgagactatttatttatacttaaagtttatagatgattgtgctcaaaccagcttaactgaaagtatttaaggtttcatgtaacttgaccagaatgtatcacttgaagggaggttaatggttctcctgaaatacaggtacaggtatacttcactttatatagtggatgaaagaatgtaggtaaagtgagtttttgaaaacatgattatattttaactacccacctacaggaatctccctatttaaagaatattctatagaaattgcccttgtttagaaggcagttgtttttgaaatgagaattcttcacctcatacatgtttttgctagcaatatccagattttagttttccgggagtagaggtaatatttctttataaatactaaacctttttaaaaggagggagtcttaaatctggtattttcttagacgctcttaaagcacgatttcaaataaagtagaaagaatccgggctggtaagtattaaatagtcaccatggtaaagcttttagcttttcaggtcttggcacatgcagtactagtaggtggcattttattctctagcctcagtgctggttgcatttagttttgtgttttttaaacctagaaagtgggtaggtttatcctgtttgctttgggatacaaaaggtaggtcccaagtcccttctcatctgctaaggaggttttgcaccctgtgtagtctgttgtgtgctggtgtggtcatgtccctgaggccactgtgtcttcacagcagctaagcactgtcagatcatttggggagagaagcagtaacagtcactgaatgcctgtgcacctctgggacatctgtgagatgaaggctttttcatatacatgttttgcaagaaatatgacctttatttgctatttggagcagagtggaatcaggacttgagtagttagtgtaacaggattatttaaaagaatattttagtacagaatttttaattcatttatttcaaatggtttaaaaataaattttaggtcaggcttaaaatcatgcctgtaatcttagcactttgggaggccagagcaggagaattgcttgaggccaagagttcaagaccaaccagggtaatgtagcaagaccccatctctacaaaaaattaaaaaccagccaggtgcagtggcacattccagtggtcccagctactcaggaggctgaggtgggaggattgcttgagcctgggaggtcgaggctgcagtgagctgtgatagctcactgcactccagcctggggaacagagcaagatccggtctcaaataaaataaaaataatatttaaaaaaataattagtatgcagatgtcttttcagagatattaagggatgaaaaatgaactgttacagatactcatatgcaggtaaacgttaaaacattggtcagttgaaaagaataattcattcacttttaaaagataaagtcatgactgaagtacaatttagaactcaaggagatttcgtaactccccagagtatccaagtaataaatgattctggctgggtatggtggcatgtgcctgtagttccagctactcaggaggctaaggtgggaggatcccttgagcccaggagttgtgggctgtggtttgctatgtcattcaggtgtctacaatacagtttacttcctgggtgcaggggaccaccagattgtctaatgaggggtgaaccggctcaagtcagaaactcccattaaaacaggttaaaactcccgtgctgatcaggagtgggattgcacctgtgaatagccaccacacttcagcctgggcaacatagtgaaaccccatctgtaaaaatcataaaaagtaaatgactctgtagggattattaattatataatttttaaatttgattatgaaaattttcagtaacatgaaaaataaggaatccacatattttacatttgcttttttatcctttctttttcttcttctttgttgtatttaaagtgaatcccagatagcatatcatttcaccagtacatactttagtgtaaatctcctcaaaacgtggcatttccttccataaccacagtgccattatcacacctcatctgttccttacttggagggaggttcttgttggattgaagcatgtagtttggggctagctctgctcatggctctggaggagcgcacctgcagcaccggagaggcacgtgttcctgctgagggcttcctttgtcggcatagtcagaaaggaaaggatgtataaagggaactttaaaacagtagtataacgctttgctttctcagctaaaaacaccacagtttgtttgtttgtttgtttgtttgtttgtttgtttgagacagagtctcgctctgttgcccaggctagagtgcagtggcgtgatctcagctcactgcaacctccatctcctgggttcaagtgattctcctacctcagcctcctgagtagctgggattacaggcacgcaccaccatacctggctaatttttgtatttttagtagagacagggtttcaccatattggccaggctggtcttgaactcctgacttcaggtgatctgcccacctaggcctcccaaaactgcacctggcccacagatttataatgaaaagtaatttacaggttgggcacagtggctcatgcctgtaatcccagcactttgggaggccgaggcgggggaatcacaaggtcaggagatcgagaccatcttggctaacacggtgaaactctgtctctactaaagatacaaaaaattagcagggtgtggtggcatgtgcctgtagtcccagctactcaggaggctgaggcaagagaatcgcttgaacccaggaggcggaagttgcagtgagccaagatcgcgccactgcattccagcctgggtgacagagcaagactccgtctcaaaaaaaaaataataataatttaccgatatttggtgtataaatatcaactaacacatagaagaggtctgttctttgatagaaaaaagtcaaacttcccaaaagcaaaaagtcacaattcattatttgcaaggagctttctatttgccctaagaaaacattttcctctgctgtccctttaaggctggctgtaagcagaattcagcctcaacaactgccctcccagagcagctctcactcctacacagggcacagagcagctttctcttcctccctaagcagttctcacctcctcccagagcaactctctccctccacccacccagagcagctctcacttcctcaaagagcagctctcacctccttccaggagcctgctggttttgaatcctgatgcacctggtcttttaagattgtgattataggcactgcatagattttagtttccctgcaaagacttaaaagtcactgtgctcaatacaagaaaagaacatggtaatctctctcatgtaagctcttgtactagagtttctttttttttttttttttttttttttttttgagacggagtcttgctctgttgcccaggctggagtgcagtggtgcgatctcggctcactgcaagctccgcctcctgggttcatgccattctcctgcctcagcctcccgagtagctgggactacaggcgcccgccaccatgcccggctaattttttgtattttttgtagaggcggggtttcactgtgttagccaggatggtctcgatctcctgacctcgtgatctgcccgcctcagcctcccaaagtgctgggattacaggcgtgagccaccgtgtccggcctagagtgtttcttttttaaaaaaaaataaatctgacctggcgcggtggctcacacctctaattccagcactttgggagaccgaggcgggaggatcactggagtccaggagttcaagaccagcaacatgacaaaaccctgtctctacaaaaaatacaaaaattatccgggtgtgggggcacacatatagtctcagctactggggaggctgaggtgggaggactgcttgagcccaggaggttgagaccacagtgagccatgattgtgtcactgcactccagcctggatgacagagtgagtccctgtctcaaaaaaaaaaaaaaaaaaaaaaaatccacaaacctactaaagtaaaatctcaatggtcagcttctacactggaaacccttactggtgactggtgagtgtgctgtaagtaggttaaagggctggtaagagtggagctgctgctcatagctcctgaggactcaactttgcaatgagatttagtctaagccaacgcaaagagtgatcctttttcttctttcccatcagatctgcccatgactttttagtagtgtgaataccacacaagggaggcccatctttattttaagccctgaactaaacatatataggaatggttcttgtcaaaatcagcaaggagcacaggaatcacagttaggagaatgaattgctcaggaaagaagttgggagacagcctcccacccttcagggctatctttatccaatgattggtactggttcgtttttagttatttctttttgcgtgtatttgagaaattctgttgagcactttgtggaataaaatatgtttctttagcagaaacaggtgcagctactatgtttgtactttttcattttgtcagtgttttggttgattgacatgacagttaagatgtctagaaattaaatcgccctttgttatctctggactcaggcgatgaatcaccaaatagagcactcagtattgatgaattataaaatacgctaaataaaaatctttcttgagatttgccttgaataagcaaggcgcagtggctcatgcctgtaatctcagcactttgggaggctgagggggtggatcacctgaggtcaggagttcaagaccagcccagccaacgtggtgaaaccccgtatctattaaaatacaaaattacccaggcacgatggtgcacggctgtaatcccagctagtcgggaggctgaggtaggagaattgcttgaacccgaaggcagaggttacagtgagccgagatcacaccactgcactccagcccaggtgacaagagtgaaactctatctaaaaaaaatattaggttaagaataaaagatgagaggaatttattaatatacactggctcttgtcacatataccttcttaaagtcagttttttgttaatgcaacgttagattttcttcatatatctttatcaataccacagcatgatgatggccttggttttgacacagggatcttgcctaaatgccagcgtttagccagatggtgaactacaaaattgatcttcctggggttccacatggcactgctgctctacagcccctgaccttggcattgaatatgtccttatatgtgttaggaggggtgagatgtattgtttcacatgtgttcaccaccaggacaaaggctcgctccttctggtcaggcctctctgggccctcttctcagctggacctcaatcttggcctctaaatactgcagactctcggacataaattatttcatccacaccatcttcccttcccacacacacaccctggagcaaacactggcaccgtttctaacaactcaaggctgtgtcccgaggatgactgctccagctctcttacgttcctgcctgagagcctgccaagagaatcaactgtttgatagggcccatctcccaggctttgtgagagagtaggggcctaattttgttaagctccagttagtaaagccagagagcctaatcgcgttgacagcccccttcctgcttttcagttatttctgcttccctgaatactgcctatgcctccctcctcctccctcattctccctactgcagcagttattatggattaaattttgtccttcctgtattaactcaggtccagcttggcttgtctttggcaccggtcacaagtgctgttgggtctgcttgcaccactattccccagctgccactggtagcacagatcagcaaatcctttcctctcagctcatttgttgagaagtttatcagtagccatgggaagaaattactattttcatcatgtttagaaatatatttcagtgtgttttgaagagttgtaaaattttgaaatgggaaaggatttcaggctgacacttgggaggcagaatgatgaaccttactatggcactaggactcaaagtaggatgagccccactagctgacccccaggcccgattctttgcagaggataggatgttcccccaacaggctctgactacacaccaacaggccaagcagattccagcatcactcgcggtcttctgatcaaagtacacatgcaccttcccaggcctcttggtgagtggccaccctgggcagttatgccttacttcaaagagccgatatagggctatattcctgaagtgtgcctttcttcctcattcaatgtatatttaaatgtatttttaatggtatattcacatggtataaaatactaaatgttccacaggacatttgatgaagaggcccctccttctatccccaagctgaccagaggtaatgtgttttcagttacttgtgtaccgttctggagatactccaattaaatggttggttttttttttttttaatggagttttgctcttgtcccccaggctcctagagtgcaatggcgctatctctgctcactgcaacctccacctcctgggctcaagcaattcttctgcctcagcctcccaaccaagtagttgggattacaggcatccaccaccatcctcggcttgtttgtttgtttgttttttgagatggagtctcactctgtcaccagactggaatgcagtggcgcaatcttggctcactgcaacctccgcctcctgggttcaagcgattcttctgcctcagcctcccaaatagctgggactacaggcgtgcaccaccaagcccagctaacttttgtatttttagtagagactggttttcaccgtgttggtcaggatggtctcgatctcctgaccttgtgatctgcccgcctcggcctcccaaagtgctgggattatagacgtgagccaccgcacccagccaatttttgcatttttagtagagatggggtttcaccatgttgaccgggctggttttgaactcctgacctcaaatgatctgcccgtcttggcctcccaaagtcctgggattacaggcatgagctaccatgcctggccgtaaatgcatttttatattggttctgtagtcagactattctctactcctagaaattgatatatgggtatgtcttagaagggtgaataaacttaaaaatggagcctgaaagatttggagaagaatattctggtaataggaatcatttaacattaaatttgaggcctgaggcagaatatcttcttctccgaaaatctttagacataggagagtctctcatcttaataggttagtttacaagtggtcttttcttcagtgaagagatgagatggcttccaaattacatgtttagcctgaagatacagatttaggagtgattgttatagtcaactgtgaaattacatttcatcttttaaaaaaaaaaacaggaaatattctgttaatcaattgagcagttctgtcatttacaactgtctgatttcagtgactgtttatttagttgcaaaatattcaagtctggccttgaagcacatctgaaggccagtattctgaaacccaacagggaggtcttaaaaaattttttggccgggtgcggtggctcacgcctgtaatcccagcactttggggggccagggtgggcggatcacaaggtcaggagattgagaccatcctggctaacacggtgaaaccccgtctctactaaaaaatacaaaaaattagcctggcgtggtggcgcaagcctgtagtcccagctactcgggaggctgaggcaggagaatggcatgaacctgggaggcagaggttgcagtgagccaagattgcaccactgtactccagcctgggcgacagagcaagactctgtctcaaaaaaaaaaaaaaaaaaaaaaaaaaattttttttttttttttttttaacttttgccgcatctcagaacaaaaagagttccttccaaagaaaaggaggggcatcatggctattttttcatttctctatctgcagctacacatgcgtgccaccagaggtgctaaggttactaggagggatttgcaatcagttttttaatgtattcccccagccttcagtcataaaagcaaataagtgggaaaaagtcacctccttcaggaactagttccaatactacaaattaaactcttacaaaagagtgaacatttttggaagcatgtattattgaagttgacatttcccaacatggttttattcaacaatttagatgtgtagggtccaaagacaaaggtactgatgagatactgtggcttccaaaatagaaatcttttgaatgattttatatcctgtcttctcctcctttggttgtggcttggtttattttaaactattgataataattgtgtttatttttaaataattgcacctaaaaatagtttagaatggagtacattgaaataaagagattatatgtggatatcattattgcattgctttgtgtgtatgtgtgtgtgtcagagtctcgctcagtcacccagggtggagtgcattggagcaatcatggctcactgcagcctccaactcctgggctccagtgatcctcccgcctcagcctccccaggagctaggactacaggtgctcaccaccatggcctgatacatctttttgttttttttagaggacagggtctcaccttgttgaccaggctggtttcaaactcctggcttcaagtgatcctcccatctcaggttctcaaagtgctgggattacaggtgtgagccgtggtgcctggccgtgttgctattagaaactgccctgcagtgagtatatacaaggctgcaaagtaaaccaaacccagcgaggcagccattgaattagtatgacttgacctgtatgtgtctactgcttatttggtcctggtatatgcattacagagggagcattggccctgcccatacctgaagcctacagttcgtcacaggaaacagcaggaaaatatgggacagaaatgtacatgattcatccttgaaagtgtttttggggggtagttttatgggaggatttgagaattggtttataaagaagaatggaaggagattgctccttcatttgtaggaaaacttgggcaaagatttggacagaaatgtatttatattcattgagtcactgagtgaatgagaacctgggagtgcagacctgcccttgagatgcttttggtttactgggagacaggcacgcaaaaccagaaccaagttcagaatgctgtgggggccgtggttagagcaagattaattctgtgtggtggggcccagaagccttcacacatgatgtctgagcacctgccatgaaccagctgatgtactagacattggagataaagcacaagcctcagtccttgcttgatggggtctggttgtgtgtgtgttgctcaggaaaggatgcagtcatgcgtttcatcttagacatgttgacactgagggccttttgcacatcttggggagatggcaggaatgcagttggatgtgagagtctggggctcaggacagaggcctgggcagggagtcagctatgaatgggatccttgaggctacaggcatgattgtggtttcctagagagaagagggcctagagccaagcctggggagcactagcacggagaattctacaaacaggagcaccagcccacttagaacacattcattacttgaccaacattagggagcagaagcagcagagattgatgcacttgccatatgtgtattcgttattattaggctctcaatcttgttcttctgaagtcctttgctcacataagctttatcccattaaaagtgattaggcatgaaaagaacttgtaatggaagagatttttaaaaatctgattttatgttgtatcactgttcttcagtaatctgtgacatacttgttccaaaacagagtaacttcttccatcattgcttgataattaaactgtcagtgctgcgtttcccattttttccaatcttaatagtgtttttgtcttcctatgggaactgtagttgtaattcattaatggtagtggatttggggcctgccctttttgttctgtttttctttagtgtgatactaaactctgataacttaatcagtccttattcaggaattatatgtatgttctttcatctgtcctttcttctctaaaatggaaaaatgagtattaattcaaaagacctttcaatgcagagtcatttcctcccttttgcaaatactcctgtgtgttgtacatcatgacagggcctagggaggtactgttgagcaaagctgatgtggttcaggtctcagcttgggctgctataataaaataccacagaccaaggggcttaaacaacagacattgagttctcacaattctggaggctggccagcctcagatcaaagtgccagccaatttggttcctggtggaggctgactcctggcttgcgttctccctgggtcctcacatggcctttcctcagtgcttgggtgtagcgagagtgcttgcaagctggggtctctcatactcttcttatatgggcgctaatcctatcgtgggcgccccaccctcacgaccttgtctaaactgaatcatcccccaaagaccttacctccaaataccatcaacataaattggggaggcggggagctcataaacattcagtccataatagtccatcgcctcaaaagtttatagtgtaactaggggtcagacagaaatcacacaatcccacagtaaagggatgagaatagtgataagtgtggcaatgggtacagcttagttaaagttataagaagtcatgtttcatatttattgttattgaaaattgctcaccaagtacattaaacatctgcctcttccaggatttcagcaggtccgtgacccatgctccggtgtcttgaccctacgcctgtgtcacatgaaggctttgtagacatgctatcagatagtaattttttttttgacagctaaaatttcacctttttctaaaatgaatttcatggtgttcctagtagttatgtctttcctgaaaacagcatatagtaatgaattaattgctgcgtctggaggcaaattgttttagccttttttagtattcattcattaaaatatagatcatatttaaaggaatatttgatgaacaatttattctaaaataactgaattctgtgaactttctgcaggcagtctcttagtcatcagtatttatatcctaaaattgccttttgcttgtcactgactttagtgcattcgtttagcaataaatatttactgagtgcctgcattgtacacaaagctctgttaggtgccacatagctatggactgtctctcccccaaggagcttcacattaaaatctcaagcaaaaagaagcaaaaattgaaaaagccttaaccagctctccctttgggtaaattctagcctttctagtcagacagccttggcttgatcacttaatgcctttgtcagcttacttggcctctcttaagttgctcgtgtgtttgtaaattggagataacttgcatgattgttgcaatgagatgctgacggatagacagatcccattagacacaaaagatgtaaagtttttaatggcaaccaatgcagaaactgcagagaccatcacacaaagcagaacataatgcaatgtgatgcacctcggtggaggtcctgctgcccaggacccaagattcctctcaggatgtcccactggtggcaccactagtgttgttggttggttggtggcggcaggggggatgttcagcagctgtgaggtgctcctttgctgctgtcatggaggggcgcattcagccttcctctatccagattgttctttagctctggccatgtacctgtctgtattacccagcatgctcctgagtatgtgctctgagatgggtgaggccaaggaaggtgtctgaggagcagccctcagcacactgtggtagcaaaagcccacctgggccacaccagcaaaactagcgcctaactcatggttttgacaattaatgaggtagagctttcagcatagtgtttagtgcaaagtaagtacttaatattttaataccatgactacatccttaaattaattataaattaatacattaatactattattattctcagtgaagtaaaacattcaacattggaaataaaacattgtttcaggagcatcttcttttccaaatatggttatataacatgcttacataacccaatgtattttctctttggtcaaacataaacctaagctttttcttctaaatttgagaaaataataacaacaaatctctgctgcttcttcgttttccagaaaagtaaatgaatattttcctaactcctctcctccaatcaaaaatacaaagcaaaacccctgcaaatagtataacagagattttgctggtattatttgaaaacgttcatgcaatataatatactcattctgctgttagtcacatttcagtattaaaggactcaaattgttgcaggaatagccagcagaggttctacttaacattttgtgtcactgtgctgttgttacttaactagctatttttagttctaaatgtatattgtcttcctaaaacaaatcgaggcaacaaggtgtgccagaaactggcccttgctgccacttggtcagaggtccccatcctggattgcaggtgctgtttggcacggccgatgggcaggtgattgtcatggattgccacggcagaatgctggcccacgtcctcttgcacgagtcagacggtgtcctcggcatgtcctggaactacccgatcttcctggtggaggacagcagcgagagcgacacggactcagatgactacgcccctccccaaggtactcattggccctactttccttgtcactgaccagaaggacaaggaagggcatcggagcagagtagactgatgtggaggagggagggtgaagggccgccacacctacggcacccgggcttcctgggaagagttatcaagctgaaatgcaaggtagggctggcctcatctagatgtgactgtctccccgctgttgtcccttttctcagaatcactggtcgaattgattacacttaattcgcttagcttttcctagatataaagtgagacacatggctcttcctgtgtccctgaggtattgtggggcttagctgcttagtgacaataaagaaagctaaagatgaaaaatgctgtgctattattataacttaatatgtgatatatccaaatccccaatgttattaaagcccgcggctttaggtgcatgagaaaaggatttgttttgccataatgaaggccagcaccttgggcagataactctacatttctgtctgtcctctttatttcaggcagaagctctcctcctcctcaggtctaaaagacctactgcctctctgtatactccagttggtgttgagtactcttggtggggatgacctcaaattccagccaccttaacctctagcaggtccccagaatcagtgtgcagcactggcccactcagttggctcttcaccagcatcccatcccctgcacccatctcttttaaaaaaattgagatacaataattgtacatattcatgagctacattgtgatatttcgatacacataatgtatagtgatcagatcattttagttaacatattcatcatctcaaacatttatcatttctttgtgttgggaacgttcaatatcctcgttctaggtatttgaaactatataatatgataatatgttattgttaacatgtcatcctccatggtatggaacactagaatttagccttcctgcctagctgtaaccatctcgttttggggaatgggactggcttcttgattagaagtggtcacactgccgcaggcttctatccttagcctagcacagctgtgcttacactgctgtgtgcccttcatagtcaaagggcacagtgggtgctttctaacctttcctgccattgtggggcatgtcgtcctgtgaagggctgttccgggggaaattagagaaattgtctgcctccgttagaacctgcaatattctcgtgttgtgttgtcttctctttcctgtcacagtgtgttatgcttcccagcagcagacacgtatgtgtgtacacacatactcattcatttattcattttaggagaaggcattcacacatgaaaaacaattgagattaatggtagtgttttaggaccagtggcttgggggctttttatgggtattcctagcacccataaagcaatttaggaattaaccatcccctttcctaataggataccagccttgagagaagtgttggtcatatttctacagcctcataatagtaaagtcagtgtcttcatcacatggactcagcatactcttagaactcctctttagtgggtcaaatctagatttacttgcccccattttattattgaaaaaaaaaaaagaaaacaagggactgggcacggtggctcaggcctgtaatcctagcactttgggaggccgaggcgggtggatcatgaggtcaggagatcgagaccatcctggctaacacgctgaaatcccgtctctactaaaaatacaaaagaaaaaaaaaattagccaagcatggtggtgggcacctgtaatcccagctactccggaggctgaggcaggagaatggcttgaacccgggaggcggagcctgcagtgagccaagatcgcgccactgcattccagcctgggcaacagagcaagtctccgtttcaaaaaaagaaaaaggaaaaaacagaaaagaaaagaaaggaaaaaaaaacaggactcagagaccaagtttataaagcaagtccagagtaaatccaagaacagaattcagtccctggttgctcctccaggcagttgcccttctcagaagcagggggggcagtttagaggatgacaggtgttcacctttcacgtgcaacagggttcttcttagtggcctagggaatttgagtgtggaggtcggtatagtgcagtgtcatgatgtaaagcaaagcaataactgggcttcctctgcagacaactggcaggtaggcccacctcgatggctgctaagatgagcccagtgtggctgtgaagcctacaggagccttctgaaaacgttgctctatctaggcatctaggaagggcttacttttgctttttcaaacaccctgtgaaagaccaagtccatggtccatcatggccccttccttaatgtctgcatgaggctccagagcagggttttccttatgccggctgtgctccgcaggtgcagcaagcctctatgagccacatttagcccaaccttctctccaaatctgggctggcctctgtggctgcttatttcctgtaacattcaatgaaagaggatttagaaagaggatttggaacttgaaaagcaacttttttctctcttagaccagaattaagaaaatgtttttatccctcctcctaccatccttggatgttgtatgacattaaaataatttatgtctatatgtcattagaaccgtgtaacacattaacatcaagttagtaaactttcacacatattctcaccactcaccaattgcccccagggctatgtccctagtgtcctgcttcttactcacaaattctctgttagtgcccactgatggcccttgtgtagttcctgaatgatatagaatgtttcattcaggtagcatcccaatccagagtaggatctgcattgtcaggcaatttctaaggcaccatgcaagatttcagctttgggaacctggatttgggtggtgtgcttccctccttttcacttggcacttgtgttcctgcagatggtccggcagcatatcccatcccagtgcagaacatcaagcctctgctcaccgtcagcttcacctcgggagacatcagcttaatgaacaactacgatgacttgtctcccacggtcatccgctcagggctgaaaggtacagaatgctgcacacaccccaaacctgcagaccgggcctgtgtgtgcttgcctcaaggccggtcttgtacactctgtgcttactgattcctgtcctctgtggtgacaccttctgggcttcatggagtctgttaactaaagccactccctcttcactcctttgcttatctgataagtccatacctagtcttatctcaaagggagattcctgacattcagtctttgtcttagcctgctcttttcctcactatgacaagaatgatcctctctcaggtgtacaggtatgtttgcatctggcttacgcatgtctgcacaataaacggactgcagcacctgccatccctaaggcagcagatggtgcacaagacatcatttacacagaagcccctgtaattttaagaatctgacagtcttattaaggaactgatcatcactgtgcgataaagttaccttgaaagacttgtggaggttctgcaattactagactgaggcattgttgtgaagggcagcagtcaagtgctgataccttcctgatagatattatgagtgttgttatctcaaaagaaaatcagtgggcataggcatttggagtgttgtgaattttgcagttcaagagtactgttgatgttgttgaccccattgatgtgagttctatggaaaaacaatctgtctcttcagggttgaatggtacaaggtaaaaaggttttaaaattcaatacctgggctgcctctgacccttgatgtttaagggacctcctgtaatctgaatgaggatataggagacaagccaggaactttggtgtaactcgctgctgtcattcaaaactggccattggtctagggagtcattaccgtgcgctactgctgcttgcctgaattattcagcagtcacagggatgtaaagaatcaagtctaggctgggtgcggtggctcatgcctgtaatcccggcactttgggaggccaaggcaggtggatcacaaggtcagcagttcgagaccagcctggcaaacatggtgaaaccccatctctactaaaaatacaaaaattagctaaacacaaaaaattagccgggcgtggtggcgggcgcctgtagtcccagctactcgggaggctgaggcaggagaatggcatgaacccgagaggcagagcttgcagtaagccgagatcacgccactgcactccagcctgggtgacagagcgagactctgtctcacaaaaaaaaaaaaaaaaaaaaaaaagccgggcacggtagctcacgcctgtaatcccagcactttgggaggccgaggcgggcagatcacgaggtcaggagttcaagatcagcctggccaacatcgtgaaacctcgtctgtattaaaaatacacaaattagctgggcgtggtagcaggtgcctgtaatcccagctactcgggaggctgaggcaggagaattgcttgaacctgggaggcggaggttacagtgagctgagatcaagccactgcactctagcctggatgacagagcaggactctgtctcggaaaaaaaaaaaaaaaagccaggtgtggtggcgtgtgcctatagtcccagctacttgggaggctgaggcaggagaatcgcttgaacctgggaggcggaggttgcagtgagccaagaccgcaccactgcattccggcctgggcaacagagggagactccgtctcaaaaaaaaaaagaatcaagtctatatacttaactgttggttggcaagaatcatacctgcctctgcaccgcccccccccaagtaattactctatttttaaactatagaatatttttagaaacatattacataccctcttttgggcatcccaatctactgtctcaggactgtaattataaggaattacttaggctgtaaagtcctgagggacatgaatgacgttgaagtcctttttatcacacataggccctggtaggagttgagtacatattttttgtggtgatgatgaacttaaattcctgtgcttgtctgtaaatttttttctgaatgttctgtctttcatggagctaaaacacaggatgatcaacattaattcctaatgtatttataatccatgcttaacttttttcttcaaaattctatttttaaacctttaaaccaagtttattaattttttgagaacctgcctctagttcaggaatccagaacttggtttctctaccaaatatctggtgaaggctgaacataatataattaccactcagttcctttttattctttacgggggaatttttccagttttttaccaccctgcttatggaaactttattttttatgccttgaatatgcccaaggtattggagcaacagttctctcttttttttttttttgagatggagttttgctcttgttgcccaggctggagtgcggtggcacgatcttggctcactgagtcttctgcctcccagtttcaagtgattctcctgtctcagcctccctagtagctgggattacaggcgcatgccaccacgcctggctaattttggtatttttggtagagatggggtttcatcgtattggtcaggctggtctcgaacttctgacctcaggtgatccacccgcctgggcctcccgaagtgctgggattacaggcgtgagccaccatacccatcctggagcagcacttctaacgttttgcaaccatatgtgcaatataggtagaaggatatgttaggtaagttggggaggtgacccaaagtagccctcccaaatgtgaaatttttttccttgagttttcttctaaaaatacaggcaaatttaacattttttttttttttttttttttttttttttgagacggagtctcgctctgttgcccaggccggactgcggactgcaatggcgcaatctcggctcactgcaagctccgcttcctgggttcacgccattctcctgcctcagcctcccgagtagctgggactacaggcgcccgccaccgcgcccggctaattttttgtatttttagtagagacggggtttcaccttgttagccaggatggtctcgatctcctgacctcgtgatccacccgcctcggcctcccaaagtgctgggattacaggcgtgagccaccgcgcccggccaaatttaacattttaattattacctaactagatatctaaatctaacctaaaaatgttttcagttatttacaggatgctttcagcggggtacggtggctcacgcctgtaatcccagcactttgggaggctgaggcaggtgaatcacctgaggtcaggagttcgagaccagcctggccaacatggccaaaccttgtctctactgaaagtacaaaaattagccaggcgtggtggtgcatgcctgtaatcccagctacttgggaggctgaggcaggagaatcacttgaacccgggaggcagaggttgcaatgagctgagattgcgccattgcactctagcctgggtaacagagcaagactccgtctcaaaaaaaaaaaaaaaattatttgcaggatgcttttgttctgtgtcttcctagtttcagaaagttagattaaatcgaaatgagctggtgccatcaagtaggtgctgtaaggacagagaaaaagcttcccttctgtcctctctgaaggttccctgaaatgactgacagtagacagattaacaggagaaaaggcatagaaatgtattaatgtgaataagcataggacccacataaaataagagactcaaagaaaggccacatggttgaagtttttataccctttccatggaaaggagggaaatggggaggtgggtaggcaatcatgattagtagtaagtgatttctaggggaaatgaatggatccaggaggtagacgttaccttgttaataattcttaggaactgaacaggacttgtaagttatgggaaggtgaggggtagaactcttactgtgaccaaaggtttcgacaacttttattctcttctctggtggttaagtctttcctggttatttggggaaagcaggagatcagaaagtccctggctctgaagcagcttctaaggcatgcttgtccagcttgcagcctgtgggccacatgcagcccaggacagctttgaatgtggcccaacacaaatttgtaaactttctgaaaacattatgagattttttgtttgtttaagctcatcagctcttgttagtattcatgtatttatgtggcccaagacaattcttcttcttccagtgtggcccaaggaagccaaaagattggacacctctgttctaaggccttccagttgtctttaattcaaaatgctcaggccgggcacgatggctcacgcctgtaatcccagcactttgggaggctgcggtgggtgtatcacaaggtcaggagttcgagactagcctggccaatatggtgaaacctcatctctactaaaaaacaacaaaaattagccaggcatggtggcgtgtgcgtgtaatcccagctacgtgggaggccgaggtgggagaattgcttgaacctgggaggtggaggttacagtgagctgagatcacgccactgcactccagcctgggcgacagagcaagactccatctcaaaaaaaaaaaaaaaaatgttcagtgtaccaaaacaccatacttgggatctcgttctctgtgccccgacagtgctatatgtaggcaatttaccttttctctcttgggatcagaatgttttaaggacttagcctttacatgtggtatgaatagcaatcatttttgttttgtaacttatttttttatccactatcttacgggctatgttggtaaatactgggatgagacaaccagaatactgttggagacggcacatggcaatgtttttagcctggggtcatctgttctattacagacaggtcagccacttgtctcatagaggaaattaaaaaggtctccgatccacttggtttttctctattactgtctcagaggaacatcactaaagaactttggcagcgaaggaaggtaactcgcactattgttttagtgtatcaccagcactggaatttacgacctgtgcaaaagaacctagaattccacatagctcttggtccctgcccaggcctcttctgcatcagccagcacacttcattttcactgcagatgtgtctgtgggctcaaaggccgggttctggggagggttaggctctgattttgcttggccgtggtttgctgaggaagttctgccttcttcagattctcttccttcagaacagggacttctcttcatcacgcaataagcagggaattgattcactttgcttggggtttttacccattgttatgacttctactcttttcctgagtagaaataattcaatcaggagttcaggaattttctgcccaagccagttcatccctcagtggcaaagcagactcccagaggcactcatttcatcccacacttgccttgaaattaaaagctccaacccctgagctttgtttgtgttttttgttttgcagaattttctctttttgtcatttcattaagcacactgaaaaaatgaggagggaatttttgaggcaggtggtttcagtcattgatgccatctgctcctgtgggcagacctgataagatttgcccacgtcgtcctcattgagtacgtgcccctttttttcagtccttgcagtgaaacatacttcttaaaggaaaaaaaaatgtacctgttattttatcatcacacactttgctaattaattagttgctctttcctccaccccccactgctccacatgcacgtgtgtatgcacatacacaacatgcatgtctaatgactaataaagaggtgaatcatgcacatggtaatctaagggacaaagaactggataacttcagactccaaacagtagctgcaatatatatggtgcttgataagcactcctttctttttctgttaaaatttagctgcctctttttgacccagtaataccacacaaagggcttcttgttaatacaaaagaactaaattttcactgacttcatataaccttccagacttttaccaaaaaggatccataagattttctggctaaaagagaatagtgtaggtgtgctgaatttttttgtgtaaaacatatcagagaccgaaaacccacaccccccaaaatcattgagaagaaacatagatgcttccagagtacggacctcttgtgtgctctagaactccccattgcctgtgagggtgagattagagactctgggccacgagctttaggaaaagggaaaagaggcctactgagtagagcattagtttgttccttttaggttgtattctgaaacaaatttaaaaataggagattcaaacaaaattattactcaagtcttgggcaaagatactggggattattttttaaataagacagacatcatttacaaaaagtttctgaaacaaaaaagttctgtcctgactatatctaggcttctgtatccttctcttctttatcataatgacatgtagaaattgaatgagtattttcttttactttgattttcccactaatttctgaaaattttaaactcttgccctaggaattcaactcctgcagaaaactcacatactcctggctgacactgaacaattcagggttattctttcttagtcccactgctgaattcttcatgctagtactttatgagatagcctgtgtccctggtcgcggctgtgcctgtcatgtggctcaggactgctttatgctaaatcatcagaggcactcacatacgttgctatatcgcttgatgcatgtagctccataatcgttggaacaagaaatggcattatttacatggaatttaatcttttttgaaagagtgattcgcctttgcagatgacagtcatctcattataactttgcacctgcattagaagaagtcctggccgggcgcggtggctcacgcctgtaatctcagcactttgtgaggccgaggcgggtggatcacatgaggtcgggaagttgagaccagcctgaccaacatggagaaaacccgtctctactgaaaatacaaaattagctgggcatggtggcgcatgcctgtaatcccagctactcaggaagctgaggcaggagaatcgcttgaacccaggaggcggaggttgcagtgagccgagatcgcgccattgtactccagcctgggcaacaagagtgaaactctgtctcaaaaaaaaaaaaagaagtccctgagagtttgcttgtaaacatttggattcattcttgcctcagatagatagcccatctcgtagacagagcctgggagtgccccaggttgcttgctgagtccctgagcagtttccgaaagcatcataggtcagctctgcaggggcaacaacccacttttctgttggggaaagccaccttgcaatacaattcaaaaaaatattattttaaaaataaatacaagaatggtgcagttcaggtgaggagctgtggaaatttcatgtcgtcatctttatttctacaatattacaatgatgcttctgtcctaagaagcttgagacaccgtcatctttgttactactatgactgtttatgttagtgcctcaccttttggtttccttgtgtgcccaaagctgctctccagagaacgtcatctcagtttcctgatcacaagcaggcttttccctgagatagatccaggcattgaatgcccagagcacatttagtatgtgcacgaatcctctagcttcccctcgcatttgtaaaagaatctgattcaccaggatgtttttggttcttttatgtaatttttcatttcctgattgtggcaggtttttttccattttctattcatctgtaactgctttggctcagccctttgtctccctactttctgccctgcagctaacttcatgagaaagtcccgtgttccctgggtctggaaacctgtcttgtcccaggagacacactctagttttcaagagacgtgaaagagcttcagcaacctcagaatgttctggtggcagcatcaaaatcatgaccatgcatgaataaggggtattgtcatgtgtgtgctgatagagcccggggaccactgaattctagccccatctctgaaatatgtgcccatcagggcagagcattttcttttaagttccgcccagcttctctgcaaagtgggccactttagttctagatttcagagatctctgtataaaccagattacgattttagggtcttgaaggagaaaaaaaaaatgtcataaatcttattaatactaatggcttttgttttaccagcaagaaataagtaaattgctctcattgggataagataaaccttttaataaccatttcttataggcactgagtagtttgtaggtgggcatcgaatttccaatgtggaaattatgctgaaaaaactgtctcccagcaggggtatttattttcttttctaagccccacaacatcatcaaatgacaagagtcagcattctcatatgcatgtgtgtcctttgtatgaaccttatctgcccagtagtgcccagaaatcaaatgaatataaactaagactttgttttcgatgtgctttttacttttggcatttataaactctctgagtcatccctgggagtggaggccacagcagtgggaccagtacttatatgaatatacagtcataggttttattgtcttgctgtctcttaaaaaaaaaaaaaaggaagttctacaagtctcatggaaatactggaattggagatacatatttaacatgctaactttattagatcatgatttctacctaatttggttgtgtttcagtaaactacaatccccagtcatgtgacaaacacctgtttttaatagaatccatcatcttcagagaaattggttgtattcatgagctaaaacatgaatatatgggctgggtgcagtggctcacgcctgtaatcccagcactttgggaggccaaggcgggcagatcacctgaggtcgggagttcgagaccagcctgaccaacatggagaaatcccatctctactacaaatacgaaattagctgggtgtggtggcacgcgcccgtagtcccagctactcgggaggctgaggcaggagaatcgcttgaacccaggaggcggaggttgcagtgagccgagatcacgccattgcactccagcctgggcaagaggagtgaaactccgtctcaaaaaaaaaaaaaaaggaaaaaaccatgaatatatttttgttgtatttgctcagtgtctgtattttttaaactactgaagacagtaggcttgctgagtggcagtttgaggagggctgtgtccttgtgctgaccctctctcctctgtttcagaggtggtagcccagtggtgcacacagggggacttgctggcagtcgctgggatggaacggcagacccagcttggtgagcttcccaatggtccccttctgaagagtgccatggtcaagttctacaatgttcgtggggagcacatcttcacactggacactctcgtgcaggtaaggatgttctctggaaacaagtacattttcagcagtatactagtgaataggttattataattattgttgacaaattttattttaatctttttttaccttaggttgtggtgggtaaaccaggagaaataagggagaaagcagtttttgccttttaaccagaatgctttattctatttcccagtcaaatgagcacatagtgaataagcagagtaagctggtgtttatcatcagtctgaagcagaaatcagaaaattgcagaagtgaatgctgaatcttcacttattcacttgtaggagaggaagagtaattttcttctctactcttagtgagttcttagcaggactccccattgcaaaagacagattaacaagagaaaaacaaacagaagtttaataacttgtgtatctcctgcatacgtgggagttaacccaaagaaatgagtaagtctctagagtagctcaaaacattctcttagactacaggcttaaatgcttcacggaaacagagaaagaagggtgatattcattctgcagatttaagccaatgtcttttcttttttttttaagtctccagaagtccagtcatccttctcttcttggtgcagagagagagagacccttacatatgtagattttcttttctttttttctttcttttttttttttttgagacgctttctcacccaggctggagtgccgtagcgcattcttggctcactgcaagctctgcctcccgggttcacaccgttctcctgcctcagcttcccgagtagctgggactacaggtgtctgccaccacgcccagctaattttttgtatttttactagagatggggtttcaccatgttagccaggatggtctcgatctcctgacctcatgatctgcccgcctcggcctcccaagatgctgggattacaggcatgagccaccatgcccagccagattttctttgtagatgtaatttctcttacaaaagggtaactcttcagagtttaccctatgtctttttttttcctttttttttttttttttttgaattggagtttcactcttgttgcccaggctggagtgcagtggcgccatctcggctcactgcaacctcctcctcccgggttcaagcaattctcctgcctcagcctcctaaatagctgggattacaggtgcccgccaccacgcccggctaatttttgtatgtttttttagtagagacgggtttttgccatgttggccaggctggtattgaactcccgacctcaggtgatccacctgcctcagcctcccaaagtgctgggattacaggcatgagccaccactcctggcctacctaccctgtgtctttaccctgtgtgtatctcaaaataaccatctcgaaattatccttacgccaaagaggcagatctgtggtggcttattctagtctcctacagtcatatttggggaagcatgtcctgaaccctgtcacactctgattttatatttgttatgccagtgatgaacctttacattttaactaaattgttgttaagcagtaattttaaaagcttaaaagtctttaagaaagtatacacagatgggccccctttctatttgtttttatttcccagaaatctttaggccaccttatgtttgagtcagttatagtggaggatgaattatcagcagcgcgtaatagacgtatgcctgggagggagttgacagtggaggtgataatgaacaagaatctgtgtcctaggaaggggaacatcacacaccagggcctgttgtagggtgggggtagcggggagggatagcatttaggagatatacctaatgtaaatgatgagtaatgggtgcagcacgccaacgtggcacatgtatacatatgtaacaaacctgcacattgtgcacatgtaccctagaacttaaagtataataaaaatatatatatatatatataaaaagaaaaaataaatggaatagacttcattaaaaaaaaaaaaagaatctgtgtcctaacattactcagctcatcagagaggcagggataccagatatggggaaatctgtaattacatgcaggcattaaatatttaaatatatattttcttcttttaattgtggtaaaacacatataacataaaatttatcgtcttaaccatttttaagtgtactgttttgtagtgctgagtgtattacattattatacaaccaatttccagcaccttttcatcttgcaaaactaaaactctttacctattaaacaactactccctgtttctccctcctcccagtccatgagaagcaccattttactatcttttctgtgagtttgactctacaaacctcatgtaagtggaattatgcaatatgttgacaaaccaaattctgtacaatatttaaagaggtttagtctgagccaaatatgagcaaccatggcctaggacacagtctcaagaggtcctgagaatatgtgatgtgccttaggtagtcaggtcacagcttggttttgtacattttagggagacagaagttacagacaaagacatacatcaatacccgtaaggcacatgttggttaagcctgtggaaagataggacatcttgaaaccaggccatacacatgtcacaggtggattcaaagattttctgattggttgaaaatctttggttggttgaaagagttaagctttgcctaaaggcttgaagtcaggagaaacaattgcttgagttaaggtaagggggttgtggaagccaacgttcttgttccccgctgcaacaccccccgccgcaagacggaggtcttgccctgtcccacaggctggagtgtagtggcgcgatctcagctcactgcaacctctgcctcccgggtttaagcagttctgctttcaccctgttgaccaggctggtctccaactcctgaccttgtgatccgccctcctcggcctcctatagtgctagaattacaggcaggagccactgcgcctggccccaaggttcttgttatgcagatgaaactacttaagtagcaggcttcagggtgaataaatggtaaatgtctcctttcagaccttaaaaggtatcagactcttggttaaatgtctcctgaatcaggaaaagacctagaaaaggaaggagattctctacaaaatgcaaatttcccaacaagagatggttttgcagggttttgccatttgcgggttttgccatttgcaggttttgccatttcaaaatatatcaacaaactatatttgggggtaaaatactttgatttccttcaacgtgatggtatgtcataatcacgttggaatttggtatcttattgctacgaagagtcagttttatcagtctttcctctattttaatgttaatgttggtcagttgtgcctaaaccccaaagggatgggggcaatttaaggaccatgcccaaacttccttcctgtcacagcctgaactagttttctagactcctttgggatccccttggccaacagcaggcccattccgtaggttgggtggcttagaattttatttttggtttacaagtgtttatttttttctgactggcttatttcacttagcataatgtccttaaggttcatccatgttgtaccatgtgtcagaattttctttctttttaaggctgaataatattttattgtatggatataccacattttgtttacccattgatggacatttgggtttcttccatctttcggctgttgtgaataattcttctgtgaacatgggtgtacagatctctttgagaccctgcttttcaagtcttctggatttgtgcccagaagtggacttgctggatcatatggtaattctatttttaattttgtgaggaactgccgtactgttttttcatagcagcttgttaacagaaagactaaactgtaaaatattttaaagaggtttattttgagccagtatgagtgatgctggcccagcaaaacagtctcaagaggtcctgagaaagtgcgcccgaagcagttgaattacagtctggttttgtacatttcagggaggcaagagttacaggcaaagacataaatcaacatgtggaaggtatacgttggctcagcttgaaaatgtggaatatcttgaaaccaggagaagtagaggagtatacaagtcaggtagattcagagattctttaatctacagttagttaaagcaacaaaatttggtctagaacttgggagtcagcagaaaggaatattttaagttaaaacgttcggaagctatgtcagagtcagccaaaattatgacccatttagtgagattgatggcctgtaggcatggctcaaggcttgccttgcatggccttaggtattgtttagaatttgttatcttattgccatcaagagccttttgtcagtcttatgatctctattttaacatttactcaggtcagttggacctaaattccagatgggagggagtataatgaggttgtgtccagcctcccttcctgtcatggctgggaattcagtttttaaggtttttctggggtttccttggccaagagagtctccattcagtcgatagggggcttaggattttatttttggtttacaagcggcaccattttacattttcactaacattacacaaggattctagtttttccacatccttgccaacattgtcatttttctgggattttttttggactaaccatcctcttggatgttaggtgatatctcattgtggttttgatttgcatttcctaaggattaataatgttgattagtgatgttgtcgtgtatcttcttttgagaaatgtgtgttcaagtcctttgcccatttttcaatcaggttatttgggtttttgtttttaagaagtaggattaaactgtgtctttgggcagtataatattttgagcaaataagcatatttgttcactcatttgttcaagcatccagccaagatattttgaggagctactgtgtggctggcactgagctctgagtgcttgtgtttcagggctgaacaaggaagacatgatccatatctcctaggagctcacagctagttaaggaagacagacaagtgatgacacagaaatgcttttgactttgaagtagaactgtttacctggtgctttgataacctggaggaaaggagtcttgcacctgctctttgtgggtatttttccacctctgcctgatcacttttcgcactctgtattcctcagacaatttcaaccagtcttacagctttaattccaatctcaatgaaggtctgaagcctaaggaaagaggcctgtatagacccacctgcttacttcacagacccattagccatctcataagcattgcacattcaacatgcccaaatctcggaacactccacctcttaaataatgctcctcttccaggttgtggtccagctgctcaagccagaagtcagcagtcagcctgtccactgaatcccagtgggtatttttacctcctagatatcttcatgtctacatccttttgtcttccttggccaccaccttagtccaagccaccctcatcttagctgcagtgtttgagccacgactttccctttcttttttttttttttttttttggacagagtttcgctcttgttgcccaagctggagtgcaatgttgcgatcagcgttcactgcaacctctgcctcccagaatcaagtgattctcctgcctcagcctcccgagtagctggtattacaggcgcgtgccaccacacccggctaattttttgtacttttttagtagagatggggttttaccatgttggccaggctggtcttgaactcctgacctcgtgatccacccgcctcagcctcccaaagtgctgggattacaggcgtgagccaccgcgccctgcctgcctttcccttttaaactgttcttcactttgcagccacagtctttgtaaaatcacaagtcagatcagtagcttcttactatccttaggataaagttaaaaaattcattgtgccttaaaaagatcaccataatctggccctccatcccctctagaattagctcttaccactccatcctcctctgaccctgccaatctggatttttctgtttctcagtttaccagatgcctcctttcttccaagctttgcaccacgcctggaacagatcttggctcatggcagtctcagtaaatactggttgaatgaatcagtgagccttaacattgtatcttactgctgcccattacttggtgagttatgttggggcagcaatcctctccagggggcaccagctgcagagagtctgtcccttgcagacccctgacccagcaacggatgaataaaagtacactgacacacagatactctgctttgccagtccagctgtgtgggagccgcttacagactccctgctgagtcgtgtaaacagttgcgactccactcgcatttattcagtaagattaattaacaaaagcttgagtcaacaccattagagggtaattgacattgtggacttccccagtaaaaagcacttaagcacctggtacatcaaaggttagtcttaagattatatgagtaaacaagctaggtaggtaaactacgctgcctttctttattactattttaatttgtttaactaaaggtaaagggatcaggccgccttcagccagataaattaccgaagttacacaaacttctcagttttccaagatttgtgtctatttctataactatctctaatatttttccaccagcctgattgaaccccagcattatgtaatttccaaggatcagataacttaaacttatttgccatttatattatctcttggtttctttagccactggcaatcgtaacataatttcttttaaaaaaattaataataaatcacttttagaaatagaatacagtttgattacagcatagtttatgtaagggacaacaacaggaagtaagactagaaaagtgtcttaggaccaaatgtgtcttagtctgtttgggctgctataagaaaataccttagactgggtgatttataaataatacaaatttaattctcacagttttggaggctgggaagtccaagatccaggcactgatagattcagcgtctggtccgctccatagatggcgccttgtgcctgtgtcctcacatggtagaatgagtaaaagcagggaggcgcctccctttaatctcttttataagggcactaatcccatcgtgagggtggaggccttatgacttaatcacttcccaaaggccccacctaataccaccaccatgggaactagattgcaacaagaatttcggagggacacacattcagaccatacatagcactgaccaagatgttaaacttcatttggccttttgttttgtatttttattttatgagcaagggagaggtgagacagggctttggggagactaaactgacgtcagtgttattatctcagtaagacggaatcaggacaaaaatccagaacggtgaaaatagagtggaagagagacacagagttcagagagattgtaagagatttggcttctggaggactgtgaggaggaggaggtcagtactagtgaaaacagaccttttttttttttttctcgagacaggatctcactctgtcattcaggctggagtgcagtggcatgatcttagctcactgcaacctccacctcctgggttcaagcgattctcccacctctgtctcccgagtagctgggactacaggtgtgtgccaccacactggctaatttttgtattttttggtagagacagcgtctcaccatgttggccaaggctggtcttgattttctgacctcaagtgatctgtctgcctcggccttccaaagtgctgggattacaggtctgagccaccacacctggccaaaagcagaccattttagttactgttgcagccacatctctaagtgtggaaggcgtttggggatgagggactagaactgaggcaagagattggggtggagatagagatttggagtcatccacatggaggccatagttggagaaatgaaatggatttaatgtcaaaggaatgaatagaacgaggggaaatgaggaaagggccaagcatagaactttgggtagtggagtgatagccttcatttaacaagcagcagaaggaaggagatggaagaggaatgtcatagagagctgttaccaggggtccttgctcccagagctcccaagatggtggtgggctgcttccagaatggcggcgggccacttccaagatggtggcaagcctcgtgttctctgacctggggttcttggcctcacggattccaaggaatggaatcttgggccatgcagtgggtgttatagctctattagaagtcgtgggtcacggaagagaaccgtggaacccagtgactagtgttcagctcgattagggtgaacacagtcacttagccgtgcaggaacaatggcaagcctttagcctgatcgggagcggcaatgggcacctcgctggatcaggaacacagcagacaccctgccagattcggagggatgggagtcagcggcgggtctgcgacggcggcaaacagcagtggtggacagcgagcgaaagctcagcttgagccttaacaaacatggaccagaagagtgcagttgcaagatttaatagagtgaaatagagtgaaaacagagctcccatacaaagaggggacccaaagggggttgccgttgccggcttgaatgcctgggtttatatcccgatccttgtccctcctgctgtgctctcaggcaagagatgattggctatttctttacctcctgtttttgcctaattagcattttaatgagctctctaattggttgggtgtgagctaagttgcaagccctctgtttaaaggtggatgcggtcaccttccaagctaggcttagggattcttagtcggcctaggaaatccagctagtcctgtctctcagaaccattaaaggaaatatgtcaaacaagagaacaacagttgaaagtagacatgaaacattggatttggaggttttaaggtcaaaaatggtctcactagaatggtgatggaagtcacatggtaaaagatttttcgttcattcagtcatctttattgagccatctgtatgccaagcattgttctaggtgctggagatacagctgtgacagccaagataaagaattggcgactaagcagctagtgaagaagttgaggcagcacatgtaaactactgttttgactgggtttgaggggaaggcagagagaggatggtaacttgaaatggagaggcatgactgtgttcatatacaattaataagtctttggggaaaaaagaagaaataagcaagaaaaagtacagcaagggacaagagcccagtgcaagttggaagatgtgggtttgagggcagtagggaggtttaatctggaagagacagaaaggaaggagagattgtagaaagagacaaaggatttttaagtacaggagggagccaaagcacacacacactacaggacaatgcctgtcttctcaataagctaaaaaggcaggatgaaaagcacaaggaagattcggcaggagtgccatggagtgccatccacttgccattccggataataaagtgagagtcagtgatgtccatgccttcactgtaatcctagagtcagtagtaccgattgcctaaaattaggaactggaaaggtgagtgtagtagcagggccaaggagtcgaaggaatctaggaaactgctaaggatactatggaattgggcagccatggcatcagtggttagatacttcatgacctgaggctaggaagtgtaaagtcataaaaagacatgttcaagaggaggtgatacaaacaaaatgggaagttgtggttggatagggactttaaatttctgttttggaagtgaagtcattctgcgttaacccaggaaagagctgaagtagaacagagttaaggccatatgtatgaggccagggcattggcaaaacaaacataaatattagagttcctgtggatttgggattgaaggaaggagagattaccttgattctgtttgtgtccccactgccagttcattgcctagaacgtagtaggtacttagtaaatctttcttcagtgggtttatggatggactggtgtcaacataggctttctttcatctttctgttgattgtttgaacctgtaggctgtgtcacatttataatcaatctgatgctggctttttataaggcttttatgattagaatatttgtgaattcaagtgctgaaacacactcagcattgtccccacttcatctgacttagggcccccttcctgctggcattgtgttccttctacagggaatgtccttcccgccgttttagctcaggaattggatcctcctcagtgccagctcagtcacgttttcttttaaagctgcctagtggattgaggctccccttctctgtaaaccctcggggtgtttaacacctctggcatgtattacacttttctgtctacttgtcttattttcctgaagacagaggcttcctttttctgaccagtgcctagactgtagtaaaggttttatggccttaaccattgcagaagttctcatcagccatcacatgaaagtaacatggatcctgaatttaaactatttgagctcaggaataagagaaaaggccctgactgatcttcctttgaagaaagatatccctacagtacctcagcatttcaataaattattgattctttttttcattgagggtccatttcaaccattgaaaaaatcgcctcaataatagaaagttaaataatgatgccattaaaaatcaagtacaatattaattatatttagcaccagtttaactcttgtctaatgattcgaaaatcacatgtgatctatgctgtgctattcaaggagtccaaaggcagggacatttttatagcaggaaggaagttaggcgatttattggactgcttataaaaagaactaaatgcaatttagattggataatgtatttccaagttaattagattgtagggtattgcgtacaaaaccattgcctgggacgaacttgcagcagcagcagcagctttaaaattgattctcctgatttacttgtaacagcaatgcttgtggctggagctcttctaaggaaatatgctctgatttattttcctttctgtcctacatgttgtaatgtaaaattctgtaatttatctcattagctgttatctgtgactctctatatattcttgcatatctgaaaatataacaggttttcagagttagcactactgactgaagtttgtaggcttcaataatttaggcccaggtttttgttttgttttatggtcttctggcattgaaggccagtggagaggtcaccctatattctgtaaggttcagttgttgatgtgatactgggtaaaaaattaagagaagagaaggtggaaaaagatgggtatgggaatttaaaaatcaaataagagattgcatgtgtgattgtggacttctgtactcttggaggcgaatcctatagcaaaaatagacttgcattctttcacttaggattaactctgcctgttctgctgaagttgcccctgttgtgcttttcccattttttcttgtaagtagatgagaaagtccttcatgggtcttgtctgcttacaaaatacaaggatggttgtgttcttttaaaactaaaatttggttgaccgaacgctgaactagcttttattactacaatttagttggtggccaaatcattataactttgtattcaaaattgtctgtggctccaaccaacgtagtttgacggtgaccgatcaccaacttggtctgtttttgtttgtttgtttttagacagagttttgctctcgttgcttaggctggtgtgcaatggcgcgatctcagctcactgcaacctctgcctcccgggttcaagtgattctcctgcctcagcctcccgagtagctgggactacaggcatgtgccaccacgcccggctaattttcttgtatttttagtagagacagcgtttcaccatgttggtcaggctggtctcaaactcctgacctcactgattctcctgcttcagcctcccaaagtgctgggattacaggagtgagccataacatgcctggccttttaaaaatttgttataaacagagtctcactgtctcccaggctggagtgcagtggcatgatcatagctcactgtagcctcaacctcctgggctcaaacgatcctcctgcctcagcctcccaagtagctaggactacaggtgtgcaccaccacacccagctaattttgaaaatttgttttgtagagacagggtcttgctatgttgcccaagctggtcttgaattccttgcctcaagcaatcttcctgcctcagcctcccaaagtgctgggattataggcatgagccattgcaccttgcccttcttctgttttaaagtgaactattttgcacatgtttgtacagacataaaacatttcatcctactaggtgcattttcttcaagacagatcccccatccttcttagggagagctacagaaagaacaaacaaagggtggagagggaggctggagagcctccgactgtcccaggaatctgcctcctcggtggccgggtagccagtcctcagcccaaggcctccctcagtcatccagaaaccctgtgctggcactgcctggttttccctgtccaggaccagtatagttggtttttgttcctcctacattttcagaagactctatccaactcactgctatatacaaaaatagtaatatagtgaggaagctttcaattccaattaaatagatttctcctctcagccaggcctctgctcaaaccacctccagggcagcctccctgctccctctcttcaaaaagacccccttgctgttgctctggctctcgctcaacactgttttttacttcacggaatttcactacctcacgttatcaggtagttcctgtcacagatactgagatacaggttgagtactccttatctgaaatgcttaggaccagaattgttgtggatttcagatttctttttaatttcagaatatttgcattgtatcaggtgagcatcccaaatctgaaaattcgaaatactccaatgaatatttcctttgagcatcttgttggcactccaaaagtcagattttggagcattttgggtttcagattttcagattaaggatacttcacctgtatttattctctccctgccacgccaggatgtaagctctacaagggcagagaatgtatttgattcattgtcagtccccttataactagcatggatctgtccatttgtatacatttagcaaatatttatctaatgactaacagctcagtagataaaaaaatgattggctggacgcatggcatgtcttgtgtactagcaggaggagaggtggcagagtaaggaacgggcaccaggccttgattgccacactccctggtgggaggtgaggcagggctggcccgcatcttttcctttccggggctcagcctcagcattgagggggagaagccagaggagaagcctgcccctccatgggccactcgcctccagcactgtggcctagagtttgtcctttccagctgagcagtggttctccctgttccaccagacccacactccctgaaatgcagctcagtttcttgcacttttgcctcagatttagacgtgtaaaatatgtgaacctccctatgcaaattaagatttgaatgtcatctgcttcacagttctagccatcagttctaaaaatagtcgttttatgggatttgagaaagagattaagaccgcaaacttacaattgagtttttccctagcagacagcagctgttcaaacacaacgtgaatctgggagctttgaagagctgtgctgttctgctgcggctcagcctagtaggcggaggttcttagggaggaggtaccttcagcatgggtgaggtctgtgggcctgcagacagtgtgttcatgttctgccatcacccatgaacctagaggacagagtgatggaaattgatgactgtgaggtggcaaaatcaggactagcgttagtgaacgccccgccccgtgtctgtggccacatgcagttagcgccatttgactcttgttcttgccaaaactacagaacatttgtagcgagggctttataggctggaataccagtaaacagccagggaaaaattaacaccagcagaaatgtgacttttaaaaagtaagatgacctgttagggactttctgtggacttacaggggtcctgagaagtcataccctgctgcctcacttctgaccaaacagtcatcacagtcattcatttccccaggtcagtgatgactcagaatcttcagacaagaggggcagttcttgttatctgtcactccttccccgtttttctagcacagccttaaaattattatggcaaaggtaccagcgtttattttgctgctttatcatcttacatggactatatgctacacaaactaaattaaattaaatcaatgtgtccgtgccctgccctctcccagagtaagttttcacttacttgggcaagtaaatgagtgctgcaccctaattaatttaatgtaaattcctgtgttggtgttcttgtcccattcttagaagaggggatttcctggtaacgttgccctagataataattattcctttgagaccctgcagacctcacttctccaggctaaataatttcagccctttttctcccaggttctaatgttccatcctttaatctttcgcgtcttctcactcctgcttggctgagaattccaagtcgtccgagcgaatgcgctacctggtttggagtcacaccatcctccctcgccttcgagatgtgccagcgactgtgttccgtgttcatccaaccatgctacctgcctaattacctgtgggctctcttctgctgtgatgaaccccgcagatcatttatttatatgctgtgtaaacagcctgtttctcttcctatttgccttttctatagacatgtttggtttgtttctgagtaaagcagctttgaccaaatggactaaggggccatctggggctcacgattttgtatgtgatggacaaatggttaaatttttcagtggagtattacgcattctttaggctgtggtatcaatatgttggcacttcagagagtcagcaccatgtagtaagataaggaccagcagtggagctggggagggatgagaatcacagctcttccaccatttattactataacaaggtacctagcctgccttagcctctctaacctcatatgttagatgagaataatgttattcatgtgggagagtagaacggatgcagtgaattcaggtatgtgagcatttgatgtgcttgctgttggaatgtagttttgcagacaaggttgtttttgtcaggatgggtggtaattatatatataaaggtaacaaagctgattttcatctagttgaaggtctgtgtgagtggtttaagttcttggtacaaagatataagagacacatacttatgataattttatataaaatatatcatcaactgttatacagagatagttactatgaaaagcagaactaggagggaggaggacagaggataaatacagagtgtctgcctttcagatagctggactaaagaggaatgggaaattagagggaagaagtgtctgatgtttctgcagccagtcaggttgtgctcattgaaaactgtttttccaaacaacctcattaaaaagtgggcaaaggacatgaacaaatacttttcaaaagaagacatacatgcagccaacaagcatatgaaaaatgctcaacatcatgaaccattagagaaatgcaaatcaaaaccacagtgagatactatctcacaccagtcagaatggccattattaaaaaatcaaagaataatagatgtcggcatggttgcagagaaaaggaaacgcttctacactgctagtgggagtgtaaattagttcggccattgtagaaaacagtgtggcaattcctcaaagaattgagaactaacgttcgacccagcaatcccattactgggtatatacccaaaggaatatttgttctatcataaagacccatgcatgcatatgttcattgcagcactattcacaatagcaaagatatggaatcaacctaaatgcccatcagcagtagactggataaagaaaatgtgatacataaacaccatggaatactatgcagccataaaaaagaacaagatcatgtcctttacaggaacatggatagagttggaggccactatccttagcaaactaacgtaggaacaaaaaaaccaaataccatatattctcacttctaagccggacctgaataacaagaacacatggatacaggaaggggaacaacttgagggtggagagtgggaggagggaggagggagaagatcagaaaaaatgcctgtcgggtactatgcttattatccaggtgacaaaattacctgtacaccaaatccctgtgacacagtttacctatataacctgcttgtgtacccctgaacataaaagttagaaacaaaaataaaaccattttttgggggacttgagctctaagttatgaatattgtcttagggggctcagaggtaaagggacagcagcgtatctttaagatcaagcatgattttgttactaatagagcctctgtcctaacctgtacttttgggggttgacgataccagagtaatttttctgtgcattttctgtgtgttggtttgccctgtcttcagcagtgattatgtatttctgtaagttaataggtccctttgtgtggggcctgccccctgtgtggaatcatctcatatggagacatgtcctggaagtgtcccagaagcccctagacttgagttttccagactccttggccaacaaacacggccctcccctggggactgtggccatcaccccaccctgcaactgcctggcctcctgtggtagaaagggaagatgaatgatcatcagcgctccatctgtctggatcggaatgaacaaatctcttgctgcttctccgtcacgacccttcacctttctttctcccttggctagatggcacccctgagctttggatttttttttattataagaattttctaacttgcatatttgcattttggcctgcattctcaaagataatgatggccatgaccctagcgaggctaccacaggaaccgtgttctcctcaatcgcctttccagggagctttctttccctgcaccgtcagtgccaagggaggctgaaaatgcagtgactgtgggttatatactgtgatggccccagaagggctgtgactccatcacctcctgtaatcctcacagggtccccactcatgagaaaagggggaggcttctaggggttatggatagtccccaggtcacacagctggtaagaccaagtccattgttgatctgactctggacggaagggaagggccatctggtctacctcatcaccacctccccaagccatgggaaccacccttgggtaatttgggaatctagaaaaacagcccttcagtaaggaatgtgagttactgcaccacaaggtgattgcccctactagtagaaaccttactacccagagctcagttgggtttcatgaccccaaattaaatgaaatataatacaggtaaacaaactttataaaattattccaatgctttaatgctctggcctggggacctaattacttttattttattttgttttatttttaagatgagaatctcgctgtattgcccaggctggtctttcagcctggcctcatgcaatcttcccaccttggccttctaaaatgctgagatgacagccttatgccaccatgcccagccctctagccaattttcaataaacatactgaattttcgtaatatagtgtctaacattctctactgtgcttttaaaaccagtattctcaaaacagcttattttattttgctcgagacaagtgtgcattatccctttttgcttcccacaagagcaaaagcttaagcattgtcttcccttcacttcctgccagcgccccatcatctccatctgctggggtcaccgggattcgaggctgttgatggcatcaggaccagccctgtacgtggtgcgtgtggagcaccgggtgtccagcctgcagctgctgtgccagcaggccatcgccagcaccttgcgtgaggacaaggacgtcagcaagctgactctgcccccccgcctctgctcctacctctccactgccttcatccccaccatcaaggtaaagccctccacccctccctcttcctcctccctcacctgtgctggctccccacagagccagggcagagacaggtgagggtaccagagtgagcacatggggccatgtgcagctgtgcaggatcctgtcatgtgctgccaggtctgcagtctgtcgaagcatcatggtccatgtccatgagagatttgccctgtgtggtggctgttatctttctcatggcaaagctggtattcctggacttctgtgtccctctgatgatcaaaggagtgaccattattcagcatttcctatatactaagcattgcaccagttaatttttagaaatctgtcttgttcagtcctgacttcctgacagatgccattattcgcatttaaggaagcaggaaacaagttaggagaagttaagtaacttgctccctagctggttagggggacagtcaggattagacccaccccagttctagggcctgctctcagcactgctgaggagggccactccagccagcactcagcgtcagccaccttttataccagtgggaactctagaaggtagcatgtagaatgcatctgccagttgctgttcaagtgtgggtccccctaaccttgggttttcccaagtggttctcttttatattctgtctctcttcttctgagtagcagacccatttgttggttacttttttcctgaaacatcaaagttttagaatctgttgggttgtttttttttcctaagttgccttacactattgattctacacgagcagatctcaacaccggtgtattatatagcattggaaaatacaggtgcccaaggctgcccctgtggatcctgatttcattgtctgatgtgggatcctggtttagatatgcttcgaaagcttgcaggagattctcacatgctcctaccattgcaaaccactgttctacaccacatagttaccctcttccccaggcccccagcctgtgctctgtctggaacagtagcgtttttagttgacctgcccccgtgcccactctctttccctctctctctgcctctctggagtcccagctcttcattttcttcctgtatcctccagcccccaattccagatccgaacaacatgagagactttgtcagctacccatcagccggcaacgagcggctgcactgcaccatgaagcgcacagaggacgacccggaggtgggcggcccgtgctacacgctctacctggagtacctgggcgggcttgtgcccatcctcaaagggcggcgcatcagcaagctgcggccagagttcgtcatcatggacccgcggacagatagcaaaccaggtgggcccctcacccgagggactgggaccttgttctcctgtggtcatgggctgttaacgccttacaccccatgcaaagagaatgtctgctaatgaaacgtgagcctgtgggggctagtgtggaacatccttgaagctacgacatttccagaatcccattgaaatgaacagttctctaaatgtactttttgacaggtttttaatcatattccatgggcagtggatagctgggcggtggatagatgaaccaggcaaggggaagttggcgcagtcctcctgggagtgagggtttcctcttcacagttaccgagtattcatcgagtgccttcatgtaatattgagacaacttgaaaataataacaagatacagtccctaccctcccagagtggatgataaaattgaaatcaaaccttcagcctcctacccctccctagtctactgttaactgctttttacctgattgctaatgacaatgttttgctcatccataaagatgttggtatgagtcacccttttcttctaaaaacctttccctgcagtgattttcattgctcagttaatgtattcaagatgctccctgcacatctctctgggatcctagattgtaagcttcagagggaagggactttgttctttttttgtgccacttggtactaggctagtgtccgtgcacccatcagtcactgccagctcagtctgccacctccctctgaaactttgcccatcacctatggcagaacgaacagcacgcttagtcattgtgctccagacgctgccccgctgaatcctgtgggcctggggggagagaactgagtcatctttgtgccctcagtggatttggatttgttttcattagttcatgcttcctctcgccacttcctcgctccagtttactctcctgcccattagtctggtccctgcctctcattacgacctggagctagcatgacctgtggcctgaccagtcaccccaagtcacagtgtggtgggcttgctcactctcaacttgtactcagcgctgtacacaggtgccccacctctgcctgccagccttcatttgttcagcatcggcagtgacactctactacccctgcaaaacagcaataccacttgtcaatattagatattagtccgttttttctgtcttttgactcgtgacaagctagtaccaggaacaaagaaagcaactagcagaattggggctggtagggaggcagactgaaaggagggagaggacagattcaggaggaaggaaggcacagtgggaaaagcaggagagagagaagcgcatgttcacgtgggagggaaacatggtttcagggaaaaggagaagggccaccaatggttagagatgactggggtgggggccgtgggacaggccctgagcccaggtttgcagcagatgttctcactgatgtcagtacctctaaggttactcccctgggtacaattttataaaatctgtattgagattaaatgttggcgataacttaggtgaagagcttatttcctcatgtgtgcataaattcttcactgaagaagacggaccggaggctgtgctgtggagtacccaaggactgggcttgcttgaatctgacccgactacgccaaatgcctgctcttccttccggttcatgtttatcagctcgtatcaaacacagacccactcatttgcgcacaatcctttcagggaataagatgttgtatttttataattaaaagaattaaaagctataaaacaaagcacattgacagatatttagtcagtgcctaccttgtgtggggtacttgagtctcctgctattattaagtaataccaggtcatctctgcttttaaggagtttctaaacccttttgggtgataagacaatgtaagcacttgaaaagtttaattaaaaagtcaagatttaaatacctgatgacaaaaatagaggatatgtcacaaggcacaatataactaattgcacctgaatggcatatataaactatttcagaggtggaaaagagtccctgacattgagaaaacaggaatttcttttttctttttattggggggatggagggacagggtcttgctctgatgcccaggctgcagtgcagtggtgccattacagctcactacagccttgacctcccaggttcaagcgatcctcccacctcagcctcctgggcagctggggctacaggtgtgcaccacacttgctaatttttgtattttttgtagagacagggttttaccatgttgcccaggctgataaactcctgggttccagtagtcctccgccttggcctcccaaagtgctaggaaccaccatgcctgtccccaaatttcttatcattaaaagctgattaactcattgaggccgccatatcattgtttctcaaaatgtgttccatgcaccaccacccccatgcaaatcacctgggatgcttatttaaatacacgttcctaggcttacccttagattacgattcattagggctggggtggggcctacaaacatgcgacttaatgggtttcccaggtggtttttatgcactaaagtttgtgatccactgtcaagtgacttggcagatatgttcctcaaaatcaccagtgtgtatttttataccagataccatgagtcccagtagtttttttttttttcagacagggtctcacggtgtctcccaggctggagtgcagtagtacaatcatggctcattgcagccttgaactcctaggctcaagcaaccctcccacttcagcctccaagtagctaggatcgcaggtgtgcaccaccacacctggctaattttttaattttttttttatttttgtggaggtgggggctccatgtgttgcccaggctggtctcacctcctggattcaagatcctccagcactggcctcccatagtgctgggatcataggtgtgagccaccatgcccagctgcttccctccaccacccccacccattgttttttaaaaggaggcagggtcttactctgtcacccagactggagtgcagtggtatgatcatagtgcactttttttttttgtagagacagggtctcaccgtgtttcccaggctggtcttaaacttctgatctcaagaaatcctcctgcctcggtcgccaaagtgctgggatttacagacatgctattgcacctggcccacacattttctaaaggaatctttagccagagcttgctatagactgacttgtgttgccctaaaattcatatattgaagtccagacccctagtgtgaaggtaggacatttaggggagattaaggtaaaaggagttcatataggtggatcctgatctgatttagttactggccttaaagaaaagaaggagaaagagatctctcaccacgcacgtgcaccaaggagaggacatatgaggacacagcgaaaagacagctgtctgcaagccgggggcaaagccttcaccaggaagcaggcgttgtcaccctaaccttgagactgctcagcctccataatcgaatggaccagttatttagcgcgtgcgcctgtgtgtgtgcacgcacgcttgtgcgtacacacgtgctcttgcatacacacacgcataatactggttttgtttttctggagaaccctgactaatacagattttggatccaggaaatgggtattgctgtaacaaatctctaaacatgtggaagaagctttggaactgggtaatggatataggctagaagagttttgaggtggatgctagaaatacggatgttaagggcaattctggtgaggtcttagttggaaatgaggaacatactgaaaactggatgaaaggtgatcctataaagcagcaaaggatttgagtaaactgtgtttactgtttcatggaaggtagaacttgcaagtgattaaactggatatgtaactgaagagatttgtaagcaaagtgttgaaggagcagtttggttcctcctgatggcttatagtaaaatgcaaaaggagaaagatgaatggaagaaggaattgttaagataaaagatgaagatttagatttagaaaatatttagactattcatattgcaaaaaataagtattaagtacattttgaagaaaataccaaagttatggctggactctcatttgataaagcgcttatgaaattatatgagcagagacactgccagtttgaactgtagtggatggaaacaggatgaaaggaaggagagaggctgttggacttcttagctttgaccagctgggatgatggagctgtttggccactaacatgcactattcttcaagaagaaagaaaaataaccttgaaagtgattcagagatcattaggtccacctcctcagtttcagcaggccagatggcctttgcacagagccttgtgggcagagccatgggggcaggatccctgccagagttaggagggtgatgctgacaccccagtaggcctggaggacaggatatcaaaccaaagaagactccactcaagcctcaaaattcaatggaattttctttgcgagatttgggatttgcttggaacctgtcaccactttcgtacttccagtgtctcctttttggaatgggaatgtctattctatgcctgtcccacaattgtattttggaagcacataacttctctagtttcacaggttcacagctggagagcagttttgcttcaggatgaattgtacctcaggtcccatccatactggatttaggtgacaatttaaatgagattctggactttagagttgatattgaaataagttaagactttgggggttttgggaatagaatgaatatattttgcatgggagaagaacatgaatctgagagtggccaggagtcctgtggactgaattgtgcccccacgtcacccccaaaattcatattgggaagtcctgactcccaatgtgactgtatttggagttaggacttacaggggggagttaaaattaaatgagatcttaagggaggtcctaatctgataggacagttggccttataagaagacaaggactaactaacgcctgtgatcccagtgctttggaaggccaaatcacaaggtaaggagatcaagaccatcctggctaacaaggtgaaaccccatctctactaaaaatataaaaaattagccgggcgtggtggcgggtgcatgtagtcccagctactcaggaggctgaggcaggagaatggcgtgaacctgggaggcggagcttgcagtgagccgagatcgcgccactgcactccagcctgggtgacagagcaagactcgtctcaaaaaaaaaggcaaggaaagagctctttcttcatgcacatacactgagtagaggccacctgcaagccaggaagacagcgttccccagaatctaatcattctggcgccctagtcttggactttcagcctccagagtatgaggaaacaatttctattattggagccacccaagtctgtggtattttgttatcgtagcctgagcagatttagagtgtatatttaaaagccattaaaaccgtttttaaagattttattttaaaaatatatctaattcaggaagctgggcacagtggctcacccctgtaatcccagcactttgggaggccaaggcgggaggattgcctgagctcagtagttcaagaccagcctgggcaacacggtgaaaccctgtctctactaaaatacaaaaaaaaatggccaggtgcagtggctcatgcctgtaatcccaacagtttgggaggccaaggtaggcagatcacctgaggtcaggagttcaagtgcagcctggccaacatggtcaaacctcatctctaataaaaatgcaaaaattagctgggtgtggtggcaggtgcctatagtcccagctactcgggaggctgaggcaggagaatcactgcctcgggaggctgaggcaggagatggaggctgcagtgagcctagattgcaccactgcactccagcctgggtgacagagcaagactccatctcaaaaaataagtaaataaagaaaatacaaaaaattagccagccatggcagcatgcatctgtagtcccagctactcaggaggctgaggcaggagaatcgcttgaatccaggaggtggaggttgcagtgaaccaagataatgtcactgcattgcactccagcctaggcgacagagcgagactccatctcccaaaaaaacccacaaagccttcaacccagaagaaattagcagattcttgaaaactgacagaattgagatgtaaagccccagacattgtagttaagccataggttctcaaagaccagtcccagcttacatttttctacgacttagatgtttttccagaacagccatgataaattgatgacacagaatctctagaagtatgaagtagacccagccaccacctcagcctctgcaaatgtggagcttatgtcatgcactgaattgctagtcgtgctgatgacagacgtcagagtggcaggcagtgcctgcacgtgtggaattgtaacactgaacaagcagggctgaggacatgttttcagaaagccattttctttgtctcatgccaccccttaaatcgtcatttattctttcagaaagtatttatcaagtctcaggtattgttctagtctctggggttaaagcaggaggcaggacagattactttccttcccttgtggagtttgcagtagttggggagacagacaataaaatagtagttatggccaaatgcagttgctcagctcttctaatcccagcactttgggaggctgaggcaggaggatcacttgagtccgggggtttaagacaagcctgggcaacatagtgagaccctatctctataaaaaagaaaatagtagttttgagtgaagggatagaggaaatggtctgggacatggtatttgagggttcctggcattgatgagtgagtcaggagctgagtgggcagtgtcttactgggtttcctcaagtcgaatcacacacacaggcacattctgtaggcttgcatgcatgcttgagtcatagctgagattcctttgatccagtgattcctaaattaagtcatataaaacactgctcaggacttgtgcattaagcctttttatttgcttaaacacaaataccactgtggcttcactgtggctttcgctgggtccaggcgtcgagcctcctgattcagtgagtgctttaaaaagggggtgatgtgggcgacacaacctggggccagcctcctttccaaggagcttgccaagcttttctgcctcagaggggcccctgttcacagatgccacctccaaatgctcagaaacttctagattggtttggattaagaaactcatcctttaaaatataaacaacctttttggatggtaagatcactcacattatgaattatttcattgtgattgaatgatacagcttttatttattacctggcaaggcacttggagccttgaggcaatgagattttcatcagaaaaacaaagtaatctggaagaatggggtcctcacattgaggacagacctggggcagtggaggggggtgtgtgggggatttgggtggtgaggggatgtgatagcacaggtggggatgggcagcaagggagaggaattccaacgaagaggaactttgccccacagttttgccatcatcccactctgcacatcatctcaccgtctgcctgaaggccccatgcggagtacccccagaagaacccagagccatcctgggagttcccaccgcacaggtttcctagcctttgctccacgcaggcaagcagctttaccaggcgggagagccaggcccccgccgcaagacctgtggcaattccaggggactttctgactttccagacctaagtggaggggacctgactctgtcaggactgtagttcaagcaggcttggcatccgcaagggccttctcaggtcagaagcaggttctcaggggaatcagtgagcccgcaagaccctcagcccaggttctgtggctgcctgaaagtccgcatgaacccaggtgggcacctgtgtgttgtgagacaacagcacagccattttgttttcagcttttggcaaatggtgtctatttcgtacattcctagaaacattaaaataccatgcccattttgacaacagtagaagtaattgcctccttctgcttagaaaatgtaaaagagaaaaacaatgccaagcttctttttggtttcaacctctaggtctaaaatgatggcctgtggagtccgtctgtcttttagtttatagtaatgatcattggtaggggctaattgatataacttcccttgaaatctgctggttggtgttttaccagatgaaatctatgggaacagcttgatttctactgtgatcgacagctgcaactgctcagactccagtgacattgagctgagtgatgactgggctgccaagaaatctcccaaaatctccagagctagcaaatcacccaaactcccaaggtaatctcagtctttggggagatcgtcctttcttgtgcctctgaatatgtgtgtttgtgcctgcaacagaatcgcattgaaactgaccagaagagtcaaagagcaacctccctgccttttcttccagaagattccagctggaataattacaacttctatttgttttgttttgtttccttcgggatagacaaagatacccagtagaagtttgctacaccctcagaacttctctaggggttagcagtgatggtgggtggcagaggggtggccatagttcccgggcttatatgttttttcttatagtttgagaaaaggaagaaaaaggttcccctgtggatgtaacatgttgaagagaatgccagataagatgcctgtaatgctggagccgggcacagtggctcacgcctgtaatcccatcactttgggcggccgaggcgggtggatcacgaagtcaagagatctggaccatcctggtcaacatggtgaaaccccgtccctactaaaaatacaaaaattagccaggcgtggtggcgggtgcctgtagtcccagctactcaggaggctgaggcaggagaatcacttgaatccgggaagtggaggttgcagagccgagattgtgccactgcacttcagcctggcaatagagcaagactgcacctcaaataaataaataaataataaataaatgcctgtaatgccgtaattgggaaacatcaacacatcgcatccactgtagaacctttttcttcactaagatttctagttttaattctgtgattttttttctgatgccatgaaaaactaaggtataagttacatacagatacacatctgtccaaatcgtaaacacctagctcattgtacaagggctatcccagtgtcttcccccaagttcaagataaaagacatgtcatcatcccagaaagtctgcctgtgctccctccatttgatacccattccctagaagtaatcactcttctgacttccatcatcagctttgcttgttcttaaacttcatatgatatgtcaaacgatatgttccctttgtatctggctctttttttttttttgctcagtgtaatgattttgagagtcatcatgttgttgcatgtatcagtagtttgtttttctttattgctccgtggtattccattgtaatgattatactacaattagtttactctgtttaccaatcaatggatatttgtagtttccagtttgaggctattatgaacaaatccatgataaacattcttatacaagtctttttgtggacatgtgcgctcatttctcttggatataaacttgggaaaggagttgcatggtcatgggtcagatacatgttaaagtttattagaaactgccgagcagtattccagggtagccgcacccacgtaaatccctaccagcaatttccaagagagtcccagtttcttccatcctcagcagcggctctgttgtcattttttagaaataattctaccttgttctgataggtgtagtggcatctcatttcagtttaattctgatatctccagtgatggatgctgcttcgtttgcatgtttcttggccacttggctgtcttcttcttttgtgaagtgtctgttcaagtcttctgcccaatttattattgggttgttttattgagttataagagttctttctttctttctttctttctttctttctttctttctttctttctttcttttctttctttcttttctttctttctttcttttctttctttctttctttctttctttctttctttctttctttcttgtctcgctctgttgcccaggctggcgtgcagtggcatgatctcggctcactgcaacctccacctcctgggttcaaacgattctcctgcctcagcctcccgagtagctgggactacaggcttgtgccacatgaccggctaattttttgtatttttagtagagataaggtttcaccatgttagccaggatggtctcaatctcctgacctcatgatccgcctacctcggcctcccaaggtgctgggattacaggtgtgagccactgcaactggcccaagctcctgtgtaccctcccctccctttagagcaatcactacaggggcatctgaatgtctcattcttttttgttgttgttttttcgagctggagtcttgctctgtcgcccaggctggagtgcagtggcgtgatcttggctcactgcaaccttcacctcctgggttcaagtgactctcctgcttcagcctcctgagtagctgggactataggcaagcgccaccacgcccggctaatttttgtattttttagtagagatggggtttcaccatattggccaggatggtctcaaactcctgaccttgtgatccgcccgccttggcctccctaagtgctgggcttacaggtgtgagccaccgcacccagccaagagttctttcttctagatttgaatcctttgtcagatatctgtatggccatatagtccagcacgtggcattcttcttttgtggttagtgctttctgtgtcctgttcgggatgtctttggttacctaaggtcatgaagcctttcttcagttctcttccagcagctttctagttttagctttcatgcttatggattaatttttgtgtttggtatgaattagaggtaaatgctcatttttaaatatgcagatatccagttactctagcaatctgattgatgtcttttttcatctttgttccagagcttgttaaaattgcatgtaacattatgaactttcctatatttccaaagtgcttttttcccattatgtaagcagagaggacatctaatgcatgcagctaaatccttcacctttaaacgtcctcttcaggttgccgtcttcctgtggctggacctcctcctgttgtcctttccccatttggaccctccacacagcagccaggctaattgtcccacatcatagctttagggagctcaatctgccatcctcccactcctcaggagcccagagtttctcatcaagctcaaaaccagtatatatgagacttaatgcattttttcatagactgttttaaaccttaccatactcattttaatcacactgtctttggggtagactgtcattaaacatgtgtgtctccatgttacaaataaagggactgagaagcagagatacaacatgggatcaaaaggcagccaaaaaactttactaatttgatttaaatattgcagatggtgaaatgctagataaatttgttgaaattcacactgttgcagaagaaattataagaatcactggcattagggtaagaaatgacttgttccacctgccattttcccaggactgattgtgcaggcccctggcagaaggccatttccacgcttgctccaaggcaacagagagtgaaagacagttaattctttgagttccttacaaatggatcgctggatctcatttcagtgtatactaagtatattttgagatggggtcttgctctgtcatccaggctcaagtggagttgtgtaatcgtagctcattgcagccttgaactcctgggctcaagcgatcctcctgcctcagcctcccaagcagctgggactgcaggtgtgtgccaccacacccagtttctcaatatattttaaaatgtatattattcaatgtaaagttgtcattctttcctcatattcataaagcaaaagcaaggggagagctttgttaaattcgggcactggctgcagggtgagaacccaacacccaggctggctgtccagaaaaagaaaggactgctggagtcagggccatgctcaccattcccgccacggatgcctgacccctcctggccttgcctccccaggatcagcattgaggcccgcaagtcacccaagctgccccgggctgctcaggagctctcccggtccccacggttgcccctgcgcaagccctctgtgggctcgcccagcctgactcggagagagtttccttttgaagacatcactcaggtaggagcccccagttaccctgccttgctcccctcctcctgggggctatgcccagagggccccttcctacccgccgcctgcactgctcactgccaccatgggtccctgagctctgctccacatcctgcacaccacctactacctcaggagtagccctcaggtggagctctggcttctccacctgtgcccctcagccagttctgatcttgcagtgacggtgggagagaacctcccacttcccatcacagctcccaccgtccagccctgcctgcctttccctcctggtccctcagtgccccctcaccctccgggtgctgcagccacacctggttctcacctgtcccatgccttgccctgcctagattgtcaccaccccacctcctcctcgtttctgccccatgcttccagatggaactccaccaccacctctgctgtgacggcctcctaccctggtttgccgggagaggctgacacacctggtgtagagctaccttatgacattgctcagtgacttctttatatacagatcattacaagctttatctcctccatcaggtttaagctccttaaggggctgtattttgtccatctttatttttgcccttgcatacataccttaggcaaaataatttcttaaatttttaaaaatttaattgaatgagaaaacaaatgatgggtagtttcaggacatactggtaccaatgcaaccgatgttttcaggcgaaatatcaaagataaaaatggattcagagttagatccctttctacgcctctttaaatcacacacctgtggacatacatactgggacacacccccacctttcccccagctcgatgcgcccccactcactgctgcgtgcctggctgccctcgttagcttctgatcttgcaaatggtagatgaggtagggaatgggtgtttcttgcagtgcacactcgtggcttaagtaataaatattaacattcttactgagtgaccagttgaaaatacggaaatagattgtgattcttcttttttcttttcttcctaccgcagcacaactatcttgctcaggtcacgtctaatatctggggaaccaaatttaagattgtgggcttggctgctttcctgccaaccaacctcggtgcaggtaaaaatcatgtcctcttctctcattgtcccagttggaacaaactaaaacgtccagtttccacctttagtggcttaaactaggagatgaacttttaagacagcaaaagattagcatgtattttacctctaaaccttaacttcaccacagtgatttcacaaaaattagaattctcactcacattggctttttgccagtggcattttttttttttaaatcttttaactttttttttgagatagtgtcttacccaggctggagtatagtgacacgatcacagctcactgcagccttgacctgggctcaagtgatcctcctgcctcagcccccaaagtagctgggattacaggttcgcgccaccatgcccggctaatttttgtattttttgtagagacagggtttcaccacattgtccatgctggtctcaaactcctgagctcaagcaatttgcccacctcaaccttccaaagtgctgggatgacaggcatgagccatcacgcctggtcgccagcgggattttcattttttgctataagccctgactcataaaaacaatagaaatattaaaatgatagcaatagccaaaatttgtatcacagctcgtatagatttctcaaaactttgacttctaggccttttgctgtgggcggatttttggtaaactcctgaagaaagtggagaagaaagcattagagactataagtagttagctaaggctgagtgcagtggctcacgcctgtaatcccagcactttgggaatacaaggttggcagatcacctgagtttgggagtttgagaccagcctgaccaacatggagaacctttctcttctaaaaatacaaaattagcctggcatggtggtgcctgcctgtaatcctagctacttggaaggctgaggcaggagaatcacttgaacccagggggcggaggttgctgtgagccgagatcacgccactgcactccagcctgggcaacacgagcgaaactacgtctcaagaaaaaaaaaaaaagattagctgactattggtacaattcttggtggtaaatttttctgaatttcatttctcagtactagataaataccctgtccatggcaagtttgaaacagaggaaaactgagccaagggagtaaaagccaggccagaacatgaacatgtattcggatctgccctcctgcccaaatgagttgcaataccttgttatatttaccccagagacagtaatgacgtgaaaatggcagaaggtccattccagagcaacttccttctgttggggaggtccctatgtgagttgaggagctgtgttgctccccgcatctttcccagttgcagaatcactgcatgtcgtacacgtctgtctgcaaggccagctcagccaggggggccgtggccctccattttgagcgtgctgtgcgtaacctactaaaactggtttttgaaaaattctgaatctgtgtatgagttgtatgaagcagttcatacacagatcctttaaaataaattattcttacagattagatgttagaaagacctattgctatgaggcatttcacagattttttaaatagtgctgcatttgagtttttcattttgaagtttctgagctcaaagaaaaagaggaataaaatttaaacatgaaactgacttagggaatcacaatggaccatccctgtacataatgcaaataaatctctcataatattttcagcaacctggaaacactctgatgaccacaaatgcttgttgttcagttactcgttagtgccctattgattagataaggctgatttttaataactactgtttagctatcatgattattcccacatcagtaagctgagaacttagccatctgcctatggtaaatattgaaaaagggaatggaagtgagaatttactaaatgggtcttttcattcttggatgttgagaaggtccacagataagccagtaaagatcttacaatgagagagcatgtgagagcctttgagacaaatgctggccttttttggggggtgcagggagatagggcctggctctgtcacccatgctagagtgcagtggcgccaccacagctcactgcagcctcaagctcctgcgctcgagtgattctcccacctcagcctgtactagctaggactgtagacaaggcacatgccaccatgcccagctaattttttaaaatttttggttgagataggacttcactattttgtccaggctggtcttaaactcctggcttcaagccatacccccatcttggcctctcaaagtgctggaattacaggtgcgagctaccatgctcatcctgatctttttaaaaatagtattttgatccatagagctactttgtcaaggtaaaagaattttccacttgattctattaatactagagaacagaaattaactattgaatactagaaggtatgttatatgtggtaccccattaaataatcttttcaaagacagtatatggcactctagtgaacttaaaaagtgagtgctgttccccaggttggataatttgttttctttaattagaatgatctggcccatgaaatttttttattttgaatttttggcattttaacaatacacagtagattctacaaaattcaaagcattcagaggggtctatagtaaaaatctctgtcattctcaccatcagccacctacttttctttcctggaggtaactgatggtatttttctaatccctcctagaatttttttaaaaattgctttgtcaatgtgaacaacaaagaataacactttaatacattcattcttaagtcatatggaaccacacagtatttttaaaccaaaattcatattatctttcctttgtggacaagagagagaaacacatgcctagggcctttcctgctattgggcaggagaagttaccttaacccataccagtccatgggccagccccgcaaagatgcttcgacaaaggaggcctgctgtgccgcagtcatgctgcaggtcagccgctaagtgttaaggtgaccgccatggagctagaataaagaagctttgtgctacctgtctcacaggagagactattgaacacaaaagcaagttcacagggcagtttcaccccgactttaactactgtgaaacttaaattcagattcattatatttaaacttattttgtctcctctaaatattttagttgcaatctaggccttctcctacatgtccctgttaatcaaattaaatcttgaggttttaaaaaaacaactgtgtggaaattccctataaatctctatcctgatggttagattaaaattgaaagccagtaaaccaaggttccagccgaaatgaaggctatgttttattcctacatgaaaccatgccacccccatctcaacattgctttcacacagtttcttggttgcccaagcttcccttgtttggcagtctggttgtcacaactatttccattcaatcatccttctgactgcaaatgaggtttttaaaaaatatgtttttataccctagcttattccaaaagaaatgatttgtgtctaaaatgtttttaacatttgaaatttgtagttctgtagacaaaccattggcaaggaggccaagctagaccgggaatctgctgttactgaatccagaactgtggctagtatggtcgcattgagtactagggagaaatgaagagctcctctcagcctctgggccctgcctacacagatctgtcttctgatggcagggaaactgcagtgcgctcttcttcctgtgactctcttgacactttggctctgctctggtgtgtctctgttaactgtgcccttctttttccccaccagtaatctataaaaccagcctcctgcatctccagccgcggcagatgaccatttatctcccagaagttcggaaaatttccatggactatattaatttacctgtcttcaacccaaatgttttcagtgaagatgaagatgatttaccaggtgtgttcacatacatcaacgtgtttgtcacggtccctctgtcagtagatcatgcaagggggacagagcggcaagttgttgaggatttcagtctgctacctgggtttggaaaaggtatccctgcctcagtaaggttggtagatgtgatgttgtgtcccaggggaaaagtcacaggttggcaccagtgttggcaggaggggagctgctggagcacagatggttccagtagcagcggcgccttgtgttttcggagcacagttctaacatctggctttatcctcacagctatcctcttagtcttgtgtctggattcagataagtttgcaggactgattgggactaaataaaatcagaactgagactcaatctcattgatctaggccagctttcatcctttcagtccctgctgagatagtgtctcactccagcattcccgtggtgcgcacagagcccagtttctcaaatctgccgtgtccaggacgcaaaagcctttacctggaactacctctcttccaccgcaaccgcatgtctcagtgcacaggggcctggtctgagttcaagataaaatctggtaaacagtttttaaattccagttttcaaatggtaaatatcaatatccatagcatcttaagttaatgtgtttcccagtggggggattcttaaaggatcctattttgattaatagattacaatgacttccaattagtctggccagttagttgtgtgtaactatttcactagagggtacttgaaaataacttgcttttctaagtaaaaggccacctgagattttatagatacacagactcctctacttccaactaagtgggctctggaagtctcttgtttctgagctagaggaacccagacatggaccgtgacttctccagtatctggatgtctgtgaccagagggactggttcttgcagtggacatagagggccacccatttcagcttgggccctcctcctcagcttggctctgaacttgagagagttgtttaccttctctcagcccagtctttttaactgaaaaaagaaaaaaaaatgatttatactgcactttccaacaatagccatcttgcttctctgttggtgacctctcctgcatgggtgagcaaatctcctaggcttatgtggtcctaataggccaagcttacagccacataaatacctgtagtttggtgaagcctcccatacctgagctttctagtgcatccccttctacttcagaatcttggaattagaagtatcttttaaactttccccttaacgctttccctgttctcccaaaatgcgaggaatacagccctctccaaggttcagctgttgctgcagttgtcgttattgtctgtggttctcaatgagaggagggaacatattgtctcagggattacatttaatgatggtgactcagtgaagaggctcttcttccttaaaggggaagatgcctgccatcagtgtttcatacagacgagagagcttctccaagagggatctgaacaggaatcataggaaacctgagacagacccaaatttgtgtggccaggggagagttatgtcttactaggacaccccaaggaagggccagcttagcttttgataaactagctggcttgattctgtagttcttttgatgagaagtcagccagtgtcacatttcctaatcatggactagctgccacacggtacttacaccatgcctcagatttctggatcagtggcagttttctctaagggaaaagccacagggtagcacagtgggcctagaggagccaactgcagagtgctcagtgggcactttaaacagggtggtgcagacagtggctctgagcacctgtctgtagatcgctgttcaaatgcacgcacgctctgttaaactctcactgtgtacaaataggatatatttatagggtttaattcagcatggctctaccttacatactgtttgaaatgctaaaaagcagataaaggccaggcagggtggctcacacctgtaatcccagccctttgggaggcgaggtgggtggatcacctgaggtcaggagttggggaccagcctggccaacatggcaaaaccccatatctactaaaaatacatagctgggtgtggtggcgctcacctgcagtcccagctactggggaggctgaggcaggagaatcacttgaacgcaggagaatcacttgaacccaggaggtggaggttgcagtgagctgaactcctgctactgcacgcctgggcaacagagcaagactctgtcttaaaaaaaaaaaaattaggaaatgatccttcatatgatactcagattcactagaagattcttttcattgttttttctaccacattttacatggttctatttacagaaacctaatgtgcatacatttcttatacacatctgttgcatgacactttccacactatccatcccataatcatgaatagacctattcagaggcctaggcactgcaagtcctcaatggaggtttttcctgtaccattgccctcttcttgcataaaagggtgggtattttatgaatatcaccagtaaaaagcttcttcagacatttaattatctgtgatggtgccattgaggcactggtgccaagtttagaaggttcaaaagtgagttagtcgaaaagttctgacagtacccttagctaacagacagcagcaggctgccctcaagaacccatctcccttgtgcgagcaggccagctttccccaagcagacacgtctctgtctctggcaatttgcattttgtttacagaaggagactggatgagtccagacgtattgcttatcctgatctggtttaatggcagtgtttttgtaagcagttcctttttctaattttcttccagtgacaggagcatctggtgtccctgagaacagcccaccttgtaccgtgaacatccctattgcaccgatccacagctcggctcaggctatgtcccccacgcagagcatagggctggtgcagtccctactggccaatcagaatgtgcagctagatgtcctgaccaaccagacgacagctgtagggacagcagaacatgcaggtgacagtgccacccagtacccagtctccaaccggtactccaatcctggacaggtgattttcggaagcgtggaaatgggccgcatcattcagaacccccctccactgtccctgcctcccccgccgcaggggcccatgcagctgtccacggtgggccatggagaccgagaccacgaacacctgcagaagtcagccaaggccctgcggccaacaccgcagctggcagctgagggggacgcagtggtctttagtgccccccaggaggtccaggtgacgaagataaaccctccacccccgtacccaggaaccatccccgctgcccccaccacagcagcacccccgccccctctgccgcccccacagcccccagtggatgtgtgcttgaagaagggcgacttctccctctaccccacgtcagtgcactaccagacccccctgggctatgagaggatcaccaccttcgacagcagtggcaacgtggaggaggtgtgccggccccgcacccggatgctgtgctcccagaacacgtacaccctccccggcccgggtagctctgccaccttgaggctcacggccactgagaagaaggtccctcagccctgcagcagtgccaccctgaaccgcctgaccgtccctcgctactccatccccaccggggacccacccccgtatcctgaaattgccagccagctggcccaggggcggggggctgcccagaggtccgacaatagcctcatccacgctaccctgcggaggaacaaccgtgaggctacgctcaagatggcccagctggccgacagcccgcgggcccccctgcagcccctggccaagtccaagggcgggcccgggggggtggtgacacagctcccagcgcggcccccacctgccctgtacacctgcagtcagtgcagtggcacagggcccagctcacagcccggagcctccctggcccataccgccagcgcctccccgttggcctcccagtcctcctacagcctcctgagcccacccgacagcgcccgcgaccgcaccgactacgtcaactcggccttcacggaggacgaggccctgtcccagcactgtcagcttgagaagcccttgaggcaccctcccctgcctgaagctgctgtcaccctgaaacggccacccccttaccagtgggaccccatgctgggtgaggatgtttgggttcctcaagaaaggacagcacagacttcagggcccaaccccttaaaactgtcctctctgatgctgagtcagggccagcacctggacgtgtcccgactgcccttcatctcccccaagtctcctgccagccccactgccactttccaaacaggctatgggatgggagtgccatatccaggaagctataacaacccccctttgcctggagtgcaggctccctgctctcccaaagatgccctgtccccaacgcagtttgcacaacaggagcctgctgtggtccttcagccgctgtacccacccagcctctcctattgcaccctgccccccatgtacccaggaagcagcacgtgctctagtttacagctgccacctgtcgccttgcatccatggagttcctacagcgcctgcccgcccatgcagaacccccagggcactctccccccaaagccacacttggtggtggagaagccccttgtgtccccaccacctgccgacctccaaagccacttgggcacagaggtgatggtagagactgcagacaacttccaggaagtcctctccctgaccgaaagcccagtcccccagcggacagaaaaatttggaaagaagaaccggaagcgcctggacagccgagcagaagaaggcagcgttcaggccatcactgagggcaaagtgaagaaggaggctaggactttgagtgactttaattccctaatctccagcccacacctggggagagagaagaagaaagtgaagagtcagaaagaccaactgaagtcaaagaagttgaataagacaaacgagttccaggacagctccgagagcgagcctgagctgttcatcagcggggatgagctcatgaaccagagccagggcagcagaaagggctggaaaagcaagcgctccccacgggccgccggcgagctggaggaggccaagtgccggcgggccagtgagaaggaggacgggcggctgggcagccaaggcttcgtgtacgtgatggccaacaagcagccgctgtggaacgaggccacccaggtctaccagctggacttcggggggcgggtgacccaggagtccgccaagaacttccagattgagttagaggggcggcaggtaagacctcagaccaggtggcgctgcgagcccaggaggcgagggtttcagtgcttcggccttcaaggagcatttttcaaaaggccaaatgggaaatgtggaaaacaacgaacacctcttaggtggagctcatggggttatggtttttagtgtgcccactgctgtcttgtatttttttttttctttttgagaccgtctcgctctgtggcccaggctggagtgcagtggcgcagtcttggcttcctgcaagctacgcctcctgggttcacgccattctcccgcctcagcctcccgagtagctgggactacacgtgcccgccaccatgcccggctaattttttttttttttttgtatttttagtagagatggggtttcaccgtgttagccaggatgatctcgatctcctgacctcgtgatctgcccgccttggcctctcaaagtgcagggattacaggcgtgagctaccacgcccagccctaatttttttttttttagaaatgggagtctcactgtgttgtctagattggtctcaaactcctgggttccaagcaatcctcctgcctcagcctctcaagatgttgggattacaggcgtgagccaacgcacctggcctgcagtcatatttgtaaagaatacgtttctacttctgttcattgacttttctgtttttggcatcagatggtgacttcctaaggaatgtgagggttagttttgctcaccctatgcacacacacacatgtatgcacacagcttttccttccccattaaatcagtggtcactggttaccttgttatgctagtcaatagctgagccatgtattacggcttagttacatttccttttttgtatacttttcttcccctagacatatcaacttcctgttatctgtctgtttgctcatttgcctatttctctgtatatggaagtcattccccagttctcgaaccggatgttatctcatggtgcagctgaacacattgggtcctagttcttccctgctccagcccagaagggttgctctgtcctgctgccaacgtcccccttcaccatcctgtaaagtccctcccctctctacttaaattcacgttttcgttaattcactcaataaatgttattgagaacctgccgtgtgcctggcaatcctctaagcccagggttggcatactggcctttgggccactctggccagccgcctctttttggaacaaagttttattggagcacagccacgctcattcacctgagtatcgtccctggctgtgttggccggacaacagcagagttgaggagttgtggtaaaaaccgtgtgacccacaaagcttaaaatatttattatcagcccctcgcagaaagtgcgtcagcccctgctatagtgctaggatcagggcagtgaggaagacagagccccgccgctgtggaacacgcagactggggaccagaggcggatgagtgcagcccgtgtgctagggcatggcgtcactgtctgatgggatgtaggcacaggaactggtgaggaagtggccagcaagtccctccctgaggcagcggtgttggacagtggtggtgctacttctcttctggagcctctggcctgtttgtgtttctttctgcttttctttctcctttctacttcctaggtgaagaaaccacttcatttggcctgtagcattcaccccattcttttttttttttcttttttcttttagattcaggggtacatgtgcttgttacatgagcattacgtgcataatggggggtgggcttctagtatgcccatcacccaaacattggatgttgtaccccacaggtaacttttcacggatggagctggaggccattgtccccacattccaaaccttgctcactgtctccattgtgttaacatgttcctcagtccccttatttcctgcaaacttggagttagatatagaagcttcaccagattcagggtcacttttgttagcaaaagtatctcatagacggtgctgtctgcttccataaggagccatgcagacccggctgtcgccttgctcgccttgttcttttttttttttttttttttttttttttgagatgaagtctcctctgtcgcccaggctggagtgcagtggcccaatctcagctcactgcaagctccacctcccaggtttacaccattctcctgcctcagcctcccgagtagctgggactacaggcgcccgccaccacgcccggctaattttttgtatttttaatagagacggggtttcaccgtgttagccagggtggtctctatctcctgacgtcgtgatctgcccacctcggcctcccaaagtgctgggactacaggcgtgagccactgcgcctggccttttcaccttattctttaatgtctttgcttcccctgccctcctccaggtgatgcagtttggacggattgatggcagtgcgtacattctagacttccagtatccgttctcagccgtgcaggcctttgcagttgccctggccaacgtgactcagcgcctcaaatgaagagactggtgtggggaggagagagatgcagagagcctttggaagaggtcttcggagatgccagaggagccctctaggggtccgatgcctgggaggaccagaagccaacagcaaaactggaaaagcccggcaggcccaggagagggcgctgacctgtggtcgtcatttatttggttgggttttattaccttttattgtctgttcttcttttcttctttcatttcagtggcatttggaagcaaagagtgctaggcacctgctgttctttcaggaaacagcttggctgtggtaatgctctactgggcccttcagaatgaagacagtctgccttagagcctgctattcttttagacatagggaggatgcattatcctgtattctcctccaacatcaccactagcgtaaaagcaaaaagcttttacaaaacacagccaaaaattctcaagatgcaggttcttggggaatgggatggggacagcatttgatttacactgattatgttactccccaaaaggtgacttaattaataaagggcatttgggcagacacactgtgttggaccaacaaagtaggctctttacaggggtgttctcaccaggtagaaatgcgatttgctcactgaggatgttggggaagggacgaagggtaaagaagaaactgcacgtatacacaggttcacatcactctgcagacagcaatgtgactcagcgtgtgacttgtagcagcagtacgagggctacactcctctgctgaggatgtctacattgaaagcctccactagtttcatcgtttgtcaaagttccgtaggatcagtgatggtcattcagcatgactggttctgggagaaggtgagagacaaaaatggaaagatcctggcctgtggtagtggtagcagttttctcaaataatgtggtgacagtcactagatcctcacatgctgagaaacagcctctactctctctgccccttttactttttaatctggaatgcattactgtaaacatgatctttcccatgagataccatgttctatgccttcccattctaaaagtgtggacaacgcttgatttgaaaccactccttttctcctcttggctacattaaaattcagttgactacaaatgctttctatcaaattagaaatgtaaccaaaaaaatgttaagtgttcaccagggtattaaaatacagaggagtatggtcaaatctttgacaaaattttcatgatcttctctaacaaaaaaagttgtttattaactgtacagactgtttactaaggagctaaaccactgagaaaacgttattaaaattgtaatacctaggtagttggttgatcacagtttgttaattgtataaaaaaaaattacctagaatatctcttcccacttcctcgtcctcgtgagaacctgtgggcagtattcaagccctgatgacaaaacccagtgttttttgttgttgttttttgttgttgttttttgtttttgtttttgtttttctcagtcttacctgtgatgttgtttaggatcaggcccctctcctgggcctgctgtgcaggagcacaggaactatctgctggcgttgggttccaaatttgcattttatttggaaacagacaagtagaagatgctacagaaaagtattttcaaatttaaacgttttttaatcccctgttttagttaaaaaattggaaaagaaaccgacccatttttttcccagatcaagatgacatgacatcactcccaattctctccaaaccccagagaaatactgacgaagttttctgatgtggcaaaggatatttcccatctaataccagtttctcatttatatttaacgtattggacctgatatttttagtgggtgcattcttccagaaagaattcagcaatgttatcagaattaattcttttatatgagtttatgtagcttgatatggtgtttcagtgcttattggttgtgcaataatggttatagcctgttagataatctaaatgcaattcccctgttttgtcgtttaggagataattatttatcttgcttttcatagtgttcttaggaattattttgttgttacgttttggtgagttatacccattttatttatttagaaaaatagtatctttgttaacgacttacatggtcacagtatattttgctgcaagaaataaagaggatatgatagaaggtttttttttttttttttttttttttttgagacggagtcccactcttgtcgcccaactagagtgtagtggcacaatctcggctccccacaacctctgactccagggttcaggtgattattttgcctcagcctcccaagcagctgggattatagacacccgccaacacgccaggctaatgtttttgtatttttaatagagatggggttttgccatgttggccaggctggtcttgaactcctgacctcaggtgatccgcccgcctcggcctcccaaagtgctgggattacagacgtgagccaccactcccggcccatagaaggttttttgctggataatttgtaacttttctaattgggaaaaaattcctattaatcacttaaaaatttttttttgtattttgtgttattgattatatacaaaggagactttttttttgagataacactcaaatagtattctcttcttttgaaaattttatttttatctgaaaataacagttgatctgaaataaaaaggggagacctattagaatgagagtagccaaggaaagagttactaggtaataagcttcactttttgtgttctaattgtttttgagatataaagaccctgaaaaagcccattttagaacctgtttaataagagcaaatataggggaaaatctttgaaatgaaagctacaaatacatgtgagaagaaaaaaatggatttttttagcaaataattaactaagcttctaaatgcctagctccctcccccaaaggcgctttcccccgatggaggcacaggcttctgtctcggatgtttggcgcacgtgagtttgtatgagtttgtaccggagtgaccccggcagccactgcccacctcccctctacccaggggcctgaaaagaggggctgccctcctgcgccaaggcagacacaagctgcgggctgtgcggtcctagtagtgtgacgtttcagttaatagtggtggtcttattttcaactatgctttcattcagtcagtctctgttgactaaatacgacgaaaattcatactttatgcaggagatttctaaaaatttaatgtttattaatagtttatgaatatcaagatacctcattgaatccctaaatttaaaagcagtccagtaaaaggttaactgtataaagaatctatgactttttgagggaagtgtgatatattaacaaatataaccaattctaaatttgttttagctctaacctcatcaaaccaaaggcacagatttgtgtacaatatacccattgaatgtatatcctgagaaaaattggggccaaagaagcaggaaaatctcaaagctctaatggcagcataaatcaaagaatttcacaggctagtgtttttatccatagccattgctcccttgtcaagtgtctcacaaggacatggaagaatgtgttatgttcatcttgtaatcatagcaaaaagtctgcaaaccccagggtcaagcctgctctgccacagggttggatggtgaccttgggcaagtccctggggctggctaggcctccacttgtccatctgtgaaatgaaaggatcagcctggacagccctctaaactcccttacagctctcagcctaagagcgcagcactgaacagcctcatcattccacttttcatgggaaatatatttcacaccattgcctttgtgtagagaaatatttcttttcctgtgttaatgagctatgtactgaatataaaccagtgcatttaaagtaatatcttttgtgcacctctaaatgtgtttggaattgtgtttgttctcatagaatatacaaaagtactgattctaggtaagaaggagtctccacgggtgtgccctgctcagctggatgtccatgagaacagccatgaaataagtcactacttgtccccaaaaccacaggaatatatacctaggtcacctcaaattcctgagtgtgctctgccatgttacacggtcttcaaattgaaaaggtttcttgaaaaggaaagtttggcccagcaactggagaaggagtccatggtgtcgctgtgtgcctgtatcatttggccaagtcaatggttgtaagcaaagttagtggagacaaaaatgtgtccaaaatgtcgtttgagttcctgggatttctgtaatagcacacaactcagaactcttcagcatttgtgtgattccttacctctggctgataaaactctaatgggttgtggcttactttgtttccattttctttggctttgtgcaatttttgtgtaactttacttgtacctatattttctgtttacagttctttttaaggggaggggtagggttctaagatcttgttgtttattgtagataaaaattttttcgtgttgtagaaaagcatgggttatgcgtttgactgaaaaagacactgtattatttaccaaaggggtattgtttttgcatttgtttataaatgcattattttggtactgtaaatttggacataatttctgagtttattactactggcattttctttttcccttttttttttttttaaccgtaagtgcacgatgcaggtgcataggccccagaccaaactagaccaccagcatgttcatgtccagacctcggcagtggcgtgcactgcttgtgcacctcagttcctccagtgttggtttgtttgttttttaattcagcatcctgctggttttactttccaagcaagatctgttgcgactcccaaatgcgttttaatgagctcatccttatttgcctttcttcttacgtattttgtgtattagattgtgcaggagatattctagaaggcattaatggtttgcattcaaaacgatgtggtttgtccaagttattttctgtctttattactgagacggattaatctccttatttttttcttgatgatttgaagttgtaagagttgtccagctattgcttaataaaattttgcagatcaaaaaagttgtgtgcagaattcttgagccttgtgaggagaaatcacctcgctccattggcatgacctacccaccctccagttgcttcctgggtctcttggtaactgctagcagctactggagaccctgagatcccggtcatcatgttgcccatttggggaagtcagagattgtgctgtcttcttgatgatctggtttagatttgctttttcatggctttttaaaagaggactcgattggccgggcacggtggctcacgcctgtaatcccagcactttgggagcctgaggcgggcggatcatgaggtcaggagatcgagaccatcctggctaacacagtgaaaccccgtctctactaaaaatacaaaaaattagccgggcgtggtggcgggcgcctgtagtcctagctactcgggaggctgaggcaggagaatggcatgaacccgggaggcggggcttgcagtgagccgagatcgcaccactgcactccagcctgggagacagagcgagactccgtctcaaaaaaaaaaaagaggactcgattaaaagtgcacctgtatagcatctaaagatcagagatgccaaatattaacacctttgttaatttgtaggaaacttaaacctaggttttaagcaattcaactctaggtgctcatataactattaactattgttgttactcataagtgcttagtgagcctgcttcctctgccctaaagttccctatgaccatgggaggtgggaaggtggggcatgggaggtttatctgtgataatacatgtgtgcatgtacagaactacctttttggtgtttttcaaagaataaggaatcaattttgctcgaacctagctcccaaaactcactgtagaagagaaataactgtctcatggagattgcattgcagttttccaaggatgaaagatactaaccacagttaaatctcaactccattatgaagtgaataccttttgccactcctttcagaagaaaatggaagcagtgagaggttgaaatgatttctggattccatagacaaaaaccaatcctgaaacagaatccaagatttctgggtcacattaatgaatagacctggtttattcccagcttctcactctggtgtgtcgtaaagatttgcctgtaatgagctctgagctacttatacttagtcatctcccatgaaaacaagtattacatacagatgggccacccctgcccctcatcaggtgagctcatccgctttatagaatgagatttaagtccttgttattgaattctggaaagagtgaacgttcggctgaccagttttattattcacccaggcttcacaaaggagccagtctgtgtggatttgtttccctacacttcctagaaacagctgctctatgtgctgaagaataagaagccatccattggaagtgctggctcatttcttgaacccatttcagagttcctgtctgagcgatcgcttcaagtaaagaaggcgccccagagtaagtcataggaatttttttttttttttttttgagatggagtttcactcttgtcgcctaggctggagtacaatggcatgatctcagctcactgcaacttctgcctcccaggttgaagcgattctcctgccttagcctcccgagtagctgggattacaggcacgcaccaccatgcccagctaatttttgtatttttagtagagatggggttttactatgttggccaggctggtcttgaacgcctgacctcaggtggttcacccgtcttggcctcccaaagtgctgggattacaggcgtgagccaccgcacccaccaccatgcccggcagtcataggaatttcttaagcttcaaccaccactcaggacagcatgcagacaccttgcaaagcatcttgctctttgtcctctgacctgcccatgcgttcttccaggtcactgttatgaatcccagcatcccatttgccacttagctctggctggctcccaggctctcccctgcacccagtgatggtgcagcatcctcactgcaggcacagctacgggatagctcttgtcccgggaaagagcggggagcttggatgataaaggcaaccagtcacattgccttctcccagttgtgacagccatttcccattgtcttcaaccctgagggtatggacaacctagtgcttcctctctccactcttctccaaaagtagaaaagtgcccagacctgacaccatttcccttctgtcctgggaaccaagggtctctatgtctcctgttggttcatcctccagctcatgtgaatgatctgtggttcctcctttcacatgaatcaactcagtgtctcctgtgtcaccttgaaccactaatcagaatcttgcactttcacccagtaacaggggcatttccttttatttcagtgtctggggtcactgaaacaggggcttgaccagtgttatattttctttctctccccagtaaaaaggcaggcagtccagacaccacagcatgtgcatgccacacgcatgcgcccccccaacccctatgatgagaagacacaccctcgagtgatgaacttctttctgtgctggagcccatggggtcctctgagtcccacttcctgccttcctcaggtacctgcttctgactgcagaaggctcttccgtcccaggattgtggtttctcaccagtttctcaacagtttcctttgttataaaacttgagagaaaacattcctctagtagaaagagactgccttcatccaccctttggaataaccagctccagcctaggtcccatttcctgcactggtggaagaaaagtctcttcttcgctaagtggttcctttgatgaccttatagattcaggcagcttgggaagggaagtttctctaaaagccacagagcgtccagctcatggaaccctcaggatccctggcccatcttaggccacatggagtcagcctcgtgcccccagcccatctgttcctgtgcactgcactccagtgggtctcacccttgcatccagggttctctcccacaggatgagcttgtcaacattctctttttctaacacacacacttgtcagcaggtgctggtataagccaagctgagctcgtgggaggatggcaagagaataggcccaacagtctttgtgggagacagagcccacgtttctccacaaacagcttccgggaagagtggacgggtcagactagaccaaaccagcctcttgagaacaccacactgcccagacccacttagtgcctccgtgtaacccgctggttagagtccacctgctaggcagccagaagcggcaaaagcccagccccactgtcccattcttgacctggtcctccatgctcactgtgacagcagcacaggcaccccgaccgggccacagcgagctggtggccatgtccctggctctgctaacttggcctatctcatttcttaacctgtttttcatgatgtggacctcttgagagtatacttgaaaaaagtgaattatctatgtggataaaggactggtacactatgttgaaaacgtaacaaaccaaccagatgggaaagcatctgtgctatgggacttttttgtttgcttgttttgtttaataggcatattttatttaaataaatcttccagtaggaaatggagaatgcattgcctttgcttagaagagggccgtgtaaggagttacctgtaaatgcgtatgtgcagctcaccagtattcccgtactgggaacaccagcacgtccgcatcacagttcccaaaagaactttaaagtctcaaacccccctgtcccccctcgtctcgtttctctcctgattccagccaggctttatgaatctttctctccacagcctcatctccgtcctcatccacttcccctagaacgttcatcagcccctccctggagtctgtttcagtgtcgtagggggtcttttcggtttctttgtaccctttttcaacctgagtcaggtgatcccaccccgtgttttccgctttccttctacagaagataagaactgtatccgccttgccttccacaggagtgggtgtcaatggattgttcacactcacggataaccctgcccagttagatcctacaccaagagatcacacgacctctctggggagcgcatctgcacgttctcagcgggaacttggcctcctcacctggctgaccccgtgcatagtcaccgagtgtcactgtaggtcccctgcaatgggagcaaacaccgcagctggcttttcgctgtcaaggagttctgctttcctctgtgatttctgccgcatcctgttcatttctgtctcagtcttggatttttcagctggaagggcatcacgcaccgttttcctagttgccttttccagcaacaccttttacctcttctggatctttctatagctcttccaagctgaggccatggccggcctgggtcaggccaaaggcgccagcggcagccgctcaggggagggaacacgaaaggaaactctccaggaagccagcgcgctcgacctgagcgcaggccccgcggctgcgggctaagtgcaagggtcctcagcctgcgcgcgcacctgtcctgagcgtgcacccgccctgcgcgcacccgctgtaagcgcgatcccggccgccgccacgcagcacgagcgctccgagggacttttgaatggagacggagtcttgctctgtcgccaggctggagtgcaatggcccgatctcggctcattgcaacctccgcctcccgggttcaagtgattctcctgcctcagcctcccgagtagctgggacaacaggcataagccaccactctcggctaatttttgtatttttagtagagacggggtttcaccatgttggtcaggctgatttcgaactcctgacctcatggtacgcccgcttcggcctcccaaagtgctgggattacaagcgtgagccaccacgcccggcccgagcctggtactttttaaaaaatcctcagtacctgtagagacacagctgaacatcatctcattagccaaggttttctctcaactaaatggcaagaacggatggctttcctttctttccatttggatatctgtagtctccaaaaataaggcaaaggtaaagatgacacccagagccaactccatgtaacagcaggttcgcaaaccacagtatagcttgttctgacagcaggaagaccccacaagcccttctcagggaaggtgacggggttcaggacacacaccccagaatgtggcaccttggcatttgagaaaacagcagaagcaggaagttcactctcaccttccccacatcccctggcccctgcagcaggcccaagacccttgttccacaggtgccctccctgcccccagaggagaggaatgtctccatctctgaagacacaggggtacagagaagaacctgcacaaacgggcactgcggagtcccccagcttattcccaagggatcacacccctttgtcccactgtccctcacacctgtcgacttcttcatcagacttagcagcgtaaaaatacacaggtgtcggccagacacagtggctcacgcctgaaatcccagcactttgggaggccgaggtgggcggatcacttgaggtcaggagtttgacaccagcctggccaacatggtgaaaccccatctctactaaaaatacaaaaattagctgtaatcccagctactcaggaggctgaggcaggagaatcgctggaacccgggaggcagaggttgcagtgagctgagatcgtcccactgcactccagcctgggcaacagagtgagactccatctcaaaacagacaaacaaaaaaacaggtgtctgtgtctttgggtcctcatttctgaaggttcccatgtcatgtaaaacttgcatcacttaacaatgagagatgtcctgagaaatgtgtcactaggctgttttgtcactgtgggaacctcacagagtgcacttacacagacctagaggcatgacctgcggcacacttggtctctgtggggccgctgattgcttccggactgcaaacccgcacagcatgtcactgtgttgaacactgcaggcaactgaaacacaatgggaggtatttttgtatctaaacatagaaaagggacaactaaaatccagtgttatagtcatacgggatcaccattgcatattcagtctgttgttgactgaagcatctttatgaggtgcatggctgtattaaataaaatttgtatggttttctcttgttaatgggggccctggtcatgaccctagtgatggatgaggaaaagaaatgtttcctcccctgcaaaggtttggtcccagttaaaagatggggaaatctcagatagaaaatcgtaagtgactttcctctcatccaggcagtgtgtgttgaaaaagagtcaggagcaaatctcagagccatgaggccgcagcccctctttgagaatcgctccttgaagcatcctgaaccacagagaacaagcgccggctccccagggagcagaagccagcacctcagatagaagcctcccctccagggaaatgagtcacagacgagcccgggtgaggctgcgcggctgcgcctgccccgacctttgcttttaacttcctttctcctttgcagtcaccttcccatgagggagatgatactccgaagatgggttcattttgtccagactttgtccaggttcccgaagatgatctggaggatcattttattgtatgtttatggaaataaacaaaaccagtgccagtgagcctcgcaatagaaggtggtgagtataaaatgtaaacggcaccctgatcagcactcagccttcttcgtgttcacactgaaactatccagcctgccaggtccttgctgctgggtaaacagcatctccccaattccccgtgcagtgctctctgttgtttgggctccgtcccctctggtgccctcttcaggagaacaatactttcagctgaaggttataaattggcaaacaagtggagtggtgtgttggtaaatagctaacaaccagctctccagaaacacacaaacttggaatgaataaatataccttacatgagcattataaattgtattgctatataggatgtgtagtacacaattacaataacaaaatacacaatatttttcttataactccatatagccagacttaatagctaatgcttttgttgatttttgccaaatgtttgtcttgcagccaacctaagattgtaattggtaaacaaatgtagcctcaacatgaatgttggttattttcatttacatttttgagcaagacaaaagtgaaacaacgaaaatgtgtcttcagtgaaacaccataaacatatgttagaactttactcatacattaatgacataagccatttctttgctaaatgggataatagtttttgaagatcagatctcgattcttttgtgctgtttacaatgtgatggtgcagatatgacacatttttaatttaaattgcattatgaacactgccttcatcacattcttaagtctagagcctagactaaaacaatgaaatgaaatcaaccctgatttgtggcttttgctgatttccatggtataaatattcccaccagactcactgaaggaggagttggaaagagatgtgccttaagtagcaatttaattttatataatgactgtatttaaaaattggctctcaagattcctggaaatgtcaccctcagctgtcacgaggcagggagagccgcctgcagcacctcccggctgtgtgtggtgtgtgctggggggcagcataagcccagactctgattggagggctacacagcattgctgagtctaggcaggctgaggcactcagctagagatttcaggacacagattttttttggtggttctttcattaatcagcaaatatttatggagtgtctaatgcatgccaatcactgcgatgcctggaggagatgggtagctacgcagagtggacaacagccctgccctgcagagggtatggtcccagctggttctctacctccaagactgctgagtccctgtctcccagaccaactcatcctctccacccagtgtgtggtgttctggggcccctgcggaagggtgcgcagctgttccagatgacagggagctgccctggacccctcgctctccttcctcctgttccacagtagccactaccaagtcccagccacttctcctgcaagagctcctcctctccctctgctgcctgacctgggccagcactcactctcacttctgcctcttcagcagcctcctgcggacttctagctccctcttcccccaggccactctccattcagcaactaggctgatttttaagattaaaaaacctgtgttttttgttttgttttgttttgtttttgagacagggtctcactctgtcacccatgctggagtgcagtggtgtgatcacagcttactgcagccttgaccaacctcctgggctcaagagatcctcccaccttagcctcccaaatagctggtactataggtatgcaccaccatgcccagctaatttttgtatttttctgtagagacagggtctcttatgttgcccaggctggtcttgaactcctgagctcaagcaatccacccaccttagcctcccaaagtgctgggattatgggcatgagccagcacaactggccagatcaaatttaatgaacataaaaaacgaaaatacattcaagagggtccatgatgtcaaagttagttcttggaaaagattgatttgacaaatatctggcatgatgtaggaagaaaaaaagaaagcacaaaagtatgatatgaggaatagaagtggaatctaacttcagagagagatctttttaagagaaagaaaataagaagactatgcacaattgtatgctgtagatttgaaaacttggaaatgtagtcatcagtagaaaatcttcctgcaaagaaaatttcaagccaaatggttttacttattagtaccatcaactttcaaggaacttgttcctctactcttatacaaacactttcagaaaattaaaaagaggaaacacttctccctcactataagggcaaagtgttataatattcaaaataacatatcaatatgacactgacacccaaacaagacaaggaccaatcacaaaggaaatacaggccatctcactgaagtgatcacaccactgcactccagcatgggtgacagagtaagaccctgacagcctggccaacatggtgaaaccccatttctactaaaaatataaaaattagccgagagtgatggcacacgcctgtaatcccagctactcaggaggctgaggcaggataatcacttgaactcagaaggcggaggttgcagtgaacagagattgcgccactgcactccagcctgggtgacagagcaagactccgtctcaaaagaaagaaagaaagaaagaaatgcctggcataggccgggtacagcagctcacacctgtcagcccaccactttgggaggccaaggtggacctatcacttgagcccaggagttcaagaccagcctgggcatcatggcgaaaccccatctctacaaaaaaatatgaaaattagcctggcatggtgtcatgcacctgtagtcctagctacttaggaggctgaggtgggaggattgcttgcctgtgagtttgaggctgcagtgagctgtgattgcgccactgtactccagcctgggtgacagagtgagaccctgtctcagaaaaagaagaggaggggaggggaggagaagggagagaagggaaggggaggggaggggaggggagggggaagagagcctggcactttcagttcatttccctttctccctcccccagcacctgatatttcaacagacaaattttccatcagccaaaatttaatcacttaatttagaatgtccttttttggggtgaactcggagaaactcagtctcagtggcctgtttcacttaaataaattaatgtttcttggattgccatttttcacactgttcttagtttcaagcaaaaaagaaataagttgaattaacctaagtttgtgtagagatagaaacaaattaccaattttggttgttggttaccctcttctttagtcctgcctgggctgccaaggctggagtggctggaggcacccttgctcaacccacaccaaacacctcttaagtcaaaagggcctaactacttcaacagcccaaataccaactcccagaacatttcccagcaattacaaagtgccaaacttaacaagtttcagtaaacatttgttgaataaatgcaatgcaaggcagaattagttcttatttattctctcctctgggagaaaccgactcataggtaaagttatatttctataaaataattagataatatacatttctggaaagaaaaaaatgcttagctactttacataatacaatatcttgataaattcattacttaatgaaaaccaaaaggggaaacggggagggagatgtaaagccgttaaatgatcatgcttcttattgttttctagcaatcatctggaaatccatcttctattgcatcagaaacaaaacccaagggacaataaggactgtgtttttttgtcggtttttttttttttttttttttttttttttttttttttttttttttttttgagacagagtctcactctgttgcccaggctggaatgcaatggcgtgatctcggctcactgcaacctccgcctcttgggttcaagcgattctcctgcctcagcctcccgaatagctgggactataggtgtgcgccaccacgcccagctaatttttatatttttaatagagatggggtttcaccatgttggcgaggctggtcttgatctcttgacctcgtgatccccctggctggggaaagctgtacatggcctggtggaaaggaaatggtcagggtgcatttgcacgggtagaactttgtggacaagacggtgaagtgtcaagcaggcaggtaagcccccagtaccaatgctgtggctggcatggatgccccagcactcctggagatgaactggctctccatccataataacaagacacagtgggccaggcacggtggctcacgtctctaatcccagcacttcgggaggctgaggcaggcagattacttgaggccaggagttcgagaccaacatggtgaaaacccgtctctacaaaaaatacaaaaattagccgagcatggtggcacacgcctgtagtccagctacttgggaggctgaggtgggggagtcgcttgaacctgggaggcagaggctgcagtgagccgagatcacaccattgcactccagctggacgagaaggaaactccgtctcaaaaaaagcaaaaaaaaaaaaaaaatagacagtgggtatgaaagagtagctaaaataaaacgtatatctgtaattcaatatcgatgtgtcagtggtgccagcagagagataatgcaattttttttttttttccgagatggagtctcactctgttgccaggctagagtgcaatgccgtaatctgagctcactgcaacttccgcctcccaggttcaggcaattctcctgcctcagcctcccgggtagctgggattacaggcatataccacaacacccagctaatttttgtatttttagtagagacagggtttcaccatgttggccagtatgctctttgtctcttgaccttgtgatctgcccacctcggcctcccaaagtggtgggactagaggtgtgagtaactgcgcccggctgagataatgcaaattaatcagcaatctaggtttgtatgaccagcagaaaggaaaaggatatattttcctgagtctcatttcctgtgatgaaataattggcgcctggtggataaatgtgtgatatggatcgtgcgtggagagaataatcagaaaggaaccaattccattgggttgacatgaacaaagtgtcctttttgagggtcagaatggttgactatgggcaggcaattccacatggctcaatggaatacttccatgagctactgatctgaacgtggtattggacagcttgtgggactgacgggaaaggggcgcatcactgcctcatggacagaaagcctggtgccctgctctagtggcaggtgcagcagaaagcagcttcaaagccaggagcgacaggagcacagcagagagacagccacagagaccagtcagcaactgctgtgaaagccaaccccccaggccaaaagccaagacacacaggacaaggaggagaagaagatgcaaaaagagatgggagagggaagcaaaaaggaggattttttttttccaaaaaaaaatcaacaaaggaaggaagggcagattgagatgagatggcaggggcaacagcagccacactggctatgatgagcaaacacagctgaggcggagcagggccccttcccggcagccctgggtgcaggctggacgctggcatgttctgttgggatcctgagagcacattcgtccaactgctcggcctatagggatgtctggcgaacagacaagctgagcctacccttccgcaggctctgaggatgttcaccgatgccccatgcagcaggcaggcgtccaagatgaggctgagctaaaccagcccagggggcaaagaggagacgaacattccacactccgttcagggacagccaaaggcaggcagaggacacaggcagccctacgagagacagacgtctcaccaatccttgaagacgaccagaaccagagcgcagccctcgaagaacatcgctcaatcatatgatgtgtcatacaggagacgagaggtgctagtgcccggccacactgcccgcagcagctcccaggatgaggatcagagactccgctccatctcccatggtgccaccatgggtgctgactgcctagggtgtccatgccatagtcaccagcatccccaaccaccagcagtcaccagagccagataactgagtcacccaagatatcatattccacttttgtaaatttcaccctcaaatgtcttcccaaactgtctccgtgttctatcctgtgccagtgtgtgctggctctagccactgtcactcattgcctgggttaccacactggtctcctaacccctcctcacctccatcccgtcctgctgccccaggaactgtcctcctaaaactcactgaatccagtccgcctctgcccagagccttccacggctcccactcattcaagacaaagcccaaaccctatcattgtccagaagtccccatggctcagcctctgcctccttaaccaggctcagctcttcctcctccagagcaaacgtggtccacctgtgaggaactatcactgcttctggaacaatccctctctaatgagctccacatgttcacactcttcctgccgcctggaatttctcctcccccatccactccgtgaattcttcattcctcgcctctcagcacaggtgttatctctgcagtgaagtcttcctagatccatggcccctggaatgacctccactgcagacttaaccacatggcttggatctgtgtctccccgctagaccaggaatccctagtgggcaggaatggattcttatttgatcttgaatttccagtacttagtattgtctgaggcttcatggatattaaatgtttattaaaatcaaaatgaaattaaagtgctcgattctgtgccaagtctcaactgaaacatcaagatctattggctgatgttggtgcagctgcctgtggattctgcagagtggctgggcctctcaacacgggagatggtggagaggctggcaagggctgatgagaactgagcgacaggccatgacgctgcagcacaactcagctctcagcccagagttgccactaaaactggggaagtcagagcatctggtcctgctgaccaacatctcagctgagggcaccctgaatcaaatccctctgagtctcagctgtgtaagaacaggtggctagacatcatttaaattaaactttggcggaaggacatttttattgctctagattattcaaaaatgttacttacaaatgaccactcaaggtgtagctagacaaaggctgttttctgtcatctttgaatgctttcagtgaagatcatcccagccccacacacttacaagtgtccttaactgcaaggtggccaccaagcttccatagagcttactggtcactggcaatgcccttaccattttcctgcccacaggtgtgtctcagtgattccatctgcaagccagagagttactgtaggtgaaatttccctgacatgattaattcaccacaaagcaccaccgtgcatttcattttaagacacatggtgccacttttatgctgtgtgttcctgaaattgtgttaaattaaatgcgaaggcaacggtaggaaacttgggactttgtgtgatagttgcagaagcatccagtaatggtgaagaagaatgtgaaggctggccctctaaatcctcacacagacggatttagagctgaattctaccagaggtacaaagaggagctggtaccatttcttctgaaactattccgaacaattgagaaagagagattctccctaactcattttatgagaccagcatcatcctgataccaaaacctggcagagatacaaaaacaacaaaaaaacctcaggccaatatccctgatcaacatcaatgcaaaaatcctcaataaaatactggcaaaccgaatccagcagcacatcaaaaagcttatccgccatgatcaagttggcttcatccccaggatgcacggctggttcaacatacacaaatcaataaatgtaactaatcacataaaaagaactaaagacaaaccacatgatcatgtcaatgaacatagaaaagacctctgataaaattcaacatcgcttcatgttaaaaactctcaataaactaggtattgatggaccatacctcaaaataataagagccatttatgacaaacccacaaccaatatactgaatgaggaaaaactggaagcattccctttgaaatctggcacaagacaaggatgccctctctcaccactcaaatttaacatagtattggaatttctggctgggacaatcaggaaagagaaagaaataaagaaataggaagagaggaagtcaaactgttcctgtttgcagataacatgatcctacatccagaaaacctcatcatcacagcccaaaagcttcttaaactgataatcaacttcagcaaagtctcaggatacaaaatcaatgtgcaaaaaatcacaagcattcctatgcaccaaaaatagacaagcagagagccaaatcatgaattcaccattgctacaaatagaacaaattacctaggaatatagctaacaaggaaagtgaaggacctcttcaagaactacaagccactgctcaaggaaataagaaggacacgaacaaatggaaaaacattccatactcatggataggaagaatgaatatcatgaaaatgacactgcccaaagtaatttataaattcaattctattcctattaaactaccattgacattcttcacagaattagaaaaaagtactttaaaattcatatggaaccaaaaaagagcccatatagccaagacaatcctaagcaaaaagaacaaagctggaggcaccatgctacctgacttcaaactatactacaaggctacagtaaccaaaacagcatggtactggtacaaaaacagacacagaaaccagtggaatggaatagagatctcagacataagactgcacatctacaaccatctgatcttcgacaaacttgacaaaaacaagcaatggggaaaagattccctatttaatacattatgctgggaaaactgactagccatatgcagaaaattgaaactggaccccttccttacaccttatacaaaaattaactcaagatggattaaagacttaaatgtaaaacctaaaactataaaaactctagaagaaaatctaggcaataccgttcatgacataggcacaggcaaagatttcatgacaaaaaggtcaaatgcaattgcaacgaaagcaaaaattgacaaatgggatctaatttaactaaagaccttctgcacagcaaaagaaactatcatcagagtgaacagacaacctatagaatgggagaaaatttttgtactctatccatctgacaaagatgtaatatccaaaatctacaaggaacttaaacaaatttacaagaaaaaaacaaccccattaaaaaatgggcaagggacatgaacagacacttctcaaaagaagacatacatgcagccaataaacatatgcaggaaagctcaacatcactgatcattagagaaatgcaaatcaaaatgagatttcatctcatgaaatcacaatgagataccatctcatgccagtcaggatggtaattattcaaaagtcaaggaacaacatgtgctggtgaggctgtggagaaataggaacgcttttacactgttggtgggaatgtaaattagttcattcttccattgtggaagacaatgtggcaattcttcctcaaagacctagaaccagaaatacaatttgacccagcagtcccattgttgggtatatacccaaagggatataaatcattctgttataaagatacatgcacaagtatgttcattgcagcactattcacaattgcagagagatggaatcactctaaatgcccatcagcgatagactggataaagaaaatgcggtccatatacaccatggaatactgtgcaaccataaaaaggaatgagatcatgtcctttgcagggacatgggtggagctagaagccattatcctcagcaaactaatttaggaacagaaaatcaaacaccgcatgttctcacttataagtgggagcggaacaatgagaacacatggacacagggaggggaacaacacacactggggcctattgggcattcgaggggagggagagcatcaggataaatagttaatgcatgtggggcttaatacctaggtgatgggttgataggtgcagcaaatcaccatggcacacgtttacctatgtaacaaacctgcacgtcctgcacatgtatcctggaacttaaaataaaaaataaaaaaaagaatgtgaaggtttaagggactagacatgcctccagtccttttcagaaaaagaggaggcatcagtaatctataaagaacctgcactggggaccacagagctggatttaacccctgctctgctccctgtcctgtatcagcctcttagtcccgtagagcctcgatttcctcatcttcacaatgccaaccttccagcgttctattctgtgatttgtaagcctcccctcccctcccctcccctcccctcccctcccttcccctcccttccgctctcctttcctttccttgttttaaacatagggtctcactgtcacccaggctggaatgcagtggcacggtcacagctcactgcagccttgacttcctaggctcaagcgatcctcccacctcagcttccccaggagctgggaccacatgcatgtgcccccatgcccagctaatttttttttttttttttttttttagagacagggtctcactatgttgctggtctccaactcctggcctcaagtaatcctcccacctcagcctcccacagtgttggggttacagccatgagccactgggcctggcctgtaagccttttcttcaaatactcaagcatgaatccatgaaagaggccatgagcccccctccatggtttgctggcagtgctctctttgagctgaagcccaggacactcatgtctgcctgcttcatccacttctctttcttctgcttaaaactactcctgggactgcaaacgaggatagttttttctcttatgtcatatttactccctaccatcaagcaacaaacttcactgacatcagaggaaagttttgtgagtacagtgggccggttacccatctcttccctgctctccctgggtccacgttccgcccttctctgtctagtcctgtgtcccaggaggctgcatcgctgggctccctctatccctggctctgtcaggattggtcagcgggaggtactggcatgagattggcaggctggaggacacggctagcccttctcttgaacatatatgtgagtgcacatgcctgaacatgaccatccattccagctgtcacagattctaggtgccttagttcacatgtctttaaacacacagtgccccttcagtgggttgtgtgatgctacgtaaaatcagggaaatggggctgtttctgagtaagctacaagacctcagtctccaaacacaaatggtctccacagggactaacaagaaatctttgacatcatcaatcacaaagctgccttgaagactctagggaactgagtggctcctctgatttggttaaacctggtgaaaatatcttaccataatgacagaatagtcttctagacttaatcacattgtttggatctgttcaccatgtgtgtctcccactagactgcaaactcctagaaggcaggagctgattcttgctcaattctgaattgtcagcacctaaaattccctaggacataatgggtatttaattaaatgtttatcaaggttaaaagaaaattaaagtgtggcacagtggctcacgcctgtaatcccaacactttaggaggctgagttgggagaattgcttgacgccaaaagttcaagaccagcctgggcaacatagtgagattctgtctctacaaaaattttattttaaaattagcctggtgtagtggcacgtggctgtaatcccagctactccagaagctgaggcagaaggaccacttgagcccaggagttcgagactgcaatgccctatgattgcacccctgcatttcagcctgggcaacggagtgagacccagattctaaaaattgcacacattggccgggcgctgtggatcacccccgtaatcccagcactttgggagaccgaggcaggtggatcacctgaggtcaggcatttgagaccagcctggccaacatggtgaaaccccatgtctactaaaaatacaaaaattaaggctgggcgcaatggtggacgcctgtaatcccagctactcgggaggctgaggcaggagaatcgcttgaacccgggaggcggaggttgcggtgaggtgagatcacaccattgcactccagcctgggcaacaagagcgaaactccatctcaaaaaaaaaaaaaaaaaaaaaaattagccaggtgtggtggtgcgaactataatcctagctactcaggaggctgaggcagaagaattgcttgaaccagggaggcagaggttgcagtgagccgagatcatgccactgcactccagcctgggcgacagagcaagactccgtcttcaaaactaaaaaaaaaaatccgggtgcagtgtctgacacctgtaatcccagcactttgggaggctgaggcgggcagatcacgaggtcaggagatcgagaccatcctggctaacaaggtgaaatcccgtctctactaaaaatacaaaaaaattagccaggcgtggtgacgggcacctgtagtcccagctactcaggaggctgaggcaggagaatggcgtgaacccaggaagcagagcttgcagtgagccgagatcgcgccactgcactctagcctgggcgacagagtgaaattctgtctcaaaaaaaaaaaaaaaaattgtacacgtcactaatgttataccaccccgataactgccatccgtcttcctctgttctgcttccagaatgcaggcaaccaggccttcacggtccagtgggaactgaaagaatcctctacagaactgagccagttgtgtcagttttctattgtggaaaaacaaatcactctcaaacttattcaccccaaacctcaacgacatcatgattccaattggtctgttcgacctaagtgagcatctcctcttccctgtatgttgctccctagtatgattcacatgcttgccttcagctgagagccaggccgaggctggaacattcacagtggccttgctcacatgtccagcagttgg

SEQ ID NO: 5662 - DNA, 560678 bp, Homo sapiens
  CREB5 gene - 28112180 - 28632857 of chr7; NCBI Entrez Gene ID: 9586; Build 35; sequence includes 20,000 bases upstream of initiation codon and 20,000 bases downstream of termination codon of the gene
tacatgcttgccatccaaccaccccgtcttggcagtgcagatgaaaaacggaacagtttgtgttgggtccagaatttgccatggacaagatgccaggacctgtacgctttaggataaatttctcatcttcaaatttctccccgtagatggacttgccaccagtgccattatggtgcgtgaagtcaccaccctgacacataaatgctggtataattctgtgaaagcagggacccttataaccaaatcctttctcttcagtgctcagagcacgaacgttttctgctgtctttggaaacttttctgcaaacagctcaaaggagacgtggtccaagggctcactgtcgacagcaacgtcgaagaacatggtgtggttgaccatggctgatagtactgggactcctggcggcagtagcctctgcaaagccggtcatagaaatttgagagtttctgctagatgtatgttttagctacttatttttatattaagtggtaaattcttgactgtaggtaccttgtcttaatcccctttgtttttatttttttctgtccccagggcagccgtgtttgcttttatggattgtgtagcacacagctctaaagagtgcctagggttgaacagtgcacgtctgtctcactgtacagggaagcccggaccgtcacaataaactgcaggcagcaagtctttttatttatttgctgagttaaaatgattccagtaagttccctctaaaaccaccgccagatttttggtgggaagaatgcattggagacaggcattaaacactagtccaggttaatatttgcattgaatgcctctcttatatcttttagcatacattaaaatggatcctagccttgttctagtaaaacccacgactgagtgaaccaaggatgagactgccggcttgtagtgcacactctgcagggtgccaggaggctggcttcatccatgttgccatgtttcctaaggaatatcttacatctagaggctacggtgtctcacatttttgtccctagctatctaccttgtgtgtaccttgcattccttcctttcagcatgcagaattgaacttggctctgaagtaaaacaatacaggtttttgagtgatccagcagctgttctactttggtgagagttttcttctccacccaagtcttgttttccatttctctctccatcactttctcttgtacccccacctcttccagcttactctacccaattaccacgccagaaacaattcctatctcttttcccaaagagacacttcctttattcaactgcttaaataaataaaacaaagtttccctttcccctgaaccacctgctcaaaatacaagcgggagaccaattataacccaggagacaaatcccctttgaacagctgatccagggaatggatttggaggcttatcttcggtctgaatcacagggtcatgccagggtcatccctagagcaaattgtccccttggcttccactgagcttaccctgaaatgtgcacactgggtctcttttcccatggattatgaagctatttggtgaaggctgcccatttgatgtactaatcagtatcttgacataacacatgggaagagttttaaagtttgcttttgcactgcaaggcttctagggtattttctaattatgtccttgtaatcacagacaaaagcctgtgactgtaaatctgaaaaaatgacttccaaagcatagggcagtgcttctcagactttcatgtgtatacacatcatccagggatgtcatgtaaatgcaggttttaattccctaggtctaaggcagggcctgagattctgcattctaacaaggtttcaggtgaggctgacgctgtggtccgctggactgcactttgaggagaccctacttgatggacagtcagccaggaaactttcagtttgaggcataattactgaaacttcatattccttaacgactgcccaagggccttgaatggtagacacacctgtgtttggtagacgcacctgacagtgataacctgacttcagcataccctgagaatgaccctgcatggcagatgcacacaaacgtgtatttggagttccgagctaaggaatccagaagttgccaacctggagattcattccttatctatgaggaatatctgagcccctcgcccatcccaaggaacacaggctgtacaggagatcaaagccctgtgttttaggttaaatgaaggttaccagttggaggttgttaggaggacggtgctaagtgaaaacgctgtttcgactgcatgcttcttacaagcggctctcctgccctgtctgctgccactgggcagagcagttctgtgtagcccactgtcactggaccatccctgtatgtaagtaagtttctctcaacaaaccccatgtctgctttgctggctctgggtctcttgttcgggctcttgaagctggtgcattccctattggagttgagaggggtctggcatgactgatctcctctctacaactgcccaaacttcgctgagcattctttatttttgcccccttcccctagttcaaatgttttattgttgtagtcatcatctgaatgatatttatttgtttacttgtctgcctcctagactctgagcatgtagggataagacagccaactctcattcatctttggatcaagggcacctagaacagcatctggtacacacacacacacacacacacacacacacacacacacacacacgcacagatacacacacacacagagtaggcactcaacaaatactggataaaagaaaaactgatagattaaattgacaaaattaaaaccttttatccataccaaacaacataaacaggatacaaaggcaaatgataaactgagaaagatatttgcagtgtattaagatctcttatgagttgttatggtttgagttgggtctgtcaaaagatacgttacagtcctaacccccagtacctcagaatgggaccttatttggaaatagagtcattgcagaaataattagttaagctgcggagtagggagggctcttaatccaatatgactggtgtcataagaggaggagacatggacatacagggagaacctcatgtgtggatggaagcagagattcgactgataacagccacaggctgtggaacacctggggctgccagaagctggaagaggcaaggaaggaacctccctagagacctcagcaggagtatggcactgccaatgctttgattttgcacttgctgtctctagaacagtgagagaatatatttctgctgttttaagccacctagtttgtggtattttgttacagcagccctaggaaactgatacataagcaacaagaaaaagaatgatctagtagcaaagggggcaaaaaacccaatcataggtagtgcacaaaaaaatgcaaattgctcataaataaacaatgttcaagggctagtaatcaaagcaatgcaaaatgagcacaacattgaaatgctatttttatcttattatatttgttattttaattaggaaaaaatacagtgttgtgagtttaggacaaccaggccctcttctgggcttgaaccaccagtagctgttgatatgatctccaaatatatcttaagtaattccacttctctccacgtcttctgccattgcttccttctaagacatcattgtcattgccgtttacttttttttttattattatactttaagttctgggatacatgtacagaacgtgcaggcttgttacatgggtatatatgtgccatggtggtttgctgcacccatcaacgcatcatctacattaggtatttctcctaatgctatccctcccctatccccccaccccctgacaagccccagtgtgtgatgttcccctccctgtgttcatgtgttctcattgttcaactcctgcttatgagtgagaacacacggtgtttggttttctgttcttgtgttagtttgctgagaatgatggtttccagcttcatacatgtccctgcaaaggacatgaactcatcctttttttggctgcatagtattccatggtgtatatgtgccacattttcttaatccagtctatcattgatgggcatttgtgttggttccaagtctttgctattgtgaacagtgctgcaataaacatacgtgtgcatgtatctttatagtagaatgatttataaccctttgggtatatacccagtaatggaattgctgggtcaaatggtatttctggttctagatccttgaggaattgccacactgtcttccacaatggttgaactaatttacactcccaccaacagtgtaaaaggattcctatttctccacatcctttccagcatctgttgtttcccaactttttaatgctcaccattctaactgatgtgagatggtatttcatcgtggttttgatttgcatttctctaatgaccagtgatgatgagctttttttacatgtttgttggccgcataaatgtcttcttttgagaagtgtctgttcatatcctttgcccactttttggtggggttgtttttttcttgtaaatttgtttaaattctttgtagattctggatattaactctttgtcagatggattaaagatgtaaacataagaccataaaaccataaaaccataaaaaccctagaagaaaacctagatagtaccattcaggacataggcctgggcaaagacttcatgactaaaacaccaaaagcaatagcaacaaaagccagaattgacaaatgggatctaattaaactaaagagcttctgcacagcaaaggaaactatcatcagagtgaacaggcaacctactgaatgggacaaaatttttgttgttgactttttagactgctgaattaatctaaatagtgttgttacttaccttgcttagagctgccagaaggaatcattaaaaaacattattagtcagaccacatgattcctctgcttaaaacccttcagtgatagctttcattgcagttagtgtggcccctgccaagctcccatcttctctgtcactgaacttcagacccgtggcttctttcagttcctttgtggagctcttcttgtggggccagcagacattgctagtccctctctcagaatgcttgtcctgccactcttcacctcctggtcttagcttcagtgtcccagtggaacttccttggcattcctcctcgagctctgcctaagtgaagtcactgtattatattttctcatggtattctgttggttttgctcatgatttattactgtcatgaatattgggtatttgcttattgtctctctctctctacctgtattgtaaactctataaaggcaaggactgtatttatgttgtcccccaactgtaactcagacttaggtatagaagcaaacagataataggcaatcaatgtatatttgcttactgaataaatggagattaacttggcaaaagaggtgaaaagccttagaaatgtgtatatcctttcaatcagtaatcctatttctaggaatgtattttaagaaaataattagggatgtgtgtcaagactagtcacattgcaacttaaataacagtaagataaattttagcaatgtattgggaacaaaaataagtatctaaaaatgaccaatataataaattatgatttgtacattcaaagtaatatcacataggtaatcaaagtggtgttgtagaaatatatttattgacatatagtttcagtaagcatatatttttgtaaaaataaaatatatatatatttatatttttctctaatgcacagaagaatatttagaaaactgtataccaaaatattaattgtggctccttttaaaatttatttaaacttatttaaaaattgtattatgtgtatttttaaaacattccataaaaagaatatttctcatattattagaagaataaaagtttttttgagtgaatgagagttacctggaatgtttggtctgaatttcaaactttcattcctacaaaaaataaaatgactgatataatcaaaaagataccttctaggtttcagatgctgtcattcacttccacacaagcttatgctgtgaaggaagacatcccatctgcagttaaatcccaggtcatcactcttttctatggttgaaagtttattctgtatttttttgttggataaactctttcttttatgttggagttttttttcatcttaggttttgggtgagaattgaatgtagaaatctgcagtttctcctgtcaaaggaatttcaatactttggtaggcatccaaacaacacattctaccatatagaccaaatattgtgtcaaaaaatgggctctggatcaaatttatgaaaacatattggatggattttatcatttgaaaagtttcagagataaaattatatctaatcttagatcttcatttcctgatatgtctttacattaggaagcccttaggttctctggagacctttgttctaacttggcagaggtgacctgtgttacttctttattttctccttggacgtggctccttggttttcatagccacttgcaagcacgatattggtttgtttccaatctccagattcgactgtgttacactatttttcactagaaagaacaagttaagggcacacatttgtttgtgtatttacttatgtacacacacacacacacacacacaaaattgacaatataacattgggcaatttttaatcaatgtcttgcagataatgaagctatatctattttaaaaagtggtacgcactctctctttcctttctcagagtctgaaatgctattacttgagagagtggaggaaggaagaaggaatgatttaggaggaacaaggcagggtatgggagtgaatgggtaaggagaaaattcttagagacactgccaagttcaaactaaagaaaccaattaataaaataattactgcccttccatggcccctcttttgtgtactcacagcacttactcatgtgggtagttatcattgctcaccctgttgctatgataaactccacttccaatgctaacgacgtgtgtgactgctaggcctcaatgtcctcaattacatctttgtgagaatcaaatgtgataaggcataacactcttggcatggtggctttagatattaacaactcttgctatgttggttgtgcttctatgtctatcttcatcaggggttgtgtctatttttctgcatcctcctgggtatctagcatcgtgatcacagcattacagatgctcactgagtattcataccatttaaaagaaatgttctgagtgcagtggctcatgcctgtaatcccagcactctgggaggccaaggcaggtggatcccttgtattcataagtttgagactagcctgggcaatgtggcgaaaccccgtccctgcataaaatacaaatattagctgggtgtggtggggcatgcctgtagtttcagctatttgggaggctgaagtgggaggagggctggaacccaggaggcagaggttgcagagagccgagatcgtgccactgcactccagcctaggcagtcgagccagaccttgtcttaaaaaaatgaataaataaaagaaatgcataaagctcctgttttcactaaaatgcattctaatccaggctaactctataggaaattacaacttttaattttccaattaacattttttggggatgtggttgaatgcaaaaagaattaacacctgttttttttttccacatgattcatttaatcattttctttctatttaaataaaggaaaacatttgaattttgcacattttgacttctgtattagtcaattttcacattgctataaagaatacctgtcactgggtaatttatgaagaaaagaagtttaattgattcacagttccacatgactggggaggcctcaggaaacttacaatcatgatggaaggtgaaagggaagcaaggcacatcctacatggtggcaggagacaggcagcatgagggaggagctgccaaacactttaaaaaccatcagatctcgtgagagctcactcactatcatgagaacagcatgggggaaactggctccatgacccaatcacctcccaccaggtccctcccttgagatgtggggattacaattggagatgagatttgggtgggtacacagagtcaaaccatatcaacttcaatctttcattattcatgtatcttcttaactgttagccccagattccgctaatttttataatagtaattatgtctcagattttctggtttaaatatttagtttctttctactttactttgatctcctcctcctcctttttcttttaaaataaagacacagctaacctaatgattttgcaattcagtattccctacccaggactgattacataaattctaggtgtagtaaaaaataaaaatgcagtgtccctttttccaattatcaagaattttagagacagcaacagcagagcatttatccaagtgtggctccctctgagcccagggccctgtgagactgcataagttgtaggcccatgaaatgggtctgtgctgtgggtcctgtccatagcaaagacattgtctttgtacagggcagtgattaagagtgtagattctagagtcattagatctggattgaagtccttgctttgctaattactagctgaaaggccataggcaagttacttattttctctgggctttagtttcttcacctgtggaatggggaaaatagtatcaccaaaccatattaaatgagctaagatatatgtaacatgctctggcatagtattgcccaataaatgtttgccgtgtgtgtgtgtgcatgcatgtgtgcatgtgtgtgtgtgtgtgtgtgtgtgtgtgtgtgtgtgtgtgtgtattgtcctacattgtccgattgcctgtaggcatagcattcacatctttgaggattgaagctccatcatttttctttctctttcatttattgaaacagcttttgtgtgtgtatcacagttgttaagagttaacctgctccttctcaatcccaagaatttcaaatgatacataaaatcttcataatttgtaaccacaagtaaaagtcaaatgctctaatttacctgcatcttgaagcagtgtgggttaaaggcactagaacagcttggcctgttttctgtttcttgctctattacctggtctgtgtggtatcacacagagtacttccctttgctctctttccattgcacaatgtatgctatgtaacatttctacaccctgatcttttcaatatgatatttatttagttataggtgctatagaaacagacagatcaaggtgataatcatgtctccaaaaccaggctggtgatgaagagtgggtctgaccaactccaaattgaacccattttgaagagggctttcctgaagggagaaatgctccatggctcattggaagtgaatacagacttgtcaggactatggccttggagcatctgccagtggtgctgagaagacagaggtcagggacaaaagcctaagccagaatgaagtctgtaccatttagttgttgattgaccaagtccttccctgggccttttcttgtcacttaagacatcaggatactattccctgcctcagatggctgtaataaggattgggaaaacataagggaaagtgttttgtaaacataaccatagctcctatagtctgtcacgatctcaaggaacagctgaggaatatatgtctggcaggtgaacaaaaatcagtgcttgtaatgattcttccttcaggagtcccagggtccagaaatttgcatataaaggaaactagtgactttgtgattcagaatatttataccatgaaacaaaagctggtgctctgtagtcagatagacttggattctggtccctacccagccatttaccaatcgggtgtctttgtgtaaattgcataaacgctctcagtctcagctttctctttggttaaatggaacgaataacagtgccttacgtggtcataggattgtccttttacagttaaatgagataatgcaaagccaaccacttggtgctgtggaattgcagcttgcagaccacattttgagtggaagagtctaaattacatacagtgacaggggcaagttacagtttgttatgaccagcccagcaagcatttttccaggaatgatttggaacaatcccatcacctgtggaacactcactttggctcagagagtcaaaaagagtcttttaactttattccttcacaaaacaaattaaaaatcagtagccacggatcatttccaagggggcctttaaacacttcttgaaaaagagcttggcatggctttaggcagctttatgcaggttttagctgcattttaacctataaaaaccaacttatgaatctatgaaaaccacagtcaaattagatacatttcaaaaataattgaggtcagaagtagctcttctaattttcttgggccattacagcattggattatgaaagaaaattgtgactgtgaaattgaggccttctcggggtttattctgaagacagccaagctcgatctttatgaccatggcctcaaagcagttgaagctattctcttctaatatttaatgttgtggtactttcttcagatcccccattcaggattgaggggctcatcccctcaactgccaagagcatgttcatagctgggtttgtccttgggaatggcccactaatggaagagagcagccttgacaaggtcatgcccatccaatggtggggggaggggagggctggtggagagggaagaactcaacttcttgcctgtatttgggacaacactgaagggctccagagcccctcgagcgatctgttgaaacctttattgtaactgcatctctgttcagtgttactctctgtccaacctgccttctatagatactgtttgtgttactcccagtaaaccccttacatagggaacctgacctaagatacttctctaggattaccttctgagacttcaataacctaagaccagtggtctcagcttgggataattttggcacctacgggacattaggtaaagtctggagacatttttggttgtcacaaatagggcggcagtggggagagggtgttactggcatctagtgggtagaggccagggatactgctaaacattctacaatgcacaggacagctctgatatggtttggctctgtatcctcacccaaatctcatgtcgattgtaattcccaatgttggggtggggacctggtggaaggtgattagatcatgggggcagatttccccttcctcttcctgtgatagtgagtgagttctcatgagatctgtttgtttaaaggtgtgtagcacatcccccttcactctctcttcctcctgctccagccatgtaagacttgccagcttcccctttgccttctgccatgactgtaagatttctggggcctccccagccatgcttcctatacagcttgtgtaaccatgagcccattaaaccaattttctttataaattacccagtcttaagtagttctttacagcaatgtaagaatagattaatacaagcccccacaacaaagaactatccaccgcacaatgtaatagagtagaggttgagaaaccctggattatatatgttttgatcatggctctttatttccaagtataagagggaagatggaaaataagtgttgtaattcaaattatcaaatagtgcttaaggtgagaagaaaacctatgatcatgagctccagcttccctcccccagcctcatttcttctttccatgtggctgttgactccagataccagtttgctctaaaaatgccctctgcagtaaggccccagaacttctcctattgccaattacagcagacaacactggaaaatatgaagcagcacttctcattaatagtgtttctttgcttcctttttttttgtttgtttttagagacagggtcttgctctgttgcccaggctggagtgcagtggtgcagtcatggctcactgcagcctcaaactcctgggctcaagtgatcctcccacctcagcctcccaagtagctacgactaaaggtgtgtgccaccatgcctgactaatttttattgttttttttttttttttttttttgtagagacaagtttgccctatgttgcccaggctgggatagtgttttttaaatgaggtttttcctctgtcaatctgcttctgctaccccatccccctggctttccacatcaataatgactctactcacctattgctttttgggaaggaatttttcattaactaagaaatagctgatttgctccttgacttagtgctgggaggtctcatgctttcatgaactggagctatttcttgacccaaatcaggccagactgagtttgcattacaaacgtgccacattcagcaaatagttgacattgcagactgtgatttgcctttgaaggccaatgctgactccccgaggaatcaaagctttcaccccagtgggggccaggcagctggtgacttctgcatactcctcctctcccatttgttcaggaatgagacacacttgggggcttagactacggttctctgaattgttttcattcagagggtgaggtgggggaaaaatatgtggtggcagaaaataaatgatgagtccttttttgcgcatgtcaagtatgagatacctattagccatgaagtagagaaagtgggtgagaggaaatgagaggtcagggacagagagaaaatctgattgacattgaactgcctgtgggatagaaggaaaactagtagattgtagggttaaggacaaagaggggaaagtattttaagaaggaggagctgtgtctaatgctgaagagaagttttagtaaagtgagaacagagaaagaaagttagattcccaaactcagaaaattaaatgagaaaggaacaggcagctaggacacccacttggcgatggtaagagtttgtgccttggctgcagtatattgattaataacagtctgctgaaatggtctgtaaaggtaattttgaacaccctctaccactgtcccctgccttcacttccctcatctcaccccaaattgcaaggccctgagcttttcatcattacaagagtgtttaatgccctcacctaactaatcaagaggattcccccaagtgaaacagaaagggagacgtgacagaaccatggccctgagtgatttgtgctcatggtcccttgagttgcctcctttccacaccatgccctcactacattggttatgggcagggctgttagacatggcggagtggcagagcattggtatgaagccactttacctctttgagccttggtttatgttaagggagagtttgggactagaggatctttaaggccccttcaggctccaatattgcatagatctgaagtggttccatttcatttaccagcagtgaaaagcagcgtgcattcagctgttccgtcaatttagtcaaagcaacacatttccccttcttgaatttaccttcaacagagggggaaatgtaggcggcattattcccagcatgtagaagctctgtctgagattcttagtattgcagggtacatttacttttgctaatgatccctgaagctgactggtttcaatcgtgtgattcgagcaaagcacagacactctgatttgcaataacgatgccgtgaaatcaatatcgaaaaaccttgggctatatgaaactgctgctactcagtgaatcatactaggcaatatttcctgaaagataatgggtttcaaaaccaaacataaatcttcagtgacaggttggctatttgtcatgttttctggtggtggaattacagcagcttcaataaaatccatttggtggttgggttttagattaatatctgatacaatcatggtcttagggccacaagaagtaaagcttagagggagggaagcaagtttgcaattattgtagggttctagtaccccttgtgccaaatgttggcacagaaattgctcaaaaattacaaaaaagcaatacaatgtgggactttgaatactaagcactgtaaagtgatactatattcttgaaatagtaaacatgtcttccatatgtggctaagtgtgcccaagactgccaactgtaatgcaaagcaaattgatttgcaactgttttgttctcaacactttaactcctggctttccatttgactccttgacacaaaataattaactctacatttttcttgacttagcagaaatattttccccatgacaaggaaaatgaaattgattttctgattaaatgacttcagttagtccttctgagttaatattgcttccctgtgaccgatgagtcagcaacatttattgaacccccactgggcaaaaagtatttacaaggtgttacatgaatctataagaacaataactttctggccttcctaacccatccatgtttggaattaagcagctatttctgtctagatgccaggttgacacctaattctctcaatattgtggagaaagggaaggttgtcttgacaacagtgtggaaaaaatcaacttgaaaaatttatttaacccaaaactgtagtcttagcaattgaatgtggatgccagttctcttggtaatttaggccagtatcaggatggatacctctttttaaaacaatgaataaaatgataggtaacatagtcacaggttacaaaaactaggaaagtacaaaggatacacagtaaaaatcctccatcccatcccagtccctcaggtgccattccagtccccataggtgtccacggtccccagttttcttttatgtccttccagagatatgaaatgcataaacaagcaaaaacataaagaatatttgttttttattttattttaatatgaatagtgacatactatatacatgtgctttccaaataataatatttattggagattcttttatagcagcacaaagagaaatgttcctgttctttttaatgatcccctagtattccattgcatagatgtaccatgatttatttaacttgttctctatggttggatttgtttcctgccttgatttttacaagcaaagtgcaatggataactttgcataaatgtcacctttcttatacactagcatagcgacaggggaataaattactagaattgagatcactgagtcaaaaggtatgcaacatgtatttagcggataaatggaaagatgaatgcatggatgaatggaggctgacttgatgtagatgatttagtgtcattttaatttacatctctcttatcaaaagtatacttgaggccgggtgccgtgttcatgcctgtaatcccagcatgttgggaagccaaggtaggcaggtcacttgaggtcaggagttcgagatcagcctggccaaaatagtgaaaccccatttctactaaaaatacaaaaattagttgggcgcgatggcatgcactgtaatcccagctacttgggaggctgaggcaggagaattgcttgaacccgggaggtggaggttgcagtgagccgagatcacgccactgcactccagcctaggcaacagagtgagactccatttcaagaaaaaaagtatacttgaacattgtgtcatgtttcatgtcttcatgggtggcagtttccctaaaaattacaaatggaactatcatatgatccagcaattccaattctggatatattcatacattttcaattttgataaacactgacaggttgccctccacaggggctgtattaatttatttttccaccaacaaggtatgagaatgcctatttcttcatatccaccctaacatagcatgtaataacatagcatgttaaaggtatgtcagccatggttgggtgcagtggctcatgcctaaaatcccagcattttgggaggctgaggtgggtggatcacctgaggttaggagttcgagaccaacctgaccaacaagatgaaaccccgtctgtactaaaaatacaaaaattagccaggtgtggtggcaggcacctgtagtcgcggctacttgggaggctgagatggaagaattgcttgaacctgggaggtggaggttggaatgagccgagattgtgccactgcactccagcctgggcaacagagcgagactctgtctcaaaaaaaaaaaaaaaaaaagtatgacagccttttttgacttttgctaatctgaaagtggaaaattgtatcttaatgctttcgcagtgttgggagaaggcagatcaggggctggatctagatagaatccaggtctactgtcttctagtccagaactcttccctccagagtctcatacagaagtcacaaacaacacacagtaggcatgcaacgtatgtttactggataaataaagaggtggatgcatggatggaggatgatttgatgtagatggaatggttagtgtcattttaacttatatctctcaagtatacttgaacattgtgtcatgtttcatgtcttcgtgtatggcagttcccctaaaaattaaaagtagaattaccctatgatccagccattccaattctgggtacatacccaaaatatttaaggcttataaagacttgaacaactatttgtgcacccatgttcatagcaccattatttcaatagccaaaaggtgaaggcaacccaagtattgatcaacgaatgaatgaataaacaaaatgtatatccacacaagggaatattatttcgtcttaaaaaatgggaagtctgacacatactataacatggatgagccttgaagacatgctaagtgaaataaaccagtcacaaaaagaaaatattgtatgatttcactttccagaagtacctggagtaatcaaattcatagagatgtagagacaggctgcggaatgggaggattggaagttaatgttaatgggtatggagtttctgtttgggaagatgaatgatttttgtgattgttgtgtgggttccacaacactgtcagtgtgcttaatgccactgaactgtacacctaaaatggttaaagtggtaagttttgtattatatatattttataacaacaaaaagtggggatattgagttctaacaaatatcttttcagcatctataaaaaggatcatgaattttctcttttgctgcaactatatgatgaattaaatcaacagatcacctaatattgagtctttcttggcatttcacaaaataacctcaaccaggttatggtttaattattttaaaatgctgttgggttctttttactaatactatattcaggattttaaaaaattgaagcccataaatgagattgttttgtttttcttttgttttctcttccttctttccttccttcttcccttctctctttctcaccctcccttcttctctcccttttttctctccttccttccttttgtgctatgtcttctatttttctcctgagtctctccttaatagctacagtatttttctctgactcagctacaccattgccagaatattccagctatatttctacttagtcacaaaattctgaatgttttatcctgttgataaattatttctattttgaataaaaaatacatcctaaggagagactgtgagcttttcaaatgatgttgctatttgagaaattagatgacagtgttttgaatcatattaacatatttcacgagcatttgttggtcaccttctatgggccagtgactaaattagatgtggggaataaaaatatggctgagataagacttttgtttggtggagacagaggagtaaacaagcaattgctgtgctgtaagataagggctatgaaagaagcatgttcaaggtgcacagtagggggcgcctgggggcctcagggaagacttcctagctgaatcctccacctcaaatcttgtttcttatagtatatgcttcttcacctaaactcagaattggcacgtagcctcatgtctggtaaaatctccctcttctacttatccaagggttgtcccaagatccaaaatacttctggtgactgtttgtaccttctttggattcatagacttctctggagataagcctccagaaagtggcctgcccaaggacacacagacagtaagtggtagagtcaatgaaggactgatttactgtcaaaaaacaaatgtgctaggttcccattgtgtgctgagaacaggctctggggatgacaatggagaaactggagcggagcccttctgagaaggacttcaagatcctcaggaaatagccagacctgatggtgtgggcctctagtcccagctactctggaggctgaggcaggaggatcacttgaacccaggatttggaggctgggactataccacatcactgcagtccagtcttggtgacagaaacagaccctgtctcaaaaaaataaaataaaataaaaaaataaaaaaaaattcaagaagtaacaaaggtctttgcactacttacctagtgccaatctgggtaattgtgtttgttcagtctttgtctttctgctaggactgccaacaaaagtatcaacgcttgctaagtgggccaatgttgtgttcatgtcattttcttaggtttaagcttgctctctctgcatttgtgccagggaagatttgcagctcctatcactttaaaatgtcccctggagttacattttgttagatcttgagctccagcaagattctctgccaaacttagtacagtcttggggcctcttgagttgtggaagccggaggtgcgccatctgcttactttaaaatcacagtgaatgctgtatggaactggttattttcagttcctttttttttatttccgaattttatttaaatttcaggggtacatgtgcaggatgtgcaggtttgttacataggtaaacgagtgccatggtggtttgccacacagatcatcccatcacctaggtattaagcccagcatctattagcaattcttcctgatgctctccctcctccccacccaccttcctacaggccccagtgtgtgttgttcctctattttcagtttctatataactttctgttccttagacatttgtttcttggaacctacatctataagaagcttagctatatttcatattgagtatttttcccatgagtggaaattctaaattgaaaaaaaatcaactaatcctacacacaattctgtaacagtgtagtctaggtaaaatgcaatactagaatgccattcaaattctttacccgagaattagctgcaatagccagaaactaatgtggcttttcaaatatttaggtttagcgtaattataaatgtacataactaatgattcatgaactctcaaattatacatctgcgtttgattttatgttgaagtgtttttaaatcctcagaaaatgatgttaccaaatgtttctggctcactaaatgttctatttaaaaaaattcttaatcaaaggcaaagactcatccggcaccttcatataaaatttgatgagtgggagatacatttcttgtaatgtaaatgtaaatgcatccggctgaaggaattcagagacaatcttctggaatcttaaacacaattaataacccaccaagatgatgatcactggtgttttatattccttctgagaaaggctataagacaaagcatggattgactgaagatggaaatacatgtgacaaagtcacagtgtgaatggacaggttaggtcccccatcccatcatcgtcactgtcttacctgactgcttactgcttatcatcctgacggtgcaggattcttccttggccagagaggattttgctggagtcagaaattcaaccaaccgtattgccactgggtggcacaattggaagtctctaaagaggtctgggctttaaaagggcctctccctctgtccgaaggactgggatttataaatactaaagctgccggccattgtgattgcttttactttgggactgtttataaaagtgagggagtctgtggcctttcaaagagtgtggatttcacattggaagcctctgtgttgttattctataggaaattaactggagtattttttaagtttgtcttatttttgatctgatgaatccaaggagtggagcaagaggcagattttggacacggttatgagaatgacagaaactgcctaaagcatttatgctctggcattcgtccctgtttctggaggtccagtaaggtaggcaacagccatgtgtagctatttaaattaaaattaattaagattgaataaattaaaaattcagaccctcagtcatactagccacatttcagttgctcaacatgtggctactagctaccatattgtacaatacagatatggaacatttccctcattgcagaaagctctaggcaaggctactgatattcttttgttattgtcctcaaaagaatagacaaatactggatgttttttgctcatgctacctgaaaaccttaggaagtgttattcactagcattgattgtgcaatgtgacccaacaaacatttatttaacatttaccctatgttagatagatatattttgcaatgctgcaatgttgtgttaccaaagtttaggagccagggcaaactaatatacacattggataatgtgtttgatggacatcaacatggtcttgaaattgaatctacatgttgcgtattgtaagaatcaatctataccactaagattttgataattaaatgtaattattcagtcagtcctaatttctccggatccatttttgtgtaatgtgttgcccttttcatcctgttttccgttttgttatttatactgctttttagctttatttatttatttatttatttatttatttatttatttatttatttattactaccttaggtgtttcatttcactcatacagggagggatgctcaccttgtcaaactgtgaccctccattacccgtgcaaggattgcttgaactaggcttctcaccttcctcatatggtgctagttctcaagttttggctcccattgagaatatcacatttacacactgactgaatgggctgtgagaagataatttgcttgtctaatatttgtgtcaacattcaggagttttgattacatttatatgccgtcaaggcagcttggtgaaaaatgaaaatttcaggcaattttgtccttttctcaacagagcgtatgtccatctccaggtggctggtgttgggtggacaataaacagattcaattctacagttattgaacatgtctatgtgccatgcccctgtgcgtagtacctgtggggacaaaggtgcattcaaaacagcccatgcttttgaggagttttcatactagcagtaaaaaaaatacacatttaaacaaaaatcccagtgaacatttcctgttgccaaaacgttttgaaaccatggatagtctgtgccgaaactggttgagcattagtgtgtgtgatttaatgtgatgaaacacatttcacacggagttagggaactaatatgatttttttatagactcatctttctgtaggacagtggttatcaaacttggctgcacattaaactctcacgaagggcatttttttaaaaatactactcttcagggccaactcctgaatagtggttgtcaaagtatggtccacagacacacaaaaccttggaacttgtcataaatgcagattctcaggccctggtccagacccctgactcagagactgggtttggggtccaccaatctgtgtgttaacaactccttcagtgattcagatatttagaaatttaagaaccactgctctagagactgtgatttaattggttcacagtaggatctacattttgatctttttaaaggctctttttaaaggtgactctaatatgtagacagatttgagaaccaccgctctaacagaaaagttgctcaagcttactttttgattaggaactgttcaggttggtgtgacgtcagagaaccagttatttcagctgtccttggattgtggtcaacctgtctggcagggattttcatgcgtttcaagtacatgaggggaagaatccactcactctagactagtgtgtgtgggagcaaactttagtgttgaccaaaacccattgggaaataattcctaaactgaggtagacgagtgctactcaaacacaaatgttcatacagatcacctggggatcttgttattatacatgcagagtctgccaaggtaggcctgggcttggcccgaaagtctgaaagtctgcaattctaacaaactctgaggtgctgatgttgtaagctctggaactttgagcagtgagttagaaattatgactcaggtccaaccccggatatactgaataaggatctgcattttaataagatccttattgtctaaagggactctatattctagaaaaagagaaagcattctcatctctggaagacacagcctggctatgaatttctgttgtctgtattgccagtcctaatcttagaattaattgtagcttgtctgattccaaatgtttgttctgttgtttacaggtttgttttgtttagctcagaggaggaggatgcacaaggcatattcatgtgactgagttcccggggttactaatgtgacagaaacaattgtttaaaaagaatttctttggatttgatgtctattcttaaaaaatttcaccttgagacaaattctctggaggtttgccaaataggaaaagtgactgagtgaagtcagagctttgatatctggagagggtgttttaaatggaagctacttcagaaaataataagcaattgggttggaaattgaaattcgttaaaatagataaactcagagaatatttgagtggcctatgtgtcatcagaaaagttaatttctttcataataaatgtggtatattatttaagctaaaaataacaaaatgtgaaatttcagtatccctatatatcacattaaaatattaattctctaattttaaagcaccaaataaatagctgcatcacattaagtatttcattaataatttgagggtttttttggactgatttttggtttctactgagaagacatacccatgtcaaattaatttccaaacaaacatttatgcaattctctagtgaatattacatgttaaaaatctgccttagttcaaatgattcacacatgttaaagctgaaattgacaatggactttaatgtgtttttgtcatgtttactgtttggaaatcaaactacatggaacataattatctaaattgcaggattttaatatgatgaattcataggatttagagctggaggagatattagattttgaatccaatcccttcattttgtatgtggggaagctgaaagccaaaaagttttcatgcctcttccaaagtcccagaaaggaggatttagggtgtgatgtgctggggccaaaagaggcaggcaaggccatgaacgtcctgctcaggagcttgtgcacgcccgctttcaccttccatggagagccagccctctctccagcatggaaaacaaccactaaaacaccacctttaaagaccaatgtggaaaattactttaggagaacagaaaaccacatctgtttggctttggacccacaagaattacataaatcacctcttgtttgcccaccaattatggtgattaaattactataaaaatcaaacttgaaagaaaagcaatgctgttcacagaatgatggcggaatatagggttgctctcccatcacccctcaccaatatttttaagaaaattcagagcataggtctatattgctagtcctaatcttggaattagttgtagcttgggaggtgctggcaggagaatcgcttgaacctgggaggcagaggttgcggtgagccaagattgtgccattgcactccagcctgggcaacaagagcaaaactccatctcaaaaaaaaaaaaaaaagaattagttatagcttatctaattccaaatgtttgtacaatatatgtttagtaagcagactacgatgaaccttatttatttgggtaagtgcgattggttctggactgccccaattcataggcataatttttgaggccagttgaaaatttgggccctcacttaaatgttggcacagttaactaagacccaatagaaaaacaaagtaacatatgattacatttcattttacaagataaaagcaataaaacattaagaaatactataacaataaatcaagagggggaaattagccagcctttatctagttaacatttgaggattttaatgtagagaggctcttacctctggttttctaactttgccgatgtaaaaatacatgaacacctaataaatgcatatgtgctttttgattaggttgcttcacacaaatatttgcatggttgctgaagatgaacaggaattttatattgtgttggaccttctatgaggcagtaaaataataggattgatataaatatctagttttgcctccctgtggccaatttcttactttctaaaactttatggatacaatccaaaatatacacatgtacatacatatttaacttaatgttattgcagataagaatttgagaaatgtggacctgattaatgttaatgggattttatagtattttttgcacaagtgttcaaaaataaaatttaaatatatgcaaagaaaaacacacatttaatttacattggcagtaaaagtggaataaaataaatatagttttagaataaaaatcaggcaaccttgctaataagagaataataaatagctcaaaagaacagttgcttttttatgattccaatatttccatttggaatgctataatgtggctcaaatgtataaattaaacagtgttattctagtacctaatgatagcaagaataaacataaggcttcatcctgttttctttatctacaagtcttctattaaagatgtgagcctggtctcaggggaaaaataaatgagagtcctggcaatttttgcgtgtgaccagaacatagaagaatatcatggtttaaccatccaccaaactattatttaaataaatgaagatttataagaaaagaaaatgaatgtatatatttggctctgtctcaatcatagacttatagtacaagaggatatgtgaaaaatccatctaatgacaggtatgtggaaaaatgttcttcacaagtaagcaatttccatttatagtagatatttcattttctcccttttcatctcctctttcaaatgctaataccccattgattagggtggaggatggaaggaaaagcactttcttagcctgctggtgggagtatttgttgattcttttctggagtacagttaggcaatggttatggagaaccacaaacttgttcctatctctttcacctaggaaatctcaaaagcaatgagaggcatgcataaagatgaatgtttttgtaagtccataaaaagagaagccacataaatatccaataattgtggactagtagataaattatagtacagtatacacacaccatggaatatgctatagctattaaaactcacattgtaaaaaatcaaatagaatggaaacatttccatgatagactattaagtgggaaaaagcaggctgtaggacagaaaatagtgtatggttctgatttttataaaaataagtatgtatttgtagaaatgaaaggctggaagaatatacactgaagtgtgcacagtaattatctccgggcaggatatgtactctgggaagtatttcttcactgaaatctttcatagttcccaaatttgcaacatgtttgtcaaattttataactaggaaaaaatacattttaaaaaagtttagctcctccagcctcttgttctaagttacaaagctatgagttgccaatcttgtcctaaaacataacttaggaatatttagcatctctctttcagcgaagttcttaaatacacttctcttaaaattcacattcatagtctcccctgttcttctggggcagaactgtcttttttttacaatacctttgatttcatgttgaaacacaattctgaatccacaccttggctttctcatctccagtctttacagtatctcttgtccagccttttgctctttccttctttctttcttcttctctgaatctctcagagaacatcccaggaaaacctacagtccactactggacatgcctggaggccaacccactgtttccttcgacatcagtgtggacgtcaggggaacccagctttcccctgggaattctagctctgtagctcagtagagctgccccagtgctgtggagaaatggacacttaccccaaagctactgcattccctttgggcattcttggtctcacagtgaagagtgagactaagaagacctcctgaagtgagtccattgaattaatggggactctgctattcagagctcccagtagccacacattctcatcctttcctggatcactcagcattagccttcatggtgaatatcatctgtcttcttgtttttcttttctttttttttttttttaaacttcattatttcattttaattgatgatttcattcattcaattatttacttttgattgattccagtaacatattctccttgtgagctaattcaaacaatacagaagtatataaagtttgcccagatgtaacaactaacattatgcatgaacccatccagatatttgtctatacaccaaaaatagtgtgtgcgtgtgtgtgtgtgtgcatttacacatatgtgtatggacacgtgtacagattttaattagttttttttttgcaaaagtgataagctattgatagcaatgtaggttattttcagtttttcattattacaaccaatgctacagttattcctggatggtatctttgtgccacctgtttgagaaagccagactctttcctgtgctctagctgcaaccagccaaagcgtccataattgtaacacttgctgttcatgcctagggtaggcagaaacccacagagtgtgaaactaatactagttgtaatatttattgtttacggagagctctttatgtgcctgctgtgttactcttttctacaccttcgttttacaaaggaggacactgaggcttagaagggataatagcttgtgaaccatcacaaaactctgaaatatctgactctgacctctgccatttttttattccaccactccagcttccctctgaaactatagcccattcctaattgggttgatgtctgccagggtagactcccaaatcaaaaatattttttgctcatcatggcacaagattttaaatgggcgatgaagaaaactggtgccagtacatacagatacagttttgttttttttgtttttttttttttttttttttttgagacggagtctcgctctgtcgcccaggctggagtgcagtggcgggatctcggctcactgcaagctccgcctcccgggttcacgccattctcctgcctcagcctcccgagtagctgggactacaggcgcccgccactatgcccggctaattttttgtattttttagtagagacggggtttcaccgtgttagccgggatggtctcgatctcctgacctcgtgatccgcccgcctcggcctcccaaagtgctgggattacaggcgtgagccaccgcgcccggccacagatacagttttatagatataaaaaggtattcatgaatacatatgaaatgtgagaatgatgattggagtaggaatctaatagatgacaacattttggtttacttgcttttgcagtacagttattgctccagcagtttttacctgttcagataagagttaccctcatactttttctttaaactttattggctgctatgaaacctaacagtgtttcatgaaatgttcactctcagccgataaagagatggatgtcagatgcccttgcccctcctctaatgtcccttggccatggcagatgttgcttgtgataggatgctttcacactcagccagctctgtggtttgaatacattccctccaaaattcaagctgaatcttaatacccctggtggtactactaagaagtggggctttcaggatctgattagaccatgaaggctctagcctcatgaatggattagtgtctaataaaggggtttgagggggcaagtttgcctttccatccctcccagcatgtgaggacccagtgttcatcccttccagaggacacagcaacaaggtgttgtcacaaaaggggagactgggcccctcaccaggtactgaacttgctaatgccttgatcttggacttcccagcctccagaactataagaaataaatttctgttctttataaattacccagtctaaggtgttttactatagcagcacaaatgggcttagacagttgccatctggcaaagctccagaatccttctcaacctggcttctaaaatgccactggaaattagttggacttagctgagagctgaaacctgtcatctctagatttattaaattcttgcaaacatgtatttgctgagcacaatgtgcctggcactgtgctgggtcccagaggttcaactgtgaatgatacaaacttgatccctagtcttagggagctgggtgaggaggaagacagataatgattgcacatctaattccaaggctttgaatgattgatgtgaagaagagcaggggctacagaagcacaccttggggagacttttccttaaacggagcccctaatgatgcatgggagctggtagataagcagggcagcgcccaaggagggctgctccaggcataggtgacagcactgcagaggccctgaagataattcagggaacatggagaaacctggcatccctggtgcctgggcatcctggatgagagaggtaagaagtgagtcaatgcagagacacatccagagcaaatcaggcagccttaggggccctgataagaacatgagtccgtttcctaaggcaacaggaaaccttggaagaattttaattaagcaacttaaataaaattgcctttaaaaaaatgggactgaaatataagacagtctttatatggcttagtcccttttcattttgtattatttgaagaaaaatttcagttcaaaatttcccgagtgcttagagcacaatatgtaagccgctctagtgctttcgactaatactagcaaacagttccacagcacttacatgtaccaggctttacaaatattatttgtgctttacaattacttaacttgttgaatttagatatatttgatttaggtattactagtagcctcattttgcagaggagaaaactgagatgcaaaaaggtgaagtaacttattcaagttagcaagtggtagacctggactcaaacccaggctgcctggttccggtattgtgtgctggtggtgaatggcttgctcccttgctcccttccctccaatagcttaaaaagctgcctgtcttatgccagtcccccggcacaaccccttcacagccacccctacaaactcctggtctcatcctttcttgcccattgcaggaatcatataatgacctaggtcttcatccaggtataagaccttttagacttccggtttcggcaatgagttgagatcttttctgtttgtccctgatggttaattttatatgtccatttggctgggccatgggatgcccaaatatttgatcaaacatgattctggatatttctgtgagggtgtttttggatgagattaacatttaagtgggtggattttgagacttccataatgtaggtgggcctcaaccaatcagctgagtagaacaaaaagaccaactatccccccagcaaaagagaattctacagcagactgtctttggactcaaaccggaatattagctctcctgggtctccagactgcccattttgccttatggctggaactgtagcatcggctctcctgggtctctagtctgccagtccaccctgcagattttggacttgccagcctccattatcatgtgagacatttatttattttttataataaatctctttctctcaatgcacacaagctattggtctgttcttctggagagccctgactaatacacccctgtatccctggcatttggcttagagtatgtgcttaataaatacaggtgaaattaacgcacctagaacacccgctcacagagcctttgtctcaggcccctcttttctcttgatgccataaccatggccagtggatttgcctggctttctggcacatgcttctgatttgtgtccactttcctctgtatttcctttccagggatagaggcttccctggacccaggcctcctggatgacatcctgcttaaccctcaccagcttcccagctggtgttgagagccaggctggtgttgccctgccctcattgctgagctgcctgagttgattttgccaatgccaggagagcccacctaccagccctaacccctcaggctggctcctttttgatactgatgctcccagctaggaaaagttcaggttttcttcatatcctttagaaatgatgtttggattttggtccaaacctctatccctcccttgctatttccaggacaagccacatcatagctcctggccctacgttgcctctctgcttctggcttcctccttctctgatttctgccactgcatctcagcacacctgacatgagatcattgaaagggcaggtcatacatgtgcttaaccattaacaaggaaggagataaggacattagtgaggctcaaaacaagggctaagtggggggtccagagaagggcgggaacactttctactggaggagggatgaaagggttcatggagtagctgcattgtcctgggctttggagctaagcaacatttcagcaggaggagctagacattggagggtggacacagacgcccaaagtgcagtatgaggtcaaaagcagcaaagaatgcaaggagcccagaggatggggtgtccttgcggatggagaaaggagtggaagggagtagtggggggtgaggctgcagagaatagggagagttatttcatgcaaacttttactcagaatgagcaaaggaagtgttcatttggcctttgaccagacctgcttctgtaaaatagtaatagtaccttgtctgagagtttatagcacaaagattagaaagcaacattcttatgcttgtctgttggtgtttggtgtaggagctctggacagaaagcctggagaaccagattctagtcctggctggactattaaatagttggaagagctttgggggtctgaaatccctcatctggaagacagagatgggtggagtggactggacaaagtctaacattcttttcaactatgaaatttttagcgtttcacatcaattttgctctttggagtaattgcaagtgcagggtgatacatttctctatatatttgtctaaggatttttaaattacgcaatttcaaacatatacgaaagtatgtttacctaattgttaagatcttgctttatttgcttcatctattcagtcctgtctccctcttttcggttgaattattttaaaagactgacttcatgtcatttttacctctacgtgcttcagtgttctgaattatgcagacattaaaaagaagaattacaaaatcattattacactcgatgaacagagctttgtatcatccaatatgcagatcataaccaaattttcccaattgtctcaagaatatctgtttacagttgctttgtttgaattgtgatctagttagagtccacacgggacatttggtcattatgtctctttaatctcttttaaagaataaatattttaggccaggcaccgtggctcacgcctgtaatcccagcactttgggaggctgaggcaggtggatcacgagggtcaggagatcaagactatcctggctagcacggtgaaaccccgtctctactaaaaatacaaaaaaaaaaaaaaaagaataaatattttaatgcaaaagcggttttgtgaaaccagtaagagtgagcctacactgcatttaaggaggcaatataaacggcactgtgaccagtcacctctgggttggcttcccatctaagggaggcaggtactctttctatctctcagttcctttttcatggactcttgagcccttaggacctattttcaaagaactgtgctgaactttagctgtttctgcatcattaaaaccaatgggaactgagcagttaaaaccctgggcagtgctttgaaaacatatcccccactgtcctctcttccctcttcccgtggaacattgatcagaaacagacctttggagctgtcctccttttacacatttaaaacgtttttcggtcctacacaatgtactttatattctaccccaggaaattagtgtagccactgatgttcttagtctctttctttaattttgaccagtttgccacagactctgatttaatactgtgttaagacacattcctttagaaaacagggagtcaggagccctgggcgctggtcctggctctgccatgcctggccggtgtactcctgggcaaggtacggcacctctctggacttccgtggcttgtcattgaagaccctgactaaactaaccagtgcatggagttgctgaccagaaccttctccgcagcaaaagcgtcacgtggcaggcactgtctctgccgtctgcactcctccctccccagtgtcggtctccctgcgctggtgtggctcctcccataggccctttgtacttctcagaggtttgggctgttaggaccctgacttctccttcctttcttccacgtcctgcagagccagtcctcctgtgttctgcacccttttgttcttctacctcatgtaaagaccgtttttttgagttggaaatgatctaattaagtgaattcacaccctaagatgtaattagctgttatcaacttgatgtgctcttcctttggggtcattttaatttcatttcattttagtgaaaggaaatacttagctaattgataaaaaaaaaaaaagtggaattttagctagcagtgcctagttggcttacaagggtcttcctggtggccctcatatcacaacccaaaggcagcctctttttctgctcatggatggtgagttttgagggcagccaatgaaagcatatttgcgagagaatgaaatacccatgatacctactcggatttcacagagggggaggcacagagtggtggagctgcaaggaatgctggcaggagctgagggggctcagtgacaagaccggtgcagccagaggtggcttgggagaccatggacatgcagaaagtctctggtgtacaaagggggagggaagcgggtggaggcgaaggaacgtgggtgctgagtctggcatttactggctctgtgaacttggacaagtcactcaaccattttgaggctttttcatctgtaaacatggggatggtaataatacccatctcataaggttgttatggagactaaatgagataattaacgtgaaagtgcctggtaaaggtaggtccaggtgtcatctccagaaattagtcccaggtattggtattttgttttattttaaagctcctcgggccattctaatgtcagagtttataacaattgcagtaatgtattccagttctctttccataactcatagtgttgccagtggtcaagcctgagtgttggtagagcatcagtttctcattccaaaaagaaaataatgcagaccaaagaaccttatgagacttgtgaaattacagaattgaatggccatccagttcaatctcctatctgatggttgaatgctccctgcagtattcttgaccagtggtagtttaggtcggtgtttctcaagctccagcagacattggagttactaaaactgagagtgctgaacctcaatcccagagtttctgaattagtaggtctgggacgggtcttgagaaatttcatttctagtatgtacgcagctgttattgatactgctcgtctgggcaccactgtttgagaaccactgatctagatggtgcttgaatacctctagtgtcagagaacttcctgcttcatgagcctgctcatgccatcttccgagagcctgaagcacgaacacacttaatctgatggaaagttccttctcatatgaacctgaaacctgttttcctatcccttttacctataggctgtttgtcttgcccttttgacagtagagttaaattttattcatcatagttttaacagaaagtatttttattacttttggtctgtgattcactgtcctaaggataaaagacaacctgactgtattggcagtctgatactatggcaaaaacctcaagccattctaaggaggaaagaatctgatctattcctgggaaaacaacttcaattgagcaaatgtattttgagtgcccagtgtgtttcggggatgggagatgtacaggtgaacaaccagttcagggatttctgtggaaggtgggaataaccactgaaaaaccactcctcactcaatggatgtagatttctagtgatggacaactcaataccccttcacggttttaacacagctttgtggacttgtgaccatttcagcaacgaaatgcatattttggcacacacgccacttgctgaagaaataaaaatttaatagacatatatctgaaagtttctagcacttcagggagattttgagatttattctagcataccatacaatgagttttattgggagctgcaaaaatatataattttaatagaaataggtaagcataaaacattgacaccactgaaaaaatattggccatgccaaagcaacccccataaaagtttgcagaatgtttcagaaaagaataagagaattattaagggctgatttttctagtggagctttggccagggtctcatttttaaggaaacatatctatgtttccaaggaaaaagcaggtattcactgcctttgaagtgcagcgatcctgatgtttcttgtagctatgtgaagaaagatcatggagattgttttgtgcaggtttggtgaaaaagcttaattaatgattaaaagcacaacagtcctgttaaaccagacatgttttaggaaaacacttcaagatgagatgacagtgccctcctacattcaaaggctggaaattcaagtattagaacattcattactttttccttggagatggtgctgtctttatcatccatcttcatcacttgctccaagttaaaatggttgatttcttgctgctgattatagggcatgaatcttagtcctatggagcttgaaagcacgatggctttgtgttcttcagtatctctgagcttcattttcattgtctggtcaaaaccaggagagtaacatctgccacacagattattgtgatatataatgtgaagatacagacaacacacacagcacagtgtctgatgaccaagacatgccagtatcatagttcatatactttggggtaaggcttagtgagcagcgacacactaccccaagggaaagaaaaccagaagggcacttcctgaaggggaatcttgctccaggtccccagtgtctctttactgagacgctttactgagacagttcttccccaactggatcaccggtgtgcaatttgaccttcagaagtatgttgtagaaaagtgctgtacggtcagtaaatttggcaactgctgccaatgggcacatcagcgtgttgaaggctgtagaaagcctaacagtagagaaaactgttcaactttgtttaatgtagcatttttctaaccatattccagtgacaggaacatattttcctgcctcaagactggtatgcctcaaagcactgtttgggagctgctaatccaagcccttgaagtcagtaggagataagggtatcttatcttatccttggtgtttagtgtggtcccagcctatacaaggtatggaacagacgctgggtgaataaatggctcaatgtatatgtcaatttcctgatgattcttgccaaggcaacgacttcctgtgggcacaattcatttgtattgtcaccaccaacagggactacagcacaaatccttcccacataagctggcattcctactatgttgccagtttaatgaattttgttaaaaacagacttctgaccagccagggtcctgatttgacaattttattttttcggaaaaagtcactatgatgactctgtttgcagcagttgtccgaagctgaggttgccttctgttagccgcttctcttggttggacctgagcaatgggcaggtgccagagaactctggacaagaagacgcttccagccgggtgctgcagaaaacttgttctgcaaaagcagacaggagacactgaatgaaggactctgttctccaacaacagatttcatcattgtgaggttcacatggggtgtgttttcattttgtttttccctacagtttcaatcttctttcctcccagaaagggttcttttgtgtttgacctcgtcccgacgcgttggaaaacgtcctgctgcaccagctcttaattcaccttcctgtgtggacttgcctcggtggcaaagtcacactcattaacaagttcttcctccctgggctctgcacatcacccagctatatatcttccaatgtgttcccttctgtggggaaatgagctattgccagagtcgggctctgggacacggaggactggctcactggctggctgccctggtgataatctggaagtgatcagtggaggaaaaagataacacagctgtgattttcaaggagacaggtcctggttttttttacctgccaaccacatttcctccggggagtttttcggcaagtgctgtaaaagagaccttttaatcttgtttcaaaaacctggagacccaagttgttccagatcttgagtagaaaacaggccggggaaatgtgcattgccgaggaggcgggtgggatgccattgcgattctgtggcttagttttgcatgtgcttgagaggacttggtgaacttggccttcaagtgctttcacccacaagtatgatatggtttgggctgggggtggagggtgttgcagaggttgatgaacgtaaatctgtcagtgggtgattttcagacatctgcctggagcacttgcagacaaacattggagtcattggagccagggaaatgcctgacaatgcctgggaaaacctgagccaaaaagctggcccggggacactgctgggccagaaaaaaaggatgtgtcagtaataaatagtttataatttaaattgggagcaaaaaggagagaggaaaaaaagaaagagacaaatcaatcaggatagggagcttgggaactaaatattgtctttgttaggagtcagtgaatgctgcagaaatgcaccgccagatcctggcagtgtctgccatccattgggcatctcgtatcgctcctgccaaaagcctgagcaacaaggcccaggaagtccccagtgtgtggtttcagagatttactcaactagggcatttcatttttcttagtgtataactggcagagttacatcctattttctagctgaaaattctactgcttagtacagcatgattgagtcaacagctctaactgtggttacatttcagaatactttcaaaatctcctcactgattcacagtgcagaatgtatatggtacatggcagctgggttcctgtggcttctccaagcctccatatcctaacctttaaaagggggatgataatacttgtcttgaagattgttgaaagagcagatacactgttgggtcaacaataaatatgacttcgcctaccataaaatgtaagattttcattctgaaggtaagtcttgatttaatggttgtcttctctggctggcatacttgatacttatagaactgacgcccacataggtacttggcagaaatacaaaaggagacccatcccatctcctccctggcagtatttatctgatgattttttgcattctgctgcccatatttctggttcagtttcagtttctccctgttgcatggtgtaaactgacatctcacacagaaaaggagggttcagattaccccaggaaagtgtaatgcagagaactcttcatcagtgtgaaaccagggtgggcaccagcagtgaaaacctttgaatcagaggtggatttctggctgttgtttaccacgtgacaaagagcaaacaggcagtttttccttcattccacctggggtatcccataaacttcaaagttcaaaacacactttgagtgggcaggggaagaggcatcttcctaatagccttgacttcctcatctctgaatttctaaggcagcaatagttgacgctgtggtataggcatcaagaggcaaaagaacacaggagctaaaagcaatggatttgcatttattcagacagacgtggcttaaagctcagcttcacaatctacaattatgtaatttggggcatattcatttacttgtttgattcctatttatcttcttccttcattgtgttgagagaattaaattaggtaatctatgtaattagcacagtgcactgcacattggtaaacatcagtaaatatttttcaataataatgtacagtgtgttttatattattgttccgtacatgtcaggctaatctcttcatttcagctctaagcaccttaggagaaggacactgtctctatttgttgagttctgtatggaatgactgcagtgtaattgtaccatagagtagatggccattcagtatttgaaacattggtcaactatcagcagagaaagatggctcttgaatctatttaaagctctttaagtcctttaaagaaatttccaaatacacttctgaaatttgccagtaataccaaaacaatattcccaaatttccaataaattcttatatttctagccaattgttttccaaatatatgaagttatctgattttaaaacctgccagacattcctagtatttattcctagaattttaagtttggaatgattctgacattccaatctaccacagcctatgtttcttctacaaatcctatgatattaagctcattccctcagttcagattaccacagagggctgttcaatttgatacatgaatgttgtattattgacgtagccaatctgcaatgtattggttccaagaacaggcggcaataatgatgcctcagcaaataagatgcagatgttctaggaatatccatgcaagacaaaagtgtgctgcaaaaatgaataggtgctacttgtaaaagtatacaaaattattttctaagtttcaaaatatgtttactgcatgccttgaggcattggtgggttaaattgaaaatgtattattcattttagaaaaagtatgactaacaatacacatatttccaacatcactgattctctatagagcctcccttctctgctacaatgcctcactctcagggttgcctgagacaggagttggaccacatggcttgacccaggaggcatgttcaggctgaaagagactgagagacagaaccagttcctggttcagggatcgtgcctaaaatgtcctgcatctagttctacagaatgaaatactagactcttagaagaggcacagaatatcatcgtaaatacagcatcctatgctgctacattgaagaggaagaatttcaaggctcatcaaaatcaaattgcttaggcttctgtagattgataatataacacctggaaataattatgtggggaagaaaaacaaaaagtaccagaaaagtcctcccaaatatcatctactcaatagattttgattctggactgacattctatctgtggcacttcaagcaattcgactaaaggaagcccgcttatctgtatgttaaatgtactaagtcagtgggtggagtgacatatggggtcattccaatactcttttctggtttctttaaggtcagggcctagaatgtaccttgagacctgttccccagcttgagaaggagagggagccataaggaaaaactccagtggagggaaaggaagaaaatggcatctcctaataggtgtgccatattacatggcctgtatagaagatcggtgggtcaaagggcaactgaaaaactcactagtaagggcaaaaagggcttgtttctcttatagagtaattcctgtgtatcttatttatctttcacttgtgccactcatttacatagaatacctttgcccataagttggagtatttttacccctcaatgttggcaagttgcagggtagctttatggtaaaagagagcaaaggtgtgtcgtcctttgattcccaagattcctagtggaagtattttctttgttattctctgaacaaaagataaagaggaggctggacttcggagtatttgtgaaaatgctatttctagccctccatccacacagtgcctttcggtgttcatctggaggtgatgaaggtggatgcaggtgactcctccgctctacccatgctcacagcccagcccactcttctcaagagtgccccaccatttccccatcaagtccaaaggcagcaccagaagggtagagtgagcatccccgaagtctgtgtctttattatttccgtggtctgcttcaagtgttatcccatgtgcttggggtaatgtgtttgtttaattgatgaaaactctaggtggcaggaggctgggaaggtggctaggctttttcatatttattctcatggaaaacattcccctttataaatctttttgctacaaatagtgtttttttttcttttatgtaattttcttaatttttaaaaaaattttttgagacaagttctcgctctgtcactcaggctggagtgaagtggtgtgatcttggctcactgcaacctctgcctcctggggtcaagtggttctcatacctcagcctcccaagtagctaagactacagctgcgtgccaccatgcctggctaatttttgtatttttagtagagacggggtttcgccatgttgtccaggctggtctcgaacacctgacctcaagtggtctgcttgcctcggcctcggatatgctggaattacaggcatgagccaccacgcctggccgcttttatgtaatcttgatgtaacaccaatcccatgtagtcggcacaaattataaagtgtgtaaatgactggtgaaaaaataatgcccttctcaaagagaagataattccattacagggaatctaggggccgttcaatgccagaggatcccacccaggaaagctggtggctgcagggataaaagccagcagtttggaaagaaacacctataagaacatggaccacgtaggagcctagcttcaagctccgctttaccaggcttcccttcccctttgctgaattgcagctcctgatcctgcctgcatcctactggcctgtgttacataaagatctagttctggaatacaggaaatatggtggagattgttctatgttaaggttccaagccaagtacgggcccatatcctcagctaagataattattggtgggtgaataaattaggcttgccgacacttgtctgtttaagcaaagacagcattttaaatattagaagaatgtccacttcactctacagagtcaacattattcagcacttccattagctgtggattaccaaagcagaagacaattcttaagttaagaaaattttatgagtgaaaagacaaatgtaagcaaagtggatacatattctgaaagttttatgtaaaaaccaaggtgcaggtgcaagtatatgtaattgatacgtaatgcagagaggcagaatgggagagcagaggagaacacggactcgggagcaagatggcctaggtgtggagcatggctctgccactgactacctgggaaaccctgggcaaattacctgacctctctgggccttgctctctcctcatctgtacaatggggcaatgatagaacttgtctcaacggattgtagagaggattaaacacgctagagcatgtaaagaacttggacacactgcttgacacttagtaagtgttgtgaaagtattagcttcctaatgcaagcattgtctttgcctcttcatcctctttttttttgtacccttcatcctcctcttctttttccttctcctctttctgtctcttttcctcttcctcctcgtccttctttattagcatgattgtacatgcgaaatggccagggctggctatataatttgtcgagcacaggacaaaatgaaacttcagggcctcttgtccaaaaatcagggggaaaaaacatttctttttcttctatctctctctcatacccaatctatcacagggttctttgttggctatttattgacccatcttctctcaggcacgtatattctctgggcaagtatagactcacaagtgcctggagtccctcctcgaaatttggtgtgtgagtgtgcgcccaactccaccctttgctgtgtttgtgtccagccttttgccaggggtgaggtgacagagatcactgggctaggggcaggagagggttggcagagaacccatcccagggaggcagggaggtggtgagtgggggactgcacaggagcagaggccccaagccctagtgcacacttcattgttccactggacttcacttaggagaaacacattcaaaggtaaaattattaagaattttcaacatgatcacagagcgccgatgctccaaggggtggcccccttctgagtgtgggaccctgtgtcagatacatgaagttggcactgacagtagcagaaaagatgtgaagttagcaatcaacgaaatcccattttggttattaagtgattctttggcttaagatgtagaaattggattttattatcagttttagtgagacgaacacaaattaggtaactcattttatccatttattaaacttagggagaaaaatgcacattttaaccaactggtctaccccagagatgtagtaaaaaagtagcttttaaaaagacctttgtgctcttctacccaaaagcattagatgggcattttccaaagtgtgttacttgagaaaagggttctgtgaggaacaattggctccttgggtaaaacagaattaacggatttttgaaattcaggactacccacttactaagtgggtagtctaattgtttttctgtttatttaccttaggtcttactcttttccaattaatcatcttagactttggaaggtgaggggaaacatggaagcagagtccatttagcaagctgagatattgtcaaatttcaaaatgaatttttaaaattaaatttaatttttttattttaaaagttttactttaagttctgggatacatgtgctgaacatgcagatttgttacataggtacacatgtgccatggtggtttgttgcacctatcaacccatcatctaggctttaaccccctaatacattaggtatttgtcctaatgccctccctcccccagccccccactccccgacaggctctggtgtatgatgttcccctccctgtctccacatgttctcattgttcaattcctacttgtaagtgagaacatgcagtgtttggttttggttttctgttcctgtgttagtttgctgaggatgatggttcccagcctcatccatgtccctgcaaagacatgaactcatccgtttttatggctgcatagtattccatggtgtatatgtgccacattgtctttatccagtgtatccaaaatgaatttttaatcttaaatgtaactggcctctcagttcttccaccatgtcccctccaatgatcattttctataattatccactcctaagaccatattcttagtcccctccctctgtcctttagctaaccaactctagtactcactagtaattcttctgccttgttgacgaattgaccaccaacaaatcattgaccagcactttaatacctcccttagtgccctcatttccttctgtatccagcttaatgaccatgccctgtcactaggaacattagcaccctaattctttcataccctcccctcaccgaacttggctgggagagccccaatcctggttaaaacccacaactacctactatgtgcctgcacttggttggagaaaaacccacaactgtgctgactgttctcactttaaatccttgccctcaaatctcaaatggacattcaacgtagcagcaaatcttatttacttcacttttccatgcttcaaaattactctttttatcccttctcctcttcccttcctccgtgttcctatcttgggaccctgcttcattcttcattggaaaaatagaagcaactaggtagtaattcttttactttttttcagcagttaatctacccatacccttttcctttccttcttgtgtcataaacaaagtgccccttcatcctctcaaggagttattcttactctgtaccacttttcggctcctgaactcttatcagtatctcccctcctgtgtcactcactgtatctccaacatccctactctgtctagggcagtgaaccccagccttttggcaccagagaccagttttatggaagacaatttttccacggactttgggtggagagtgagggatggtttcgggattattcaagtgcagtacctttattgtgcactttatttctattattattacactgtaatatataatgaaataactatacaactcactataatgtagaatcagtgggagccctgagcttgttttcctgcaaatagatggtcccatctgggagtgatgggagacagtgacagatcatcaggcattagagtttcataaggaggatgcaacctagatccctcacatatgcagttcacaacagggttcatgctcctatgagaatccaatgcccgtgctgatctgacaggtggtggagctcaggaggtaatgtgcatgatggagagcggctgtaaacacagagaagctttggtcactcgcccaccgctcacctcacgctgtgcggtcccctatgggggttgaggaaccctggtcgaagggatacacaactagagccaaaaatgtgccctgaaagctcctgtttaaagaacataatataaaacaaaccttacatgatcccattttatccttctagcttctgctccatttctctgtgccccttcagagcaaaccttctttaagagctgtctgtaagcactatcttcactccctcacttcagttctctgcttcagtcattccggttgagtttctgtccccactccccctcctgaagctgctcatgtcaaggcaccattacctccatgctctcaagtccagtggttttactttatataatattgcctcatttttgatatgcctttaaaaaaatatcttgactttcatgatgccacatactcctggtttttctcccacctcactagctattccttctgtctccttcactggctcctcctccctgctagagctgtaaatgctggaggcttttggagcacgttcctgagccctcttctaatcccaagcaatattttttcctgtgggtgatctcatccaaccgtaaggtcttcaatataatctgcacaccaatgactcccaaatccatgtctctagctctttgctttgactttcagattttctatatccaattgtcacaggcatcatcttcacgtggatgtttgctaggaagctcaaattaccatggtcaaaacagaacggttgatactttctttccctcccaaatctggttctttcacaatcatcctatctcagtaaatagccctgtcatccacttagctactgaagccaaaaatctaggaactatcttgatgttctcttttctttacctttctatgtcaaatgtattagcaagacttgtcaacgcttctttcagaactcatccctaaactgcccacttcttttacctccaatgcatcactctactacatactgtcatcttttctaatctgaacaaccgcaataacttctcaattaatttctttgcttctacacttatacacttatagtcctttctctacacagcaactggagagatgtttaaaaaatgtaaatcaggccgggcgcagtggctcacgcctataatcccagcactttgggaggccgaggtgggtggatcacaaggtcaggagatcgagaccatctggctaacacggtgaaaccccgtctctactaaaactacaaaaaattagccaggcatggtggcgggcgcctgtggtcccagctactcgggaggctgaggcaggagaatggcgtgaacccgggaggcagagcttgcagtgagccaagatcgtgccactgcactccagcctgggcgacacagcaagactccatctcaaaaaaaaaaaaaaaatgtaaatcaaaccatgcttaaaccattccgaaggcttcccttgatgctgggaataaaatctgaccttcttgcactggttatgccctacctggtctagaccttgtcaacatctccatctatctcatatgattcttcctgtgcctgctatgcatacttcagccactctggccttttctttgttcctctaatatgccaaggtcatcttaactaagggacccttactctaggttcccactgcctggaatgctcacacctctgatttccatatgatcagcttcttcttctcactcagatgctgacttaaatgtcacccttgttatttatgtcattatgtagcaatgaattcctgttgtattcaatgggttataatcaattactagcattatgcattttgatgctcaaattgttccaaacttgggtattaggaatcccttcaagctggcttctgtgtccttttgacacagctctgtcattctttgagtactttattatattctgccacagaaagatgtttcaggctcattttattctttctctggaatcagttcttcaaggagctttaattccttttagtggaggatggcatttagtaaccaagatatgggctctagatgtactcattgttactgtgatgtcattgattttagaccttctcaggagacagaactggtacacacacacattatctatctatctatctatctatctatctatctatctatctatctatctatctatctacctatctatcttgaaaaacatgagttcacactgatacccacagttccagcctaatactacatacttttttaaaccaacctcctttccatgtttatagctttttatttttctagcagtgagaatcctggctcccattatccttaatatatttatttgctaagtccctccatatgtagccaatctccctacatggactgtctccttggcccagcactgctggttcacacaagctcatgccaattgggaatccatgcttccagccccactgctgtttgatattaacaacttataactttccagtaggtgcattcattctgtctgttcattcatttgttcatctatcaaatatttactgagtatttagtcacaacaggcacaatgctgaatgctgcatagacaccagtgaacaaggtggccagaatatctgtcctcatggttactaccctagaccttgtgtctctgctcttcacaattcatctttattaaacttgaaagtttgttgaacataaataggttgaggttgcatataattcttattatagaattagggctcaattatttttaatatacctttggatgtccatacagttctaagttaaagaatatcctaggtagacgtaggtggataaacatatagaaactgtatttaggctgggtgcggtggctcatgcctgtaatcccagcactttggcaggtaggtcatgaagtcaggcagatcacgaggtcaggagttcaagaccaacctggccaacacggcgaaaccctgtcttgagtaaaaatacaaaaaattagccgggcgtggtggcagatgcctgtaatcccagctacttgggaggctgaggctggggaatcatttaaacctgggaggcagaggttacagtgagctgaggtcaacccattgcactccagcctgggcgacagggtgagactccatctcaaaaaaaaaaaaaaaaaaaaggaaaccgtatttagtagattttatctgaatatgattctggaatgtggagtaggcacaaccaagtgagaaatgcttatttatctctggtatgttatgcattagccatattcaagagttgtaaattttggctccaagaaatgcttccaacccatgaatctgcattttgtcatgtacctcagagtgacttgatgacctgcctcatacattgtagtaaaacaccatgggctgctctaaaggaaatgagatttaaatatataggcctaacactcatctgcaattcagcggcattccttgcacatagaaggtgtttgataaaaaatgattatttgaattaaaattcatttatataactcatcttctgctgtagtatgtgttaagatacttattaatagcattacttatttgtctctgcccttcccacttctcccataattgggcatttctgttgcctttgcaatctgatctcttgagagtttttaattcttttttgcctttttctttttatcatggccgcacttcctgctgaacagtcttggcaaaaacattcttcttccttttaacatctgtaaatataggttctcagaatttcactgaaataatttttgtacctccccctgagagagaaaatgctaacacagatattagaaattgtttatgaggcctgatgtgtggcagataagatggcttcttcaagactcaatttggggataaatgagttactttatattccacttcctttttcaaaaaacaagtctggttttgttcagaccccttattacatttagcctctgctctcataatccatcaaaattactagctgaaagatcaaaaaataaaaatcttctggtgtagattgagaatgttccggttttcaagcctgctgtttaaatagctgcagcacccctcaaacacatgggcctatctcctacttgcttctaggatttcctgcaaaccagagtcagttgtctgcaatatcaagtgaactcagaagaatggatgagaacaagctactccttttgcgtggcaacttttcatgactgcattcaatctaagcccatcatcctcattcagttttagcctcccttcttagtaaaatccaatttataaactttattgtcatgtctatagttggccacaagaaagaactaagaaacagagcagttgagacagattcccacacaaaagggttatgactgtgtctcaactgtcatttttggtaaggcacagacctcattttcaaatcgtttcaagtatctttggcaagagaaaagccttcaaacaaggtgtgtgaatgaatgactaagtgctgtgtatttttaaggtgtggccatgtttccacctggcttttcttcttttccattaggatgccctgtcaaaaggcttttaaatgcttattctaaataataaaaataatgataagaataatatttgctgagcacttattatctgcaacgactcttccaagtttagagggcgtctgctatatgtatagccatataccgtcattaggcactctgcttctgggaagtggttctcaaacttatcaaaagtaatcacctgcttaaaaggcagatcactaccagatatctgattagtgtgcttaggatggggctcaggaactgaaaatattcacaagcggctggcaaaattcagctatgatgggtcaaactttgaaaaccacggcttagggtattgagagggctcttggctgtcactgtatacactatgatgtgatggatagtattgctggagagccatatgcaagtacacttttggtgaagccagttgaattttgccggtgacttaccctctcctttctgagaggtatgtgtcatctgttcttttgttatgtcaagtaacacaggtgtctgtaaacatcacttcagtgtaacccatgaaactctctgttcagaggaatatctcactggttcattctgtaaagctgagaatcagtttctggggtaaataaccacccttaatagatgaatagggattagcatatggggaaatttctcacagaaagggaaccaccattctatctcatggaaccatgacaattgtcaaatctacgagctgaaatcactggggttcccttttttggcatcatgcgcttcatcactacagaagtggttctggttttgctgctagcagatcacagactgaggtagaggctgtgtttgcatttccagaaatttctagagttcatcctcctactggccttccagctgcagaatggggtaacgctggaaagaatagactgaattggggccgaagcctctcaggctggctcagtgcccaaggttcttgcatttggaaaacaaatgtaaattcaaattgtaaacattcccaaaaatcaaaatgatatttttgacttctcgccgacttgtttaaacttttcaacttctttcttttaaaaaatcgaattgctggaatatggtgtgtgagattttagagccagcatttcttcccaccactgaaaaaagttccctagaatgagaacttttgcatccagttttagccatgaaagggttcagctctctgtcaaagataacactgtaattctccccacataatgtgatgatttatgcccttggcaccttacagtgttaacaggacagaggggcatgaattctctgttgttaatacagaaatagttctcacaactttagctgtgccatcccatgtggcactggtcagagaagtaaaaccaaaccaaacaattccaataagagcagatgcttaagtactttttacactgatgggtttgtggagctgttttctcttaaggatggaataatttgaaacacctttcccaccagttcatccactctggcagcagctaagcagctccatgggacctccctactcttgatgcctgcaaggttaggtcccctgaagggcgagcgtggcccaagatgcccttgcttggccacaggtttcaaaggacatctgcaaatcattgtgcaaaactgaaaagtacaaattcaccacagcccgattctctcgtgttgcatgtgatatttcctgttttgaaggtttccttggtatcgtacattggctgtgaaacgccagctgctctaagtgactcaaatttatagatcctttgatcaattatcttgtcatgttactcaattgctagataattgagaggagggttaaactctctccttatgtaaatatgacttaattgtttaaaaattctgtcttttagcttgtgctaagagaaccttacttttttttttttttttttttgcatatttagtttgcatcgtcagaggaaccttttctccctaatgatatcccatagtgctttgcaggtagaccagactggaaatattattaatgacagattgaaagtaatagagtgacttatctaagttttgcattctttgatgattcatttagtttgtaatacgcttagatctttgcaaaacagaatagtgaaagtgaagcagcaaaaaaaaaaacaaccacagactatgaactgagtctcccagctgaagggcaggttgaaagcagcagcacaaatttttatcaggttcttgtattttccttcgtggtacaaattccaaagtgatggttagggtgtaggtatggtcatagagacacattcaaatttgcagtaattggacttgtttttcctaaaagccaaaatggctggaaaaatatccaaggaaatttgtggtattatgacattggtgcgtcatgtgcttgtgaagcttaacaaatatttctttgctaatcctgacacttatctcatgaaaatcctcatctagcccctgcttgcaaacttccaaggacagggtatttactaccttgtggggacagacctggttcactatgaatcagctgtatcagttacaatgcttcttctcattagtgaggcccactttgttcccctgaagttttatccatttattcaataattgagttcacagttactgagcactacccattaatgaccataacatggttcttagttttgagggagttctagttcagtattcctcaaccatttttttttattatcgctaccttaaggagcccttttagattttttcctccctaatcacccatccatcccatgaaaattcaataccatagtttggtgttcctaagacattttttattattgttcccttaaggagccgttttagaatttttcccctaatttcctctccatctcatgaaaacttaatattgtagatctgtttatgtgctataggtatacctgtgcttattatataaaaaagtaaagtctttttttgcccctcatgaaccaatttctgccccttggggaagagaatgcatggtctaatgggaactactacagacgtgtgcaaatgactaaaatcttgtatggggatgccagcatactcttccctctgtccttgttcttttactcctacactttgcacatgcttttagaaagaattttgggaggccaaggtgggtggatcacttgaggtcaggagttcgagaccagcctggccaacatagtgaaacctcaactctactaaaataaaaaaattagctgggtgtggtggctcgcacctgtaatcccagctaccctgggggctgaggcaggagaagtgcttgaacccaggaggtggaggttgcagtcaggcgagattgtgccattgcactccagcctgggtgacagagcaaaactccatctcaaaaaaaaaaaaaaaaaaagcttctttcatatcttattttaattatttgcttagtcatttgtagtgagtcgaatgatgaccctcccccaaaagatatgtcttacccagaacctttgaatataactatttgggaaaagagtctttgcagatgtaattcaggatcttggaatgataccatcctggattatttggataggccctaaattcaaggacaagtgagtgtccttattaaagaaaggcaaagggtatttgagacagatacagaggagaaggctacatgaagatggaggcagagattggagtgatgcggctgcaagctaaagaatgccagcagaagttaatagccaccagaaactggaagcgattctcccgagaacctctgtgaggagtgtggtctggactgaaactagactgtggacttttgaactccagaaccgtgagataatgcatttctgttgtctgaagccaccaagttagaagtaatttgttatggcagctttaggaaacaaatatactgtctttctcctccactctaccctagtctccaaaaggcacagcatcttattgatttaagtattcctaagtgcatagcctgatgactggcatatagtagacgctcaggttacgtttgcgtggtagaaacagtaagtgggaagtgactctaagcttgctgcctcccctgctacatacacttggaagtatttgaagattacaaccctgtacaccttcccgtctcctcacacccccagcaaccttctcctgggccagtggcacagtccctgtgtcttatattttatgtttagaaataaacatttaaaaaatgttaaaatatataaacccacaactttatgcaaattagataataacatgtacatttttctgtagtctgcttttttccctcactaactaacttatcatgggcatctctccatgtgaataaatgtagctatacatcatcattttactagctacctggttttcattgtatggattcctataatgtatttaaccaatctcctattgatggatgctaatgtctttcttgaaatggaatagtcattttgacataagatactgtatatatcaccaatataatgagactatttttgcttttgacttgaacactacactagttttattgtgactgacaatttcattagctttgtgagatagtggctactttcttttgatagcagactgctattgtcttttgactctgtaattaactaaaacccctacatcttttaacctgaacagctatgaagtgggaatgctcctaacttgtgtttaaataattgattatatagttaaagaattcatgtgggatttttacgtaactgtaatctaaccttcagcatggtcttttttctacttttatattttgtttagcctgttggttttatactttttaatttttgtggttacatagtagctgtatatatttatgggttacatgagatgttttgatatagtcatacaatgtgtaataatcatcttggggtaaatggcatatccatcaactcaagcatttatcctttgtgttaaaaacaatccgattatactctttcagttatgttaaaatgtacaattaaatcattattgacgtagtcaccttgctgtgctgtcaaatactagatctgattcattatttttaccttttttttggtacccattaaccgttctcactccatccacccactacctttcctagcctctggtaaccatcattctactctctatctccatgagttcaattgttttaatttttagcttccacaaataagtgagaacatgtgaagtttgtcttctgtgcctggcttatttatcttaacataattccctcaagttccatctatgttgttgcaaatggtaggatctcattcttttttatggctgaatagtactccattgtgtatatgtaccacatttttttaatccattcatctgctgatgaacacttaggttgctcccaaatcttagctgtaatgaatagtgctgcaaggagcataggagtacagctatctcttcaatatactgatttcctttcttttgggtatatacccagcaatagacttgccagattatatgacagctctatttttagtttttggaggagcccctaaactgttgttcatagtggttttactaatttatattcccaccaacggtgtttccttttctccacatccttgccagcgtttgtaattgcctggctttttgatataagccattttaactggggtgagaacatatctcattgtagttgtgatttgcatttctctgatgatcattgatgttgagcagctttttttgtttgattgtttgagatggagtttcactcttgttgcccaggctggagtgcaatggtgcaatcttggctcactgcaacctccacctcccaggttcaagtgattctcctgcctcagcctcctgagtagctgggattacaggcatgtaccaccatgcctggctaattttttgtatatttagtagagacggggtttcaccatgttgcccaggctggtctccaattcctgacctcaagtgatctgcccaccttggcctcccaaagtgctgggactacaggggtgagccaccatgcccagctaaccacctttttatatagctgtttgccatttgtatgtcttcttttgataaacgtctactcagatcttttgcccatttttaaactggataatcaaatttttcctgtagagttgcttgagctccttatatactctggttattaatctctggtcagatgcatagtttgcaaatattttctcccattctgtgggttgtctcttcactttgttgattgtttcctttgttgtgcagaagtttttaaacttgtgatccccatttgtccatttgtccatgtttgctttggttgccagtgcttgtggggtgttactcaagaaatctttgcccagtccaatgtcctggagagtttccatgatgtttttcttagtagtttcatagtttgaggtcttagatttaagtctttaatccattttgatttgatttttgtatatggtgagaaataggggtctaatttcattcttctgcatatggatatccagttttcccagcaccatttattgaagactgtccttttcctattgtatgttcttgtcactctcatccaaaagaattcactgtaaatgtacagatttgtttatgggttctctattctgttcccttggtctatgtgtctttatgccaataccatcctgttttggttactatagctctaaagtataatttgaagtcaggtaatgtgattcctccagttttgttctttttgctcaggatagctttggctattcttgtcttttgtggttccatataaattttaggatttttttttctatttctgtgaagaatgtcattggtattttaatagggattgcattgaatctgtaaattgattttgtaatacgaacattttaacaatattggttcttccaacacatgaacatgaaatgtcttttcattttcttctgtccttttttatttcttttatcaatcttttatagttttcattgtagagatatttcacttctttggttaaattaattcctaggtatttaatttgatttgttgctattgtaaatgggattactttttaaatttctttttttcagattgattgccgttggcctatagaaatgctactaagttttgtacattgattttgtatcctgcaactttactgaatttgtcacttctagtagttttctttttttttggtggagtctttagctttttccaaataaaatattgtattatttgcaaacagggataatttgacttattcctttctaatttggatgccctttatttctttctcttgtctgattgctctagctaggacttccagtactatgtggtgtaacagtgttgaaaatggacatctttgtcattttctagatcttggatgaaaggctttcaatttttcctcattcagtatgatactagttgtgggtctgttgtatatggcttttattatgttatgttccgtctatacccagttttttgaaggtttttatcattaagtgatgtttaattttgtcaagtgctttttcagcatcaattgaaatgatcatatgactttggtccttcattctgttgatatgatgtatcatgttgattgatttgcatatgttgaaccatccttgtaccctggaataaatcccacttggtcgtgatgaatgatctttttaatatggtatagaactcagtttgctagtattttgtcgaggatttttgaattaatgttcatcagagacattggcctgtagttttattttttgatgtgtctttgtgtggtttttgtataagggtaatactggcctcttagaattagtttgaaagtattctctcctcctctatttttcagaacagtttaagtaggattgatatttagacttctgtaaatgtttggtaaaattcagctgtgaagccattgagtctcgggcttttctttgctgggagactttttattatggctttgatcttgttgcttgttattgggctgctcaggttttggatttcttcatggttcaatcttggtaggttgtatgtgtgtagtaatttatccatttcttctaggttttccaatttattgtcatattgttgctcatagtagcctctaaagatcttttcaatttttctggtatcagttgtaatgtctcctttttcatgtctgattttgtttatttgggtcttctttcttttttcttagtttggttaaaggtttgtcaattttgtttatcttttcaaaaaaccaacttttcatttcattgatcttttgtattattttctttattacaaattcatttatttctgctctgatctttactatttctttccttctactaattttgggtttgatttgctcttgcttttctagttcttcaacatgaattgttagatcgtttcttagaagttttttttttacttttttgatgcgtgcttacagctataaagttccctcttagtactgcttttgctgtatctgataggtttggatatgttgtgtttccgtcatcatttgtttcaagaaattttccagtctccttcttaacttcttcattgactcactagtcattcaggagcatattgtttaatttccatgtgtttttatagtttccaaaattcctcctgtgattgatttctagttttattccattgtggtcagagaagatacttgatattatttcaatattttgaacttttttaagacttgttttgtggcctaacatatggtctagcctcaagaatgatccaagtgctgaggagaataatgtgtatactgcagctgttggatgaaaagttctgaaatatctattagggtcagttaatctacagtgcagattaagttcaatgtttctttgttgattttctatctggatgatctatctaatgttgaaagcgtggtgtttgatttctctagttattattgtactgaagtctgtctctctctttagctctaataatacttgctttatacaactaggtgctccagtattggatgcatatatatttacaattgttatatcctattgctgaattgactcctttatcattatataatgactttctttgtctcttttttatagtttcatcttgcaatttatttagtctgatataagtatagcttatcctgctctttttttttgttatttattggcatatatcattttccatcctttattttcagtctatatgtgtctttataggtgaagtgtgttccatgtaggcggtagatcattgggtcttgtttgttttttaatccagttagccactgtatgtcttttgattggaaagatttgtccatttacattcaatgttattattgataagtaaaaacattcctgccattttgttatttgttttctgtttgttttgtggtcttatcttcctcatttccttccttcttgtctttctgttagtgaaggtgattttcactggtgatatgtttccatttcttgctttttatgttttgtgtattcgttgtatgttttttgatttgaggttaccataaagcttgcaaacaatatcttataattcattactttaaactgatgacaacttaataatgactgcataaacaaactaaaaaacaagcaaaaagaaaactaataaaaattctacacttaacttcattcccctactttttaactttatgttgtttctatttttatcttattatacagtctatgtcttcaaaagctgtagtagttattatttttaattggttcatattttagtttttctatttaagttattagtagtttatacaccataattacattgttgtaatattgtgtgtttttctgcatacttactattgccggtgactttagtaccttcagatgatttcttattgcacaataatgtccttttctttcagattgaagaactccctttagcgtttcttgtaggattggcctgatctgatgaaatccctcagtttttgttcatctgggaaagtctttatttctccttcatgtttgagggatattttcagcagacatactatcccagggaaaaagtttttttcctttagcgttttaaatatgtcatgccactctctcctggcctgtaaggtttccactgaaaagtctgctgccagatgtattgaagctccattgtatgttatttatttcttttctcttgctgcttgtaggatactttctttatccttgatctttgggagttggattattaaatgccttgaggtagtcttttttggattaaatctccttggtgttctataacctcttgaatttgactattgacatctctccctaggtttaggaagttctctgttattattgctttgaataaactttttactcctctctctttacctcctctttaaggccaataactcttagagttgcccttttgaggttattttctcgatctggtagacatgcttcattcttttctattgttttttctttagtctcctctgactgtgtattttcaaatagtgtgtcttcaagctcactaattttttcttctgcttgatcagttctgctattaagagactgatgcgttctccagtttgtcaattgcatttttcaactccagaatttctgcttgattctctgtatttcattctctttgttaaatttacctgataggattctgaattccttctctgtgttgtcttgaatttctttgagtttcctcaaaacagttattttgaattccctgtctgaaaggccacatatctttgtctcttcaggatttgtccctggtgccttattaagttcatttggtgaggtcatgttttcctgaatggtcttgatgcttgtagatgtttgtcagtgtctgggaattgaagagttagctatttgttgaagtctcacagtatgggcatgtttgtagccatccttcttgaaaaggctttccaggtattcaaagggacctgagtgttgtgatctaagtttttagtcatcacagccatatttgcattggggacactcaagcccagtaacactacgattcttgcagacttttagagataccagtttggtggtcttggatgatctgagagaattctctggattaccaggcagagactcttattctcttcccttactttctcccaagtaaatggagtctttctctctctatgggctgagctgcctggagctggcaaaaaggtgacataaacacccctgtggcccccactacttgggctgtgctggcttagacctgaagctagcacagcactgagtcctgcccaaaggtccactgtaccactgcccagctaccacctatgttcactcaaggccctagggctatgcaattagcaggtggcaaagccagacaggcttgtgtacttcccttcatgctgctaagtttctcctggccccaggctggtccgagatgatgtctgggagtcaggaactggagtcataaactttagaaatttacctggtgttctattctactgcagctgagtggacactcaaaccacaagacaaagtccttcccactcttccttcccctttcctcaggaaaaggagtctctccccatggcctgtgccaccacaggcccacgggcagtactgtcatgctaccgccaatgttcacttaaggcccaagagctctttagttaacttgtggtgaataatgccgggtggaggacttacccctcagggtagtgggttccactctggcccaaggcagttccagaaatactatccaagagccaaggcctgaaattggagactccaggagcctgctttgtgccctaccccactgtggccaaactcgtacctaaggtgcaagataaagtcctgtttacactttaccctgcttttctcaagcagaaggaatctctcctcatagccaccacagttaggaatgttctgggtcacacctaaagccagcatggctctgagtcttacccaaagctcacagcaagtactgcctgggtactgatgctgattatttaggacccaacaactctttagtcagcaggtgataaattctgccaggactgggtgcttccattcaaggcagtgggttcccttctggtccagggtgtatatagaaatgttgtctgggagctagggcctggaatgagggcctcagaataggtgctgtatcctaccatggttaggctggtctctaagttgcaagacaaagtcctctgtagtcttccctcaccttaagtggaaggaaggagtctcttttggagctgtgagctgcactgcctggggttagaagaggggtggtgcaagcacttacttgaccactctggctggtatctcactaagtcgtgtgtccccacaagtccactggctctgagcccagcacagcaccaggacttgcctaggagttgcagtccttgtagcctagattgcctttcaagttgatttaggaccccagaacactttagcctgcagtggtgaggcttgccaaaactcaagttctgaccactgggatgggtgattcccctctggctagggtttgtctaaatgctccctcagtgggcatcagttgagttctgctctctgttggcagcactgaggtctaatgcaaagtcccataatcactgtgctgtctctccccagattctctctctgcacagattttctctgtgccacatggctactgctgggggatggggaaggagtggcattggcaattgaagactgtatttcttaccttcttcagagcccctttcagtgatacgaagttaaaactaggtactgtgaccgctcatctgattgtttgttcttatgaaggtgctttgttgggtagatagttgttcaatttggtgctgctgtgaggatgattggtggaggcttctattcagccatcttgctccacctcctctagtttctactttaaaattttacactatatcataagcatttttttctactgattttcattagtttaaacctataatattttatatttatctctgtttattattggaaaaatattccatcatttcaactcactgagataattctggaactaaactttgttctcaattataccagtcattcacacccaataagcaggtattttatatttttgtctatgttagggattgtagtgttgactagtgcaaggcaagagatgaaactctgactcttacctcaagatgtctacttcctggttgatactaaatttctaacggacaccttgtcttcatcatccatatactacctccaactgattgtatcggctttcatcttggctcatgtaggaaggggtttgcactttattttgtcttgcattctttgtagtacttagtacagtgctggatgtgcaacgtaagatgtacccaataaccatttattgttttacattgaattgtcctggagaatatagtgaattgtatgtagtggagccacacagccgcttaacaattagcactttctcttgcccttgctcatttatcacttattcaataattcattctaaaatttacaagggattgatcccaagttcactagaatatatgtacctttacccctttcttgaaagtcagcagtgagggctgggaaagttttgtgcagaaagtgaggttttgagttgatattgatggacagttataatttgaggagagggaagggaaggaaaaggccatttggaaatcaggagctcttcttagtaaatgtggttggaagacagaattgttcacagatagagaatcattttatattagtaaaatttcagctcagccagcacctggacagtcttgaaaaagtgaaagctgtgttggaagcagagaatgtcctgtccccctctgctcttctccatctatatccattgacactcatgatccttaaatgtaaggcctcaagtatgtgaaaatattaatgcatttattatcaccattcctctcttccatttggtgcctagatgtggctatcatccttggtcacggtgtggaaggatagatgagggttagtaggaagatcaaagtggtacagaagccccctttttcccatgagctgagagtggctaagaaaataaccatacaagatatcaacttcattgattcagactaattagtactaatactggtaaaagtgcaaagtttaaattactgaatactcaagaaaaaaggagatttgtaagtgatcagtacatcaaacaactcaattaacaaatgcttgcatctgcaatgttcattataatacagcatcatagttgcagaattaaaatggcaagattataaaacataagatttcttgagtttcaaacttctatacagtagtaatactaaaaagtaactctttgtttctagaatatcactccatctctatttacaacccctctgtctgttccacctcatgctgggcctgtgtggccttgaaaggaacagattacaggaggaaaaaaaccatatcccaatttcagttgtcactttttaaaaactgacacataataattgtacatattgatatggtacaatgtgatgttttgataatgtatacattgtgtaatgatcaaatcagggtagttagcatgtcttataagtctatcatttctttgtggtgagaacattcagaatcctttcttctggctattttgaaatatgtaatacttttttttttttcttgagatggagtcttgctctgtcgcccaggctggagtgcagtggcacaatctgggctcactgcaagctccgcctcccgggttcacaccattctcctgcctcagcctcccgagtagctgggactacaggtacccgccaccacgcccagctaattttttatatttttagtagagacaggatttcaccgtgttagccaggatggtctcgatctcctgactttgtgatctgcctgcctcggcctccgaaagtgctgggattacaggcatgagccactgcgcctggcctgaaatatgtaatactttatcattaactggaatcaccctactggacaatagaataccggaacttattaatcctgtctaaccgtaactttgtacccattgaacaatctttgcttatgctatccccagaccctggtaaccacttttctgttctccatttctgtgagatcagggtttttagattccacatatgagtgacatcatacagtatttgtctttctgtgcctgcctggcttatttcacttaacacagtattccctagcttcattcatattattgcaaatgacaagatttcattatttttaatggccaaatcatattccattgtgtatatctgtatctgtatctatatctacatataccacattttctttatccattcatctgttgatgaacacttaggttgatttcatatcttggctattgcgcaataaacatgggcatgcaggtatttctttgacatactggtttcatttcttttggatgtatacccagtagtgggattgctggatcctatggtaattctactttttactttttggggaaactccataatgactgtactgatttctgttgccaccaacagtgcacaaggattctcttttctccacattcttgccaacctttgttatcttttgtattttttattacagccattccaagtggagtaaagtgatatctcactgtggtttttatttgcatttccctgataattagtgatattgagcattttttcatatacctgttggtcatttgtatgtcttctttagagaagtatctattcagaatttttgtccatgttttaattgattttttttttttttgctattgagttgagttcattatatgttctggatattaatcctttgtcagatgtatagtttggaaatatgttctcccattctgtaggttgtctcttcagcatgttgtttccttttttgcttttgttgcctgtgcttttgaggtcttatccaaaaaattcttgccaagaccaatgtcataaagcattttcctttgttttcttctagtagtttcatagttttgagtcttacatttaacactttaatccattttgagttgatttttacatatgatgagaaattcgggtctagtttaatgcttctgcatgttgatatccaatttattcagcactatttgttgaaaagattgtcctttccccagcatgtgttcttggtccctttgttgaaaatcagttggctgtaaatgtatggatttatttcttgactctattctgttcaactgttctgtgtgtctgtttgtatgctagtactatgttgttttggctactacagctttgtggtatattttgaagtcaggtagtgtgatacctccagctttcttctttttgctcaagattgcaaccagaaaacaagtaacaaaatggcagtagtaagttcttatctatcaataattattttgaatgtaaattgattccaatctaaagacagaatggctaagtggatttaaaaaaaaaaagacaagatccaattgtatgctgattataagagaccttctttagccttaagaacacaaatggactgaaagtaaaaaggtagaagatattccatgccaatggtaatcataagagagcaggggtggctatacttacatcagataaaatagacttcaataaacaaagtccacgagagacacagaatgacattatttaatgcataaagggtacaattcatctagaagacataataattgtaaataatttatgcacccaacatcagagcacctaaatagataaagcaaatattaatggacaagaagggagaaatagatagcaatacaataatagtaggggactttaacattccactttcaacaatggacagatcaaccagacagaaattaacaaggaaatactggaactggactacactttagacaaaatagacctaatagatatatacagaactttccatcaaagtgcagcagaatatacattcttctctagtgtacatggaatattctccaggataaaccatatggtggcccacaaaacaagtcttttttttttttttttatcttttctctctgagtgtgacaactaacacaaaacatgtcttaacaaatgttttaaaaatcaaaatcatgacaagtattgtttccaaccacaatgatatgaaactagaaatcaatatcagttgttacttttgagatcccactgagctaacaatgccacttactgtataacagggtttgttgtgatgggggatggggatggggtgaatggtgctgggaggggccaggcttgacctcaatttatcctttagggcagggcaggtcctgcaggcagagaggtactgaggcagggagtgtgtcctgttcattgcagagtttcagcccagtggctgaactagacacactgttcaagggggcaggagttagcaatatcttgtgttggttctggcagatggttagcactgggcaagtcgggaggtgattgggattgtccaacaggatggtgggagctgctgatgccagatgaagataggccagaggcaggaatccatgcaggctctcagctatcatccagggacttgtgcagaggtggtgtgacccaaagtgacacattggagctcaggaacacagggagtgctggtgatgagggtgggtggcatggcaggggcttatcctcagcaagagacaggcaactttagtatggtggcccatcagaagcccaaccctacaaactgtggggcgggacctctgttcaactcaagattcagacacagataccacattatccgaaggggggcaccgtagtgatgggttaagtgtcccaggttgggtttactggggaagtagattctgagatgcaaatcagcatatttgggaatgctcttgtgatcaacacctgtggaaggaagcaattggaatatcgagcagaaaaagaaattggctaagacaccatctgtcttagtctatttaggttgctaaaacaaactaccataatttggttggcttataaacaacagacatttatttctcatagttctggaggctgaaggtgtaagatcaaggcatccacagattcagtgtctgctgagggcctgttcccagttggtagctggtgccttcttactgtatcctcacatgggagaaggaatgagctagctctctggggcctcttttacaatggcattaatcccattcacgagggctccactctcatgacctaatcacttcccaaaggtcctgcctcctaataccatcaccttaggggttaggatttcaacatgtgaattttggaggaacacaaacattcaggccatagcaccatcccaacaaaggccttagccaactccatggggaaacttgagagaacccctcagaattgccctgagttaggggaatcaggaatcaggcctttgtacccctatattgataagtctggatgcaacaggaagcaggtgggactttgggccagacacttttcttcaacagaagcaattcttaaaggtggttaagagcggagggccatcttctggctgagctcccagcagctgggagaatacgtccatccttcctgtaaagggatctggggactgcatcacaacatccaccacagctacaacttgaaagatctgagtgccaaatggtcatgaatagtaggatggggacattagaactttgatcagtataaaagggaagacataatattatattaagtaccactgggttggccttggtaggagaagaggcaaggacaaaggaggaagtggaaaagaaagaatgggaggaacgggccaagactatttgcatacttgaacccaattgctctgtgaatatctgtgggcatttctccctgttcattctagcaaatcttgtacactgtggccctggggcttatcatgccataaaaatattcaaacagtcaaatctgctcatcatgtgcaaacatgcaatgttaattttaagaagtatttcttaaggcactgatgtaatttctcccttagactgatattaatgtttgattgtgagatttccagtgtgttgttccagccattttacattacaaaaccagagcaggagatttttgattaatttattttaagggagacctgtcccctctctgcacagctcaaagtgatctttgatttaatacgacttagaaggcaggaaagaggacaacagtgtttagattgagttcaagaatagaaaattcttatatcaaaaaatctttcccctttaaaaaatgaagtgagtaagcagagaggaactcatattaaagcatatttcgatgccagcatttaatgtgtcacaatattttgctcatcttggcaaattatgaaatttttctaattcttagagtgtcattaaacagctgttgtttcttttctaaataatactaaccctgccccgctccccaccccagagtgtccaggtttcaatagcttgaaatttcaatgcaatagcttcaatttcactttggcatcctttcacagattatgtatgtccactttgcatgtgggatgtgactctgcatgagtctgttgttcatgaaaagattcagctgtagcagcatatggacaacacactttaaaaaacgtggttatttcatagttgcatcgactctgtccaagaaaagggagcacattcgaattccctataattcaaaccacttgtaagcagagccctccctcctgagctggggaggactggtgtccttgagggattgttgtgttccaaacaagccacctggtttgaaaactcatcctggaaccggtgccctggccagggaaattgtagggagagagggttcccaggtgtgagctatgaagtgctgtcctgggttgggcatgggctatgttcatgtgccgagattccttgtgttattcagccgaacactctcactggtcaatccagaggtttcgtgtgcacaggatcaccggttatccatgtggcttcttattccacaagggcagaaggaggtcatggcaatagatagtgtgactcagggagaacaacgtgggctcaggagctgatgaaaactgagtctgcatctcatcgctggcacattactagccttaaacaagtcatgccaattctccaaacagcagcttcctcatttataaaatgatgatcaacatgcgcctgctttctctctctctctgtctctctctctctgtctctctctctcacacacacacacacacacacacacacacacacacagacaccttgcatggtagtggtgagaattagagatatgtctaaaatgctcagcatactatctggcccacagtagggactcaatgcttggaagctattattattagctattactaaataaagtctgtggaaagagtctttctgtataatcgaaattcccattatgctcatcttatgcccaatctggcagcaaaaacggcttgccaacagcatccgtctttccattcacaagtcacatgaaatatatgacctttttcctaaagggttcccaaaggtccgctagctttcctggcaatgagacagcaattcaagccagtccaggtacagaacaaagtggtgccaagagccacattccttgcatagaacactccccagccaggccatccacatggcggctgtgtgtgccagcctctcaggcctggctcaccaggcagctgcataaattgcttcaaacatgaatttatttatggcataaccaaccctgattttggcctagctcttgttcttatttcttaaatgatagtattagtgctggggaaagacatgtggtgtaggaaactgaattccacagacaaacgttgccaggtgcaggcttaccaatgcaattgcactgggccttgtcggtttattgtcagctccataattccaggctctggggtggcaataactatcctaagtgaagacagtccaccgcacatcagtgatgcctgggtggagaggaacggtttgatttttctgtaattttgaagtttcgagagctctcagcaaggttttcggaaagtagttataaccttataaggaaggttaaaagaaaatatcaaagtgcaccaacgatattttccaatttttccctcttaatttactcttcatctgaagaagtttagacagatcgaacagtctttcgttcttagctttccctaattttcaagtcaaattagccatatattgaaatccagagttaaaattcaatttttgatacaaattccccccattcccattcaatctagtatcccgttgtggtgggaaaagggaaagaggggatgtaagccatggcattgatttcaggagaaagggccaatagggaggtgtgaaatttcataattttataatttttgcttttgctccacgttcttacggcctatgaaccaactaaggaagtaggaccaccatcggcccatacaacttaagtccaatatatagacttttaacctatgtcagtgtgaatagttgcctgcttgaccagggactttaatttcagcgatggagggacaccaggagaggatgtacaactgggggatgtcaccatgatgattgctcctttttactttgatacttgtgtttgtatcttcaatcatccagtcagatgactatttgttcaaatatttattctactacatgacacactgtgctggacacttcagagatagctgtgagttttgcttcctgtgtggtagctctgtggaaaaggtgatgtgatgtcacaaaaatcaccaattctaattttatttgcagttgaattacttacattattgctttcaattctaatcaaggccttttaagtcataggctgattgctatatagaggcaattaaacaggaaggttagcaccttgaatttaccttatggatacaggcattcagccatcattggtgggatgcaggacaaagtgtttacttttgtctttcagagtcaaaatgggaaaggttaacacaaggagtaaactaagaaaatatatccatatccatattcataattatatctctgattatcttaaagataggtcattttttactcctccaacaccctccaacgtgttccatcccatgctatctctgagagagaagactggccgcctgtggaggggaagctacctcagtagaggtggtgttattgcttcctgctcagcacacattgcttctcctcacagcttatcatccttcactttccttgtgggaaagccctctttctccatttttatcatgtgatgtgggtggaatttttgcctccttaaaacttcataggagagtactaactggcttcagccaattactatacctgtttcctctggctatagtgattgattcagggagaggcccttaatctagtagctgttgagatggaaaaaaaaacaagcaaacaaaaaacaaacaaacaaacgaaacgtctgctagaatttctggaaaagagagattcctctctttgctccatgaaatctattagatttcatagtgtgcgtaagcatggaggccagacattcattctgcgatcccagggagagccctgagcttcaagggtaggcaaggagaagaggggagtgtggggagctggaggaggaagccaagctgcagaaggcagagctgggaaatggagagaagtcagatcactcgtgataactgcgctgctagattcagccttctgtaaagtcagccttatctctgctttctaatcatatgagccaatacattttgctttattttctgaaggctctttgagttggactttgtgtcagttgtgacaaaaagagactcaacagttaccatggactttgagcttttcctgaatgccatccatacaatgagtcttatgaatttccatctgacacctttatgtaatgatagaagtaaatgcattctaaagatggattatatctgtttcttctcaaataaattagttggtaactgtgataagtggctgggatggtaaggagaaacaagagctgaacctatggaagagtgaaaatggcattttcaattttggggagtaatatatgattttctggaatagcttccattcccccaagtatcttcatgaaacaaatctataagaatgatcctaggattatatggttattaataatagatttttcaaagtgctccatgtcctcttccactcacaggagatagttcctattcaggacacacacccagtgcttgcagatccatactgctagactacgtgaaggaggaagaaagatgtttgcaaaggagccaagggggaaagcaggttgcctgcaccaagatcagactgtctcttgtgttctttgataactctgagattttcctttcctattcctttcttcccatctattaatgagcatgaactacatcctggcctttaatcattgatatcatttcatatatactttttcattatcctcatctctcctttgcttctatgaacatctgtttcccagacctcttgataatacagtgtgtacatggcagctttccccatctctgagccacgaagctgaatttcctatgcactttcaagcattacattgaaaattaagctgaatgtaccatattttgttataattatggtttagaaaaaaaaaatccttgttaattaggtattcaagaaagttatgtggtccatatgctatagaggaatttatagtctacagtaataaagtttggtaataaagggatagtgatgagtgaaagggacaaatgtaaattaacatcccccaaataaatcaagcagtttaggaaattgggccattcatggaaaccacatgcaactagttttaattgccagttttaaagtgtctgattttagttgttttaaaaaaattatttttaaaaaaccaaatagacatgatttgaggcttaatattctgttatcatttgaaggcatagagctgctatgttatcatcaaaaattatttgttataataaaacattattctgatcatttttcatagagtctttggcattgggttggacaatgatggaaattagtgagttttactcagacaaggtcccttcctttgaggaatttatcctccataatgatctgcacttgcctgagcagtgttgggaatggtctctcttccttggcatggaagagtcccctgggtgataatgatgattgacatcaagtatcaagggcttcctctgggccagctcctgcactgcgcacctctgcttacagtcctcagagggagtgtattacctaagatattttttagttgtaagtatgaaaaacataaaccagaaattacgtaagtgataaagaaacctctcttgtaataagaggtttaaagattgggcagctccaggattggtaaatttatcatttgacactgttaaggacctgattctttctttttgctcagctcttctcagtgtgtgagtttctctttgggctggctcccttcaaagtcacaagatgactgccacaatctcagagtcacattcctcatgtcaatccccagaggaagcagagggcaaaaacttttcctggcatctcgttttctttatagtaggaagacttttgcagaagactttcacaataggtaaggaatagatgtagagtaggaaaccaaccacatctactgtagatagaggctatcattatctccattttacagacaaagaaactgagtcttggaatggttcattaatgtgcccactgtctctcagctaataagtggaaagctagggtttgaaccaaggcattcagactttacacgtgttctcatccactgcacaaaccacttggctatggcaaacacatgcctacctcttaataggaccctggagtcagttgaagtgaaagaaatgggtaaaaattttcttcaatttttatctttcttctttcccttagaagtgcctctttttctttttctttctttcttttctttttttgttttgtttttgttttttgagagtcttgctctgttgccaaagctggagtttaatgacgcaatcttggcttactgcaacctgcgcctcccaggttcaagtgattgtcctgcctcagcctcccgaatagctgggtggccagccaccacgcccagctaatttttgtatttttagtagaggcgggattgcaccatgttggccaggctggtcttgaggagtgcttctttttctttccaaagtcctgtcctagatcccatactctgaaagaaaagtacagggttctaggagaatctatgggaggggcagttaacttggccttggagtgagtgatggcttctcagaaatgagttacattatctccagcaagatgtgaagaacaaggaagactagccgggtggaaaagtttatgtgcatacatataagataaagtgtttcagggaaaggaagcagcatacaaaaatgggagaacgggtccaggcgcggtggctcacacctgtaatcccagcactttgggaggccgaggcgggcagatcacgaggtcaggaggtcgagaccatcctggctaacatggtgaaaccccgtctctactaaaaatacaaaaaattagctgggtgtggtggcaggcgcctgtagtcccagctactcgggaggctgaggcaggagaatggcgtgaacccaggaggcggagcttgcagtgagcagagatcacaccactgcactccagcctggggaacaaagcaagactccatctcaaaaaaaaaaaaatgagagaatggggtgcagtaggaaaactgaaagtagctcagataagcaaggtgtcaagcacaaagggtgatgaagtggacacacaaagctctagaggtagtaagacaccattaaagacattattaagcagattaaggagcttggactatatctggagataagcaggaagtcatttggaatttttagcagaagagggacttgatcagaataaaatttaggcacgatccttctgccagcaggatagagaataaatttgtgtactactaaggagtgcttgcatgtctaaattaagtatggaaggaaggcgtgatggttaatactgagtgtccacttgattggattgaaggatgcaaagtattgatcctgggtgcatctgtgagggtgttgccaaaggagattaacattgagtcagtgggctgggaaaggcagacccacccttaatctgggtgggcaccatctaatcagctgccagcgcagccaggatataaaacagccaggaaaacatgaaaaggttagattggcctagcctcccagcctatgtctttctcctatgctgatgcttcctgctctcgaatatcagactccaggtttttcagttttgggactcaaactggctctccttgctcctcagcttgcagacggcgtattgtgggactttgtgatcatgtgagttaatgcttaataaactcccctctatatgtatctctctatactattagttctgtccctccagagaaccctgactaatacaaaaggttacaacctaattcaagctcccacgtcactgcagtgccagggccctccctgtgccagactctgttggttgactcatcaacccttccctcctttgcccacatcccagagacttaagaacccagatgcttgttttcccagccatttggcaaggggtagccatgtgactcagtgtggctgcaggcttctgggagagagtttaacttgttgataatgggagaagctcactaggaggctgtgtaagaagctgacatctggacccatcttttaaccgtgaagtcacagacgtaaggatgaatgcctgcatggagcaaaaggatggaaagagcctgggtttcagatgacagcattcctctaaaccaatggggcctagccacccccgcatggcttgttaagcaagcagtaaatgtgcctctggtttaagccactgttggttatgtcttccgttgcagcagaaaacatccctaggaaagtcacatgcattaatgcaagtgacttgcaattttctatttcattttgactgtgtatgcactgcctggattcttcaagcaagagaaggacatttctatagtgcatctgttatggtgacaggttacaagacagagctctgtgaagctcctgctccctttgggatgaaagcgtgcatgtgcagcacctgctctggacaggacagaggaggtctggtggattccttcagccgtggctcagtttctttctgctgacccttggcatggcatgaaacaaagtccatttggcctgtgatttcatctgagacacccgcagtcatagtagagagaatcatgaaatttttttattacatgatttcttaaaatcataataagactttatgtttggagaaaaatattacaacatacttttccttcaagcaatttatgttaatagaagagtgtcctaaagaaaagattaaacacagcagtggagcctgttatatttttctcagacagacacagcccttttattgaaattctaatgaaatatatacccataaaaatgctccccctgccaccacttaaatggtattcgcatgtacagcatacccatgccaacagccactgattaacatgtcatctgaggtctgccatcacctgacaggataaagctaatccgaatcgactacctgccgcatttttatgacacgcagctattgaaaagtacaggaataattaactggaaatgtaataagaggaggctctctctgagctcggggctgtcacagagcgtaacacctgatatggcttccctgagtgccaggcccactgcaataacactttttaatgctactttctgaagaaacgagtgactcaagtcgtccatcagggcaattcgttgtgaggagagcatgacagctgtggcaggtataaaacagaggtgccttgttccactgagtgacactaattacgggtaagagctttgtaaacacgcctctctgttcggaagaagtgaacaacatagagtaaagcaccagcataaccaaaatgacgtctataaataaataggaaagaacggcacttttctaattgaatgcagataggtaaataaatcagggggcacttaagcccattttagatacaatgagtcattttctactctccgacaaagtgaatggcaattggctcttggagtttacccagatgtagcatgctggaaagaaggatttccacttccacagctgctatctcaatgaagtgggtatgtatttgtattataacacacagatgtgtgtgcatacatgggtttgtgtgaaacaccctctctacttagcaataggttttatttttacaacgtcgttttaggcaatggtttggtactctgaatgcacttaactagaggtgaagtgatacatgtgttgatcctttacccaggctggcccacagatataaacccacgggcagaccgatcaataggcttttgggggcgaacgtgataacctaccctcacctgttgtcttggttagcattgcattcagctacaagtgagataaaacccaaaggaatcacttgaataagttcctttatgtgtcatgtaaaagtacaggtagatggcctagggctgctgtggtactcctggggcagggagacaggctgcccctggtgtgtggctttgctacacggagtgctgtgtttcggccacaggatgagaattgacaaagggcacacacacactgtttcttaattaggtttctggatgctgccacatggcacttgtcgtcagccggagctaagtcacacggccgtctgtggctgcaagggaactgacagtgtgtctcctttcctgggggttaacagtgttatcaccataaagaagggcaacatggacactgggaaacaaccagcaactctaccacacgtgattatatagcggaggaagctgttctgtaacaagtaataagacaaaaatgccaagggccctggcacacactcactttcctctttcttttttccctgcatccctcgctaaagccacagaaggagttacctggtgtgggtcaagaaacaaatgctaaattgaagaatatttcccactctccagagagagttaagggaaggctgtgttgctggcttcttaaatctcaccttgctgatgtccaaattctacagcacatctttcttcagcatggatctagattcttatttgaaaagcagcttcctctgggaataactttcaatgtccatcagatttttacattttcatttgaaagggtttctgagtttcctttcttttcttgcaagcagacgtctttactgggagaaaatcaggttggacctgcccatataacttgttgaagatgaagggaggtatagtaaatttggtatttaagtgtttgtatgatttatttaggattttgctgtttgcagtcattggataagaattctattaatctggatttttttaaagaaaaatttttttcgtgggtcttttttcacttaagcaatgaagaaaaagaaaataaaattactctcaatccttcttttccttttcctgctaggcttttatctctctgctttagagatgcgtgacttcgtgtgcatggatgtatgtcacttagcacatgctcctggggaacacggagtatatgcattggagttcttcaatgtacaagaactaagtaaatacagtattgtgccagaagttaactgtggaggcaaatgcttggaatagcatttagtaccactctacacaagtcagagcttttattaaggaattcttggaagtggctgtggttcatgaaagaaaggaaagatctttaaagtgaaaggaaagggtattttggggtgttatgggtggtgtaaggtgggtgggggcagaatttaaactcatatcattggatttagtatgtgcttattgatagcagaggaagaggccagtgtggaaaaaagagcccgagttttgggggttctacagtgaaggagctggtagccttcactaagcacctactgtatgtcatgcattgtctgaggcatcttgcatacacactttttttcagtctgcacaacaactgaagtccaaaagaaatgaaggaccatggtcaaggtcatgtcctctgacaatcagaacgggggcttaaatatgctccgctgacctcacaggctctgtctaccttatcataaacactgggttaaaacataaggagaagagctgctaagctggtttaactggggactcctgctcacacgactctcagatctcccactgtcccacctgtggaccccaaccatcacacattccccagctgaggcagctgctgtgtctctgggacttgacacggccacttgtggctggagagaccactgatggtgtgcggtcagcatcaggaccattagtggttcttggatatcactgttggtcaccacttattagcagatgggacaggccgggagctctggtggttaaccaaagcatgttgttttctttttagactttgccttgattgccaattagccagaacttttgttttgcttttaagtcacgaacatcccagctgtcgaagtctttctttccccagcatctgcagccgtcctgcctggggccatgagctcatctgatctcttactccaagctgccttacatttgacctggtcttggccatgacactgtcaatgaaagaccaagtggtaaagtggtatttgtgagtcagtcctccctctgagtcagaaatgaaacaatgcctcagcatgttagagggaatatagagccatcctgagatgaagcctgaaggattcttcccccttagttctttgaggtgcaaagtgacttggtatacgtattggggagttgttaataggggtgaggagaacccctcagggcagccagatgcattctcatttttccttctttcttttcccctctcctttcttttcttctttctgactttttacttctttcaaaatataggagctaatcattcaggagaatttgtttctctttaatattttgatcaatgaatttattcccaatttaaattctgtcatttgtaaaactgtggtaggtggaaaaaacactggatagggtgggaaagaaggaagaaaaaaatcccaaacccaaaacgaaacaaacaaacaaaaacccaaaaaagcgaatacacacacaaaacaaataaaaaaaaaaaagctttaagtactggctggataaagagatagttgagatatgttaagcaaatcacaatctctttgaagctgcatttcctcaaaagaaatatgaagacagccaaacttgtcttacctcccctataagagcgttgtcagagacactaatgaaataatctgtgtgaaagtactttgtaaatccgtgcatttacggccaattgatttttgacaaagataccaagaacacacaatggggaaaggacagtctgttcaataaagggtgttgaggaaactggatatccatgtacagaagaacgaaattgaactcttatttcataccatatacaaacatcagctcatgatcatttaaatacttgaacatcatacctgaaactgtaaaactactagaagaaaacatagcaggaaaaccacacaacactggtctaggcaatgatcgtttgcattggacctcaaaagctcaggcaatgaaagcaaaaatagataaataggattacatcaaacttaaaaagcttctgtacatcaaagaaaacaatcgacagagtaaagagacaatatacaaattagaaaaaatatactggtaaggcacatatctgataaggagttaacatccaaaatatataaggaactcaaacaactcaatagcaaggaaacaaataacctgatttaaaaaataggcaaaggccctgaagggacatttctctaaacatgacatacaaatagccaacagatatatgaaaaaatgctcaacatcactaatcatcagggaaacacgaattaaagccaccatgaggtatcatctcataccggtcagaatgactattctcaaaagatgaaagataataagagttggtgagaatgtggagagggaacagttgtgcactgttggtgggaatggaaatgggtacaaccactgtgaaaaaccatatggagattcctcaaaaagctaagaatagaattaccacatggtccacaatctacttctggttatatatctaaacaattggaaatcagtatgttgaagagatattggcatttccatgtttttgtagcattattcacaatatccaagttatacaatcaacctaagtttacatcagtgaatgaatagattaaaaaatagggtatctatccacaatggaatgttattcagcctttaaaaagaaattctgtcattttcaacaacatggatgaacctggaggacattatggtaagtgaaataagccaggcacagaaagacaaatactacatgttttagattcacttatatgttgaatctaaaacagtcagactcacagaagcagagagtactgtggtggttacgaaaggcagagagtgggggaaatagggagatgtggtcaaagggtacaatatttcagttagactggaggaataaatggaatttgaggtaatagataagctaattaacttgatccaatcattccacattgtatacatataatatcactttgtgccccataaatatatataatttttcaatatgtaataacacttaaaaaatagaaagtgccttataaaacgtgtagtctgtcacaagcatagttagcagtttgtgttctgggttggtactggtctgggagcaatcattcctagtggtgtgtgatgggaaaaatagtttttgtcagtgattctccactgggggaagctttgtttgaccccagggatattggcaatgtctacagacatttttagttgtaaccactgaggggcagggtgctaccagcatctagtagataggggccagggatgctgctgaacatcctgtaatgcacagaacagccctccacaacaaaaaattatctgacccccaatgtcaatagtcctgaggctaaacacctctgatttattttaataaacctcagctaaaaaaaaacttactgtaggacagaaataactgtaataataagattacttattgcacggaggttgaataaagcagcgcaactaactcatagctcagtgcctggcatatgttgcgttcatagcctatttcatgctcagtgttcccgttatggctctttctagaatccttcctacatatttgcagtccttcatcatcaacccttcctaattttacatgagtcaatgttcatattgctttggctgcctacacaccagttttctttttgagaatttcttccctccaatcattgtgaggccttggtggcaacataaatccagatgcctctctaaggaagcaaaagaggccacatccttttccctgccccagcccagctaggtggtgggcatatgacctgacattggccaaataatttcttccagggtgttgactcttgagtggaagaagtgataaaaacatgcagcagtttgctgacctcagggttcctgcttgagtttattcctctggggcctgctttcaaactccatagagcctcttggttcctgtctttttcagggcctcttttcagcctcctgcggactcagcagggctcccacagcattcaatacatttccagagtttgttctgttgcttgcagccaaaactcttgactgatcacttgcccaccaatgacccaatgcatagaacaatagcactctgtattgtgtcttttggtagaggggctggggatggaggcatggatttgtagcctaacaaaacagcaaagagcttctaattgtaattttcccactagcactgcaggaatattaagttctaagttctttattgaagtaaaagttgaatcttcttcctccagccaggtccttatcaataaacataaattagcaaagtgttttagctcttcccttgtggtgaaccctttacatttggctaatagaattgggcaacaatatgacttaaaatattgatttaagcaaattctcagaagtacatagtatacttattgtaaaatatacatttgaagctatcttttttcatcccattttacctttagtgtttgccaaaccctattttaatatctgtatagaatggaaacttacattttgtgtccatctgggaatagtccagccaagcaatggcactggctagtgataagcacaaaaaagagaaattaacaaattaattaatacttatttttaatttaggttgtttctctggacctgaagtatgactgttagaaaaagaaaaatctgataagcttcacttcctgttttgaaaaaaatagtaagaaatcacatgtgtttagtggcttaaaatattttagtcatttttaagtttgcaaaatagattgtgcatatgccttttctctttataaatatatacctgtgaaactcaagtgcatgagagatttaaacagcttttatttttcaaaggcacgaaagacaatatttggaacagaaataagaaatagaattgcaattcttgattttgtcactaattctcaatagataacactagcagttttccaagtttagattgaattgtatgagctgtaattaataggtatttgtaaaatcaaattatgtgtttatacatgcctgtagcagtagttaccatcctcatcgtccttgggtagaggtacacacacatgaaaatcggaaaaacaagcttagcaaatatttttaaataaaatcattaagtctctgatgaagctggttaaaagtttgacacccctgaggctcagttttctcatctggaaagtgggaatgataatagtaattattctagctggttgtttttatgactaaatgagaccatgtgtgcacagggttttaaatgtatttgaagggctatgttatggggaaggattttataatatctaacactagggggagaaagcattttctaagttaagattgtgctaagtataagctcaactaagcactagaagcagccattgtgtatcactttgggtccatttaaaaaaggaaagaattatggatgacattagtagagcagccaaatatttcaggaggatatttatgactggagagagtttggtcatctcattattagtgacatcctggggacaactaactctcttcacttttcttcccctgtctttccctaacatggcaacacgaagcaggtgttcttggtcctgacccatgaagaaggcaagcacataattttcctttgatcgggctaaatgcaagcaaaggaaattggctaggatgacctaattttgggatgctgaccctgaatggagtgtgactgctgcttcaggactgagcctcatggctgtgaatgtggctgtgaatgtatcttcccttgtcaacctgctgccttcttgtccattcttcgaagaccatctcaagcagcctctcttccatgtagtctttcctgatcttctaattagctttgatctcatccaccgagaatgggtttgaacttccttacagaacttactgtgggtctgaatcccttactagataataaacaccttgagggtgagaactacatcatactcatttttgtatcctccttattcacagtacagtgccccacatagagtagcactgtgccattgaagaagaaggatagatttttggagggcagcagagctgagctcgaatcttggcttcccattacctagctaggggactccagaatgctacttaatctctctgaaaccctttgttctcatctgtgaaatggagagaataataccagaatttgaggggagaattgtcattggtctcaaatattaatgtatcatattccattgatatgcattatttctgagttgagttaacatgcacaaggaagttttaaccccatatttacaagagcagtgtttgtagtaaaggtacattctagttaaaatctatgagccaaattaggcttacaactgaagttttagttagttgaaatggataagtaaacatttacctaattgcttatttctctaaaatttcatctcaagtcttacctgtgaatggcttaatgtttggtgttttcagtttatctcacaatgaatttatgtttcttcaattgggtgttaaaaactttttgccggaaatcttcagaagcttgggcagaaagatccctggaataaacgagaaaatgccagccttaagatcatatgatttttgcacaactgctccctggtggtgacatacccaaattgcaggaacattaagaaaaaactctagctctttgaggaaagttatgaagagacagttcttaagtacagttgctctttgaccaattcctcaacatctattgctttttctatcagtgtaaaacaaaaacgttgagtgtcaacaacatgtatcttctagctaaatcctcaggactttagaatgcactgagagtgcatctcccttgtagaggccaacaggcaaattccttcattactgacatcaccaacagaagctcaagcctcctgggccctccatcatgctccagaccccctccagtgttcttccattatgcatgctggcactctcagtctgtcatcagcaaaccctctcctatcctcaggctcctctctgaactgatcttgaccctcttgctccatctgcacctaccttgccaatatttgtctaaagtggcagctgccttttctcttatgctccttatgcctcagatcatagaggtagaatagctgtcctcctggctacctgtcatctgctagaaactatctgtcttccttcatctttcagaaatcacaactcttctaaagcacatggcatcttactatttcacccaacattcttttatagccctcttctactagcctcccagtgatgcccctttatttatgagactggtacctggttcatggtctttttcattctactcctgttattattcttggtgacaccaacttggtgacaccattcaacaccctgaatctcagctccttagctttatcacctctaattacttttccctccattccacctcaccatcaatttccttgaccaaaccacgaattgcatctcctctagaataacagtctcaaacattcgtctctctggtcctttctattcttccatctcgtttactctattaatgtcattgcaataattttttggaccatatcaagatggccaattccttacccctacaacattttccactattcattttccttgttttcaatgaacacaatggtactggcgtctatacccatacatcacacaccttccttcttactacaatggaaggtatgttcatccttcacttgtgctttggatcccacaccctcacctttgctcccggaattatcacctttcctcccggaattatcccctttcctcaatgcattatcagtttttccatctctattgaactcttcccatcagcaaacaaaggcattgtgatatctttatctcccttctcttgatcccatctactcctctggctcccaccccctttctctgctctccttcatggcaacatttattgaaagttgttcttacttgcagtccctacttcttcacctcccattctctcttcaacagattccaactgggcatctggccccttcacccactctacagaaactgcgctcctctaggtcgcccatgacctgtctgttgccaatccaaatgcattcccattttacctctcagcaacatccaacgcagccaaacgctccctctttaaaatatttttttttcttttggcttacttgtgttgttttcaacatttttactcatatagcacctataaaaattttgtaaaattttgtagaccattacacatttttagaattgacatctatattgttcatcataagtttaaatagttgctagggatagaatttccagtatgttacaaatattgacatcttaaaactgttatatggttctttttaaatgtgcccagtgaaatctaaacaccatagaaatttgataccataattcgtgtagaaaatacacagccttctttaacagaaattttacattgtttcctttttccttaaatttatattttcactcaacttcacccgcaaaaaattttcccaatatattttatcactccaccaacttctctgcaactgattatataaattgaagttagaacttgaaaaatttcctataaggctctgtaagtcaaaacttttttagatttagttattattgtagttatttaattatttatacacttgatcaaaataacataaacattatagattacaaattttgatgaaaaagcattactctaaaagaaaactgtattgtaaacatagattcttaggacatggctaggatgtttttccccacccatttaacttgtgtatgtgaggatactactacttattgttattgtgagacagagttcagcattaatcctctccatattttgtctttttaaaagatgtcagctctgagaaatactgtttatatacataagtagatagaaacttgatcatagaagtgctatccaattctttgaattccttttgagttatacatccaaaatcagagtaatttatcacaaaaaaagttttctaatgatctagctcttaactaccaactttcaactcagttaagttctcctccaattttctggaaagcaaaacattggacatccttctgcaaatccttgtgtaagtcaggtgatgtccaatattcgttacctagctattacagttattaacttcatcaaactgacaccagtatttctaatggttttcttttcatgtctaggatgttttacactgttggacactgcaatatagtaagatttgggacagatgcaagttgtagaggggtaatcatgaaaggaagttgggatggagaacatctttattttattaggtacattctgaggctgaaagggtttggagagagtacataagaagttgaagatctgaaaatcgctctccttaaaactatctgtgcatatattccccttggaaattttcggcatactcttaagacccctggtttttctcttaactccatagctttccttgtgagttcctttgctggcgatttcttccctgtttatccctaagtgttgagcaaaatgggtatcattcctgggtccccatccatctcctttttggccatctcttcatcagtcccaatgcttcaactactggccataggttaatggtcttcctgcaagctcagagtcgtacatacaacctcaagctcagttgcccagtgtgaaggcccaattggcatcccacactgctcatgtctaaaagagaagtcatgattctccggcaccacatccaaccaacctgttcctccacaatctcccacatctgagaaaatggtaccatcattctttcagttgtgaaatgaaaaaacctaggagttattcttgatttctctttttcatcacttcctacagcaagctccatcagtgctacctttaaaacatagcctaggccgggcacggtagctcatacctgtaatcccagcactttgggaagccgaggcgggtggatcacgaggtcaggagtttgagaccagcctgaccaacatggtgaaaccctgtctctactaaaaatacaaaaattagccaggcgtggcagcgcatgcctgtaatcccagctactcgggaggctgaggcaggagaattgcttgaacccgggaggcagaatttgcagtgagctgagatccagccactgtactccagcctgggtgacagagcaagactccatttcaaaacaaacaaacagacaaacaaacaaacaaacaaaaaacaacaaagaaacacaaaacatattctggatccatccacttctcttcgtcaccttccctgctccctccctagactaagatgccaccatcatggcttgcctggaggacttgatgcttcctactgacctccctgctttcattctgccataccccaccaatgatctatgctccataaagcagccaaagtgtcttttcatattgtcagttggatcatgttactccactggctaaaacactatacaaaaaataattacaggatggaactggaggccattatcttaagtgaagaaactcaggaatggaaaaccaaataccgcatgttctcacttataagtgggggctaagctatggatgtgcaggggcatacagagtggtataatggacattggagccttggaaggggaggtgaggaatgaaaattacctactgagtacaatgtacagtattcgggtgacaagtacatggaaagcccaaatttcaacgctatacaattcatccatgtaaccaaaaaccacctgtacccctaaagctattgaaacaaaaataaattaattaatatagaaaaaagaaaaatattctgattttatatctgggtctgaagtgctctgtggtctgggccctgcctacctttctgattccactttcatgtttgtcttgctgtcttgctaacagaactccaatcacatggaccctctccttgttcctaaacatggcaagcttgctttttactcagggccttgttcttgctgtgcgctgagcctagaaatttcttccctcagatggtcccattgctacctcattttctttccttatacctcagctcacataacatccccttttagaaatcctccctgaccacatgctagctcattaccctatatttttaaatagcaaatattctactagaaattgattatattggttgggccaagtggcccacgcctgtaatcccagcattttgggaggctggagcaggaggattgcttgaacccaggagtttgagaccagcctgggcaacatggcaagaacctctttctacaaaaagtgaaaaattagctgggcatggtagtgcacacctgtagtcccagctacttggaaggctgttgtgggaggatcgcttgaccctgggaggtcaaggctacagtgagctgggttggtgccactgcactccagctgggcaacagagtgagaccttgcctcaaaaaaacaaaacaaacaaacaaacaaacaaaataaattgattatatctgttgttatgtatgtaaactgcacaaaagcagagatctttcctgtgttatttatctctgtatacccaatgctaaaaatgagtcaaacatgtagtagtaggtgctcaatatgtagttgttgaatagacgcagaaatttttactgtttgctacagttttatttaagcacaggagcatggccagtggtatttccagggaagaatacattagtaatgcaggcttgggtaaccacttgcagctcacctcactactgagcaatgacgtggaattggagctggtatcacagaacagggaatgatcatgggttctggagtcaaaagaggcttttcaaggatttaacccctgagctgtcagtgtccagctctacggacattgtgggcaagtcacatcattctttacatcccagtttcctcatatgtaaaatggagataacttctaggattgttgtaagaattggaaataatataggcaagtgattgacacatagtaggcattcaactaaccgtagttgtggtagatgctgttatcaccccatccgattcccctgagattccttttactgctttgtccaatggccagtggcagactaggatagggtgataaaatcctgttcgcttgcctcaaggcagggcagaccctggggagtcctgcaacaggagaccaggacttctatgtctgcaagtcttcctgtgagttcaggctaaatctaatcttcaccagacaccacctccttccccttctctattctgattgcttcacttcatattactttctcctaggagcaatgcttcaataaatcatgggtacgtgaatccctggctcatgttctgcttctgtggaacctgaatagggccgtggttatcacctcttgttccactagaaaaccctagcagctacttttttttccctagtaatgctgtctgttagttgtacttatctgctcatagtaaaacccatagctagaagtgagaattactataatgtctttgcattagtttaatgttgataagaacagccacctattattaaaagaagaaagaatgggaagggtaagtatttacatttctcattagtggaaataggagaggctctagaatttaaacgctcaggcctttctatctgtaaggccacggtaggacgtgccctagcctcagcttcaggtatcctgaagccaggcctctaccactcactgctgagctgtgagttctgggaagaaatactcaacatctctctgcctcattttgtcatttgtaaagtgagaaaatacagagttgctgagtgaagtaaatgaaatcttgtatgtgaaagagcttggtaattataaaacacctcataaaggtgaggtgtttgggaggataaaagtgacgttctggttcattcaagaattgaaagtaaatgcattaagatattgcacaaaagtgtgagcctctttaaatatgtagaaatagggaaaattgtgtttgagttatgtgtattgtgttttaaagaaattacttttggggaaaatatattttatacttaaataataataaataaggtagaagcactttgtaaatgatataaagtatacagacactgcagaaaatgtacgcacgtgaacacatacgcactgtagctccagtgacttctgggaactatttgagggagttgcagtaacagaatttcataggatttattagcagtagaaagttccccagagctgcctacataaggctttaattattcaaagattgcactttggcacttcaaacattgccaacccaagaaatcagaaaaatgagcacatttctggtggcaaggagaggcattttgtgcaggaagcagcagtaaaaatgcaaaccaaaacctctgaggaagccaccactgcaaggtaactttgaggcctgggaatgagttcttccctagactgaaggaaagaagtattttccttcaaaggattgagccaaagccaagaagcgaaaaaataaatgacaggagacagcaagtaaggatgagcaaaggaaagcaggagtggaaaggttcagaaagtggcagacagcgacagctgggggaaaccagaagaggtaaagagaccgggcagcagcagaagattcagggaggatgggcatggtggctcacgcctgtaatcccagcactttgggaggccgaggtgggaggatcacaaggtcaagagatggagaccatcatggccaacatggtgaaagcccatctctactaaaaatacaaaaaaaagtaaataaataaaaataaaagctgggcatggtggcaggcacctgtaatcccaactactcgggaggttgaggcaggagaatagcttgcacccaggaggtggaggttgcagtgagccaagatcgcgacactgcactccagtctgggagacagagtgagactactccatctcaaaaaaaaaaaaaaaaaaaaagattcagggaaaattgggaggtggggaggccaggcctgagctggaacaggtcttcagccctggaaagccctgcgggcagcaccaccatggccccagcagtcctttagtatctggccttctcaggcagccctgcttctacatccaggacggaggctgccaggttgaaatgcctccctcttttggtcctccagatggagttggaagtcccgcccctttgtcccctctgcaggttgctcactgcacttattctaagacgccgttgcttatgcgtgtcctccagtagtctccagtgggagccccgagggcaggctgtctttgccacctgagcgcttgtgactggcctggtagacaccacgctcccaatcatggttaagtaaaatctgcttaagaaggcaggaagacttcaccccaacctgtaccatttgaatggcccaggacttagagggttaagatatcagttattcaaaggacctacgtgtctgtctatttttgagtgtgccaggctctgttctggggagtatcgagcccagaacaaagtcgaaaataaagatgctgttagcagtggggaacatcaggtcacactagctctgtgccaggcgctgggctggcgtatatacaattagttaattctcacggcaactctctgccctcaagaaaggcagattgattgatgatttaaagagggaggcagatacatacattactaataaatggcaaataaattatagtaaaatgcagcaagtaatataaaagggtgagaaccagggactgggagtgagttattttgttttcctgaatttggggagggtttcccctagaaggagtggccaagtaataatggagacgtcctggtaattttaaaattatttattcctcaaggagacaaagagtccaaaatagaccaggaaaagtccttccttgtgtgttagcctggtaaaaagcaaaataaagctcagcaatatattttatctcactgaaaagcaaaagctccacattacaatcgtattatttgagaaggatatatgaattgcataaaggtgtaaatattatttatgatgcttatatttaactgggacgatagtgttattgctcttatttctccagtttattatagattggtattaaggcatgactataaagctctttgaataaatcattttaattgcctagtaatatgagtgttcatgttaattaagtagatattttgcacatggcaaagataattcttttcagctttttctttggaaagacagccttataaagtgctctttgtggaataaatgactttcctattatcaaactgaggaccatgcaactctcttaaaaattgtattaaaacatttaattttgatcttaaaatatagagctgcctagcagaacttgggctccggatagctagaatgtgtacggctttgtcatgctgcattagcagtgtggtgcggcggggatggtgtttatttggggtaaggacacaccgctctggctcctgcctggctctgttttgctgagtagtcacaggaaagtcagtctggttctctgggcctcggtttcctcacctgttaaatgcagcgtctggactccagctctaataggcttttatctgcgactaagtcctagcataagacctgcgttctatcccctctcatggagtaaattcagacttgtgatgtccctcctgactggacatcagaagagtaggggcatgtccctcccatgacggtcaggattgacaaaaaggcacagagatttcagagatttcagtaagttgctctttgttatattgtaattgagaagtatattagaaattgctgtttgtttggttttttaaatggtacacattaagttaaaacatgtacagaagtgacaaaatgttaaaaagtggtagtaggatatgtggtctttaattttcttctttttctttttttcttttttctttttttttttttgagacagagtctcactctgttgcccaggctgaagtgcagtagcgcgaccttggctcactgcaacctctgcctctgggtcttaagccttccaagtaactgggaccataggcacatgctaccatgcccagctaatttttttttctttttggtagagatgagatttcaccatgttacccaggctggtctccaactcctgggctcaagcaatccacctgccttggcctcccaaagtactgggattacaggtgtgaaccaccgtgtccagcctaaattttcctcttaatactgttacatattttctaaattttctgtaatgaatgtattccacatacgtattcatatacatatattcaggaaaaatgaaagcacttaaaaaataagtgtggttaatattcataaaatgccgccagtgaaccaaactctatccaacacttgtttctgcatccatatatatatatatatatatgtataactttctagttttataaacacttttatgcccggcagggacacaccagtaccttaagtgaaacggggaaattagaagttaccaaggttaccactggtcagccttttttcttaaaagcccgagcttcaatggatttgaataaatgcttaattaaagaagacatacagatggcaaataagcatataaaaagtgctttacattattagtcatccagaaaatgcaaattaaaactacaaggagataccactacacacccactggcatggctaaaatcaaacagactgacaatacctagtgctagagatgacgcacagaaatgggaaccctcctacattgctggtgggaatgtaaaatggtgcaatggagaagtttggctgtttctccaaaaattaaacatacatttacagtatgacctagcaacttcattccaaacatatttccacacaaatacttgtatgcaaatgttcaccgtggtataattaataatagccccaaactgaaaacaaaccaaacatttattaacaagtaagtggataaacaaaaatgtggtatattcatacaatggaataactcagcaaggataaaaataagaacaaactactgatacatgaaacaatgtggatgaacttcaaaaatattgcgataagtgagggaagccaggtgcataagactacatatgattccatttgtatgattccattggtatgaaatttctagaaaaggtgtatctataaggacagcgtttggttgcctggagctgggggtgtgagtgggtgttcgctgtttgaaacaatttcagttcccaactcgtcagtcatagtattatagcctcagagcgaaataggcctttgggattatgcatcccaggctcatccctttgggaatatccatcccaggttcacctcatgcccaggtagcccttgataggaggtcactcagtgtcagtgaaaccatgcacaataacagagagctcttccctctacaagggaactcattctatatttggacattctgttagaaagttcttccctcattgacatctatcagttggctctcttctgccccaggaagcagaagactgtgaagttatatgtgggcagtagcaggaggtaatggaaatggtttaaaactggattgtgttactaaaactcgttgaactcaaaaggggtgaattttatggtatgtaaagcatacctccataaagctgtaaaaaattaaatccaaaattacctaagacctccttagaaaaaaaagtttgggacatctaagattttgttctgtttggttatgggaaatctaccttcaacattatttcttgaaataagccaggcacagaaagacaaacattgcacgttctcacttatttgtgggatctaataatcaaaacaattgaacccatggagacagagagtagaaggatggttaccagaggccgggagtggtagtgggggttgggggcaggaatggttaatgggtacaaaaaattagaaagaatgaataaggcttagtatttgatagcacaacagggtgactatagtcaataataatttaattgtacattttaaaataactaaaagagtatcattggattgcttgtaacacaaaggataaatgcttgaggggatgggtaccccatttttcatgatgtgattataaataaataaaaagaaaaaaggaaaaaaaaacagatttcttcagggcatcatgaaaatagtttaagttttgagatgggttgtccgtgcagctgtcaacaaagatacagctgttctgatctggaagtgagtactgttcaaaatggaccacttctgttattgaaaaaaaaaaaaaagcaaatatggaggcctggaatgttcctagaccagggatttttcaactgacaataagaaaagagacaatgtttaatctgtaataagtgtttcacatgggttatttgctttaatcctcacaactctgaggtaagtactatcattactcccattttacagatgggaaaactgaggcacaaagaagttaaataacttgtctaaggtcacataattagtgagaggcatgagtggagcttgaactcacgcagttggcctccagaggccatcttgtctcccaccatgccccttccagcttctcccaactgctgttgcatgtggattataagaggctggctcatcagactgattgtttattcaattttggtcaggctgactgtatgctggtgccaatcatcagctgctgcagatggtgaggcctgggactgtgacttggttaatgtcacacaagcaaatggtcttcctttgtggactgctttcctttttgaatagcactttcaggagttcttccagagaagtacttttttttttttttttttgagacggagtcttgctctgtcacccaggcagtgcagtggtgcgatctcatctcattgcaaccttcacctcctgggttcaagcgattctcctgcctcagcctcctgagtagctgggactacgggtgtgtgctgccacacccagctaatgttttgtatttttagtagagacgaagtttcgccatgttggccaggctggttttaaactcctgacctcaggtgatccacctgcctcagcttcccaaagtgttggtattacaggcacgagccaccgcacctggccagagaagtacctttatgttctcaacatgttaatgaatttaatgcagaactgaagccaaaggtgaggtggttggatgagtgaagcagttaagtgcgtatgttagacacatgttctatgtgggttatttccagactcaccttagctcagtgttgtgataatagtctcccttcagcctcatatcagagcctgagccaataatatgagctgtcttcttggatagcttgggctgggctccacaacagaagaagctggggcaaattggctctgttgctgagacctgccatgtatttacataactaggttggcaagatcttcttagaaaaggttggctggccacttgtcccagaatgttatgaagttgatgattcaaacaatttctattcccaatcatacaattataggcttagagtgagaattaactaccggattatccatcccagcccatgccctctgtggcaatgccttagtaacccttgactcatgatctcccagtctgaattagaacatatccgatgacaggcatttttactctacaaggggtcttctttcattttagacacttctattagaaaggtatcccttcctaacatataggaattggctctcttttgctctggggagctacagagttgtattgtccaatatggtagccaccagccacatgtggctgtattgagtacttgaaatgtggcaaatcctaattgaaatattttgtaagaggaaaatacacacaagatttcaaaaactcagtatgaaaaaactttatactgattatatgttgaagtgataatatttttgatatattgggttaaatataatatattattaaaattaatttcatctgtttgtttttacttttcaatatagtaactagaaaattttaaattgcgcatgtggctggcattatattcctactagatagcactactatagaatataagtctttaccctctttaaaatgcagccttcagatttttgaaagactgctatcgtttttccctcaaacatttttaaagggtagacttctcaggttcttttcaatgttatttatttaacataatttccttcatcattaaatgtgttctagcttttcagtctctacattgagctgaataccgtaagctgaagattagaattaagatgtaccatgccctgccaggtatcctggctaacacggtgaaacccccgtctctactaaaaatacaaaaaaaaattagctgggcgtggtggcgggctcctgtagtcccagctactcgggaggctgaggcaggagaaaggcgtgaacccgagaggcggagcttgcagtgagccaagatcgcgctactgcactccagcctgggagacagagcgagactctatctcaaaaaaaaaaaaaacaaaaaagaaaaagaaaaagaaaaaaaaagatggaccatgccctttagggctattatctctcttgttttaatattacacttttgttaaaacagctggtttgctataatttgtatagtggcacaattataccattcaaggctccttaacttagggttagtgaacactggttggtcatagatgggctccaggtttccatgatccacctgaaattgtaaacaaaattttacagctatgggcatttgtctgtaagttagtctttagctctcttaggttttcaaagagatctgaggcttttaaaagttaagacctattagattgtattgcggctacagtcactttcaactcctgggatttttttttttctcacaaaactctttttaattatacctaatgttaaatgacgagttaatgggtgcagcacaccaacatggcacatgtatacatatgtaacaaaactacacgttgtacatatgtaccctaaaacttaaagtataaaaaaaaactctttttaattttagtctcccatatgtttgcatttaattttttaaatggatgattttatgtttattcctcttaagtctatacctgttcctgttacccttctattttagcttattgataccttttgcctctcttggtttatctgacatttaatgaattaggcttctgtcctggctttgtcacacctgcaattttgataagcatgtcttttgtgtgttcatccatcactaattgaaattttagactgcataaaccatagatagcacttgggagtctgccatagtgattgccctttggataggcaatgattcatcaagtagtcaacattccttgggtagagttgttcaaccagctacaaatctactcaactctactggcatttgtgtcttcaacttgtccagcggatgtcaaattcgttgctgaaatgaagatatatttttgtctatggcattcccccaatcttcctgacccgtaagcctgtcaaagaaggaaatgtgactggcttggtgaaagacttatttgaggaacctgtgctggctcccagtgatcactgtccttaaaatagttaagtccaatgttactagaggtttgacataaatctctctaggccacagtttctggcatctactttccctcatactttcatggctttctgaaaattggaacaattgtcttgataaaggtgtggttgaaaaattaaatttatattggattgaaaatgaaaaataacatgcttttaaattatctgagtctcagtaacaaagtggtgatgctgagtaatgatgcattaagtcaaagggtaaagttacaggataacaggggcctggatacagacgctatctactacactcatatgttctaaccaccaatttaagctaattgcgctcccaaagcaattcaatttgtttatcacaatatgttctgctgaccctcagtgttttaaggttctgagagctattgtctttgagatatccattttgttttaaaatctagaacagctaagttcttttctactaataatcataaacatgttctcttctatcagataaagtagatgtcagatgcttcctctgcttaactctcaggagttgtggagaaagccaaggctctgctctcacagatccagggccagtggtgcccaatcttggatgcacgtgaaaatcacctggaaactttaaacatcctggtgcctgggttacacatgccccgaaaggttcagatttaattggtctggatgtagttgggcatcaagattttaaaaagctctccagggattctaatgtgcagccaacattgagaatactgatctaggtcaatggttctcaaagcagagttccagaccagcagcttcagcaccacttggaatctgtcagaaatacaaattcttgagcccccacctcagatctattgagttagaaattctgcaggaggagttcggaaatcagtattttgttttgttttgctttgtttctcgctctgtcacccaggctgcagtgcagtgatataatcatagctcactgcagcctcaaactgggctcaggtgatcctcccacctcagcctcctgagtagctgggattacaggtgtgcgccaccatgcctggctggaaatcagtgttttaacaagcaatgtaggtgattctgatgcatgctatggtttgaagactactgctgtaggctttcttcctccttggaagaagcttatctgtcaaatgttattgaccctaaggacgtctggtctgaggccagtgaaagttctctacagccataggtaagttacacaggaagctttgggtgctcacttttccactcagccagtgagctggccctgcagaaggtgctaggaatgcttccatctagtgtctgcacactactatgctatccttcgtggaggctgctcatcaacctttgctgcctactccactgtgccttcccttcctgccatttattttattctctgacaagtggttttgacccataatggctgacaccaggtctgctgcgatggtgctagattgctgcaaagaaacaaaaggaagaatcccactgtgggcattaaaacacaagttttacagccatttgaggcactttgagaaaaagaaggtaaacatcagtatgcaattagaagtgagtggaaggtctttggcatcacatccgaggggtgggttgtggggaggcagttcggagaaactctgacccagacttgtagtgtttgtggctgcagagtcacatgtcttagcaaaagaaggcagccacaatggccaggtgggcactgaaggaagctgtcaccatttttgactcttctttctggcagtgtgaacttcaatggcccacataatttttttgacctaatgtgtaaacattttacctcatgtgtagaaatagggacaatggtactacctcgtggggttgttgttagaatcaactgagatcctatatgtgaaaatacccagcacagcaatagtaaggggtggttatttgataagcctcccatgtaccctccatgaaattataatgttgtctgtagtgaatttttcagaactagggattagtataaaactagggggcaggtggtttgttcacagatgctcattacatcccggttccagaaaatccttttcctcatggcatctttcctccctttcaagctaggatcttgacctctctttaccctcccgaaactcatcctcgcttattggtcagtcagaagagggctaaggtattaatcaagattagggtgaacatgacttacaactatttcatgtgttagtgtttcagagtgagatgcaatgtaacagttgttaaacatcttttaaccccaaggagggaagggagcccatgtatattgagtgccttcctcataacaggaagtttgctttcgtattcacagtcacttaatcctcagaagaggtgctactattatcctcattttaaagggaaggaaaccaatgagagtgaaatttaagaaacagatcagattattgggaaatggagtattcttcccagagctcctcaaaatatcatgtagctttcggactttgatttctcatagggttggcatagatcactagaagaatcagacagaaaaaagtttgttttcaaatgcaagttatttctttgcctaattgtgaagcattacagaatgattggcaatagcccagaaaacacattcctctgccctcattgtttaataaaaccaagagtaccctggcagaatgagctatatgggtttgctgattggttaatccctgataaaattggaatttttcttaacccagctgagaaagtaatcactcctaagtacaaaatagaaccatagcgaggtggataatctctctccaagaggaacttggtagtcgctgagttttgcttatgtcttgttacattgtgttttagtcagtgatctccagagcaacagaactgacaggatatttatggagagacagtatatataaaaaaaggttttgttacgggaattggctcacttgatgacaaaggctaagtcccaccacagactgaatgtgtgatggagaaccagggaaacctgctgtatggctcagtccaagtctgaaggcctcagagtggaagccaatggtgtagctctcagttcaaggcggaaggcccgagagcccaggggccactggttgcaagtcccagagtccaaaggccagggatcctggagttctgacatccaagagcagaaggagaagggcgacctggctccaggaaagagaattcatgcttcctctgcctctgtgttccatccaggcccccagctgattggatggtgcctgcccacgttgagggcagattttccccattcagtccacagactcacatgcccatcttttccagaaacaccctcacagacacacccggggcagtccagtcattctaatttagaagcaaaaccatctgggtttcactttcagcagaagcgtggcaggctcagggcctcctgaagcattgagaataattaatgcaatgattgagaataaataatgctttaccagctatctgagtaccccttaactcagtgaggtagacacccaaaagcaaccatcctgcatttttttccgtgagcattaataaagtctattgttcattgtagaatgttctggaaaatgttcacttctcaaaatgacaactcatctttcaatcatctcctcctctccaaagtctttcctacccttccctcacctgaagtatcgatccgtcagccccggttggtgctctcacagtactcatttacaattgcacttaaaatgctgagtagcttattggtctattctcaacacccccctcacccccatcaaaccacatacttgtcagataaaggggtcatgatactcacctggcagcagaggagatacgagatcaagagaacggggtcattatcttatttagctttgtccctttctcccaagttatcatgagaaaaaaactaaatttaatgaaccagtgaaaatcgcctggctgtctgaaagagggaagaaatgttgagtaggaatagggaacaaggctacattctatgtagggttaagccttgaaaacaaggcagagggatttatacttaaagttgaagcacctagaagccactgtagagtgttgagtgagtggtgtggtgatgaaggcaggaagaggcatagattctacagaatgaagccaagtgggagggtctggaggcagagaccaatgagcatgccagtggctgcaagggattggtggattcgtgttaggcataatgtgtacatgttaatggtgagaaagatgggatgcagagaaaactaggacttggtgagaacctcttctaaaggactaaatcaaagggagaaaaaatgtgatttcaaagcagctagatcagaaaagtggcagaaggatggaaaacttagttggaaaagggcagctgtattagtccattcttgcattgttgtaaagaaatagctgggactgggtaatatgcaaagaaaagaggtttaattggctcagggttctgcaggctgcacaggaagcatggcaccagcatctactcagcatctacttagcatctgctgagacctcaggaagatttaatggcggaaggtgaagtgggtggaaggtgaagtgagagcaggctcatctcacatggcaggaaagcaggagcaagggtgggaggaggtggcacacacttttaaacaacaagatctccagagaactcactcactattgtgagtacagcatcaaggcgatggtgctaaactattcatgagaaatcacccccatgacccaatcgcctcccaccaggccccacgtccaacatgggggattacaactggacatgcgatttgggtggggacacagatccaaaccatgtcagtagccaatttggggagtacagaagatggggaaggaagttaggatgcatttccttagttgacgttctatttctttgaagtgtcaagtacacctacaaatcacttaatatttaaattttactttttcctaaaattgtaatgaaggggtgaaataacctcattgctctttacattttaaggagtccttattttatctgctaccaatgtaggttttaattctctttggaaaatgaatactcttctgggtcccatgggagctgttccttgtggcatttgcacagacggccatctgagctgagtgcttattagatcggatgaaatatcgtttaaggttagcagccagacatcacaggccacccactggacatgctgggaatgaaaaagaggccaaaggacgagcgtctgtagttagcaaagtacaattgcaagattaacaatggcaaccccagtgcgcagtactgctggtggagagcgagtgcatgatatcataacagagtaagaaaaggcagcaaattcgcattcaaagctcacagtatgacagctttacaactgtcttttgaatagtgtctgtattagtttcctattgctgctgctgtaacaattaccacagatttagtggcttaacatgactttgcctatcccagtattgtggcattatgcttccaatgaggttcccatccttgcccctcagataacctggcacaaacaggcattaggatcttcatatatgaaaacaaatcatttcattttaaagacaacctgagctgtcaaagcagttacctctcctaataaaaaaaaacccaaaagatagattatttgtttaatgtcttggggacttattaattaatatgtatactagatgcagtcagagaaggagacaagtttaagatagtatagttatcatcagagcactgatagcatatttggtgcaaatagaaaagcagaacattaaaataaggccactgcagaagtatttatttttcccactgcaatgaaacagaaagatattaatctgagttcctgtgaaactcttgccatagaatactataatcaatttaaattggtaaatgtttccttgttaaaactaaaataattttatgtgaaaattcaaatgtggctctctgtcttagtccagagatgtttaatattccaaattcacttcaacataccaaatcagtgtttatataattagttctctctttaaaaaaaaatccaagtattaacattagttatctttgaggagggtgtttcatttattacgtgcatctgtatttttaaagggaagtatgtataactcatagtttaaaagaaataatgataaaatagtactatagcttatactgacactcagttccatgttaacttgtgtaagtatgtattaaccagttgaaagataaagagtattgatgtcctctgaaaacagttcttacctggcagcagaattgggcttttaagtcatatttttacaaaaaaaagaatcttgctcgtagatatcacctttactagttaaccaagtatctacacatatgggtcttctgcaggtttcttgactaaattgttcaactttgaagtcagtggaagaagtatgtatatgaggccaggcgtggtggctcatgcttgtaatcctagcactttgggaagcagaggtgggcagacagcttgagcccaggagatcaagaacagcctgggcaacatggtgaaaccctgtctctacaaaaaataaaaaattacctgggtgtggtggtgcgtgcctgtagtcccagctacttgggaggctgagatgggaggatcacctgagcctggggaggtggaggctgcagtgagccatgatcacaccactacactccagcctgtgtgacagaaagagaccctgtctcaaaaaaaaaaaagtatgtatatgagaatgaaaaaagaggtaaaatggtatgagttttttttataattggtttttagaataaaaatataaattattactaaaacaaaataacagacatagaatgttagcaccacatggtttctcagatataatgcagtcacacgagtttctagatcattttttagagtgctgtggcttcaaggtcacagcctgggagtgaaccccgctggtaggaatcatggtctctggcctgcacttccatcagaatggctccatcttatctgatttatatatgtatataaatagacttatgtatctgccagtctaatcactttcctcccatcttacataatattgttgcccactaatttggggcaaccttttttcacattcccaatttagacattaatattgttgttttatagtatcaatgtttctttggattcacctacttattcgcattttctttgtctattttcctttctgacatctcagaccttccttctagaatcattatccttctttctgaagtacatccttcaaatttctttaattgagtggcttctggcagtaaatggactcagttttagtttgtgtaaaatgtattttaccctaatacattttctctatgtaaaattctatgatgatcgttcctttacacattttgtagacttcatgtcattacagtctggcttttgttgccgctgttgagaaatctgctgctggtttaactatccttattttatagataatctgccttttcctctaggtgctttcaatattgtctttatgtctggtgttttgcagcttcgttgatgggtgtaggtgtgaatttcttattatttatactcctcaggacttgtgctttctgaacttgaaaagtattatctttcatctattctcaaaaattctatgccatttttactggcatttctctaaaaccatcttcttaaactccaagtggacatttatcaatttgtgattctattctccatttctcttaagtattctttgcagttaccattactttgtttcccttgcttctgttttggttaatttcttgagtgttatcttccagtttcccaattctttctttagttttgactaatgtattgttaccctgtgcttttaaatttaatttttagtttttaaaatatctctctgttcctgcattagtttgctgaggacaatggcctccagctccacccatgtccctgcaaaggagatgatcttgtttctttttatggctgcatagtattccatggtgtgtatataccatattttctttatccagtctattattgatggaaatttaggttgattacatgtctttactattgtgaatagtgctgcagtgaatatacacatgcatgtatctttataatagaatgatttatattcctttgggtatatacacagtaatgggattgctgggtcaaatggtatttctacctctaggtctttgaggaattgccacactgtcttccacaatggttgaactaatatacactcctaccatcagtgtaaaagcattcctttttctccataaccttgccagcttctgtagttttttgactttttattaatagccattctaactggtgtgagatggtatctcattggggttttgatttgcatttctctaatgatcagtgatgttgagctttttttcatgtgtttgttggttgaatgtatgtcttttgagaagtatttgttcatgtcctttgcccactttttaatggggttgtttgtttttttttcttgtaaatttgtctaagttccttgtaaatgttggatatcagacctttgtcagatggacagattgcaaaaattttcttccattctgtaggttgtctgttcgttctgatgatagtttcttttgctgtgcagaagctctttagtttgatgagaacacatggacacatgtgaaagagcaacacacgctggggcctgtcagagggtggagggggaggagggagagcatcaggaagaagagctagtggatgctgggcttaatacctaggtcatggaatgatctgtgcagcaaaccaccatgacacacatggtgtcatgtaataaacccatgtaataaacctgcacatcctgcacatggacccctgaacttaaaatgttttcaaaaaagagaaaaagaaagaaaaaaatatgtggtgttttgagagtaccttattactttctcaggtttttatttcatattcgtattatttcactaacattttacacttggttattttattctgcatcatccatttcaatatttcaaattcttgagggtctaattcagctgttgtttttgctgactctcaatcatggagcctatttcctcatgtactttgtacttttggattttaagttcctattcagctgtatctggaggaatcctgcaagacctgagttgagggtgagttcctaagagagaatctacatctacttctgccaggccctgcaggtcactacccatctgagtccacattagattaatttgttggcctaaggttttctgaattgcacaggtagtatcaatttaatgccagacctttgagggacaagcctgtggttatgaattttcagagaatatgtaatattctgacccagagcccaggctgagaagatttcctcgttctctttatgtggtttctgtggaagttgcacccttcattattttggttttatgtaaggtctcggttcaattccccatcttgcttaggcctcagtgtggccattaaaatccaaacctcttggttatcaagattggcagatgcctacagggcagccatagattcagctaacacctgctttccagcccgtaatgagctcaactatttgtttacccttcctttcttatgagctcaacaattaaatggttgtttagtatatttcatccagcatttctaggtacctagttccaagtatttctccagacagaagcttttcatcatttttctgatgaagaaactaaggcgcaaaaaaattagttgactctaacaagacacagcaatagtagaaaaccaaaactgagcctctgaactccttgcttacttctttctcaatcacgcataatgcctcaactcttagagctggcatttgttgtatcagtcctaataactcttgaggtatctctgaaatcagtagtaaatttctcccaaattatgataacttgctaaaataagatgagattaaatcattgtcacaaggtcatttgatatattacagctgtgagataagaagactgcatctctgactttcaaggctgtggtgacatgtgtagaaaatttagttgtaactatttcttcaagcacatcctggtttctaagtttgaagccgaaccactaatcatggagaggaactatttgtagtaattaaacagccatctctttaggattcatacaggcatagtttatcaacagcgtcagagctttctcacatgcaaaagcctcacgttcattatttactgaatattggggaaataatttgaaaaatctgcacattagttatgtatgcattctgaaaacagtgaacactatttgcatcttaaaaagatctgagtaatgctgtataatattgcaactagcaaatctgagactagagaaaactaattttgagatttcaacataaagaaaataagatggattaggaatttcaattgacctctctcaaatgacccagtgttaacaaaccaacaacaactacgtgcacaaacacacacacacgcacactaatccagggctactggctgtggttttattttgctttgttccaaattcccaaatctccatgtaaaatggagacctcatggacattccaaatttttcttcaatttaatcttgtcctcagatggtgttcaccttacttagcctttgtcttcaaattcaagaaaaccagttgtgggtttaaaacttcctgtagagggcgctattgatattgccaactatactaaacttttttttttttttttaaagggttcataaactacagtttctgcttagaagtcgttagattgatatttgggagttaaatttaaaccaaaactctaagcggactagtaactattaagctgtctaatacttttgaaacaagcgtccctctgctggcttatttaatgcagaagtctgagcggcccctcccctcccccttgtattatttaatgaacaattcctcttctggtctgtattaacaatggtgcttggaactcggcatcgataacacactgtatgccctgttgtgctacatgttgaatgatttgtgtgtctttgagaaagtccagcttctcctcttaatctggtatcctggaggctctgtaatttactcctacagttcccggtcataacgtatttcatgtcaagtaggagggtttttttttttttcaaactcttaatagagatattttcaaacaaagacagagggcaaagaggatcttcttaagatattaaatgagaacataaccatcgcttatttgtcttttgtattattatgaggcaattgatgattgcctggggctctgctgatgaatcagacttttaataagtttcagcaagaacggtgttcacggagataagttaattaattgctctgctgtgtgaaagctcatgtagatagtgttttattctactgtgcagtccgttcataaaaaggcacacaattctttactgcactaatgcttatcggcaaaccttcacagaaaacattatttcactctttttaaaaataaactgttaataaccttattaaaccagaaatgaaatatgttactgatcacttgccaaacgtggtactgaaaagaaatctttccttttggagcctctgatgtcttgcagctaattgtttacaaaactcttctagatactgacagaaacttctccctttattacttttaaccgtggggttttggcaaagtgcttcttcttcctccgcaccacttggctgatttcaaaccagaagagttctgtatttcttttttaccatctctgtatagcagcattttaagggaccataggataaagacttggaaagtgtcacattgtagtacagtggggttttctcctgatggctacaatttacatgccaggagccctgtaagccctctagcattttcttgatgctctgaaggaaaaaaaatttcaaacagttcttagagtctggaatgctttccctggcaattgacaacagagttcaagtcaagtttatgattcgaactcaaacttagcgtttccttatgcacttttaactctttgaaagatgggttgaatataatataatataatataatatatgtatagcactttcctcctggtatatttattttacttttattgaattttcaagtctttgttgataattgtgttttgtagatattttaaaatagagaaaacaatctattcagtcttgtcatcctagcacattggctattcgtttcttagtttaaaattatccactaggtaaaacaaatatgtttgtatcatcgctcagttttctgttctatttcaaattaatattacatcataattttatcaaaatttttttcacatacgttggcatggtcttcagacctgtggtaataatcacacctctcttaacgggtggcgtgctgatcaaataagttcaaatatcagtagccaacacacagtgtggcacataagcacttcacagatgttttgccttttcctccatcttttctcactggtcgtttaattggatttcatttgtagctactaatcggccgttatgtgccatagaatgaatgttttgaaaagtaatcatgtgagtaaataaaacttgtattcaaaatgttttcatgctttccaatataattacagcgtaaagtaaatgaaatcagagcaactggccattgaagaattgctctgtgccaccacaaactttgctgtgatataagatctactccaattctgatggtcaatcacttggcatccctcagtgtgctttttggtgacagccacctatataatttgctttcaacccaatctaagtattcccatgtcctctgggaaggactggatgtggttcttctcaccaaatatcagaacaacaaatcaatcttccatctctgtctcctttttccttttctatttatccacccccagtgttccttgctctttaccttctatgtaataagcagctattttatttgctgttttggggtctgcttcccactagcctttgcattcctagccggggtccctccagaggacatctctcctttcctaatgtggctgttctaggaatgccaaagggaattttttcacaaaatcctgtcctttgcagggacatggatggagctggaggccatttttcttagcaatgtaatggaggaacagaaaaccaaataccgcatgttctcacttgtaagtggaagctaaatggtgagaacacatggacacaaagaggggaacaacacacgctggggcctacctgagggtggacggagggaggaaggagaggatcaggaaaaataactgttgggtactaggcttagtatttgggtgatgaaatagctgtacaacaaaactctgtgacatgagtttgtctatatgacaaacctgcacaggtacccctgaacctaaaataaaagtttaaaaaaataaagaaaaatttctttaaaaaagagcatgcttctcaccattcttgatctaagggactgctctaagcctcagcagatcctggtctctggctgtggttgcctctttgattctcttcaagtggctgggtaattctattagcttggtgtaaaaataattgcggtttttggtattattttcaatggcaaaaaccgcaattacttttgcaccaaccaaatacatgttatgccttgcttctgacagcccaggtttatgtgggattacatgttatgggttttgcaatatttgccttgtaggtttcactttggggtctttctaattcactcttgaccttgactgatgatagatcaatatttccactgcctatctgcctttcatagactcttagaatttcagtttagagtgatctgatagttcatctagtcaaatcctcatttttatacatatagaaaaggagatcaggaggacagaagagattttcgaggtacaggttacaccttagtcccgtaactagacctcatctgtctcatgacatgatttcagctgtggtgagggcaggtttactgccacctcagaccctctttgtttactcaattgtcctttttaattaaagccatctctctcaacccacaaagcagcaattttttttttttttgagacagagtttcgctcttgttgcctacactggagggccatggtgtgatcttggctcaccgcaacctctgcctcttaggttcaagcgattctcctgtctcagcctcccaaacagctgggattacaggcatgtgccaccacgcctggctaattttatgttatttttagtagagacggagtttctccatgttgatcaggctggtcttgaactcctcacctcaggtgatccacccaccttgacctcccaaagtgctgggatttataggcgtgagccaccatatccagccatagcaatgtttttaagtcaagaaatttcaaatatttttactgagtctgactcgtctctcaaaatcattgcttcctcagactgcatttcacaaagcagcgagctaaaggtttagattttcaaacaactctcccctgtttcttctctctgctctatttctgcccatctctctactcatttaaacttttcttggttactttgatattttgatgattgattgtggattctggtatcattgctttttcttctagatcctaattacctgtcctatgttctcacctagtcttattgtggtgaaaattcaggtcaacttttggcttctagtctgacataaaaagagcttggcagtcaacactgccatcttcttaactgaagctcaacagctgtctaacaaaaaacaggttgttctaaataataatagcaactatatattgggggactatagcttaggaataagtgaaaggaatgagagcaacattgtaagagatgaggggaggaattgggaattctctgttacaagatacctgcattacctgtgaaatggtgtagtgttaaagtggacttgggactgggcgcggtggctcacgcctgtaatcccagcactttgggaggccaaggtaggtggatcacctgaggtcaggagtttgagcccagtctggccaacatggtgaaacctcatctctaccaaaaatactaaaattagccaggtgcagttgtgcacacctgtagtcccagttactggggaggctgaggcaggagaatcacttgaacctggtcaaggctgcagtgagctgacatcatgccactgcactctagcctgggggatggagcaagactctgtctcaaaaaaaaaaaaaaaaaaaaaaaaaaaaaaaaaaaagtggacttggattggttgtaaatgtatattgcaaactctagggtgaccaccacatttttttaaaaaaagaaatataattgatattttaagagaagagagaaaatggaatcatataaaatattccattaaatacagagaaggcataaaaagagtagaaagcaaacaaagaaaaagaaacaagggtaatgaatagaaaacagttacaaatagggtagatattaatccaactacatcaataatcactttaaatgtgaatggcttaagtaagccaagtaaaggacagggactaatggagtagattaaaaaaaataagacccagctatatgctgtctacaagaacccactttatatatgaaaacacatgtagattaaaagtaaaggtagggagaaaggtacaccatgctaatactactaaaaataaatctggagtcgctgtattaatttcagataagttagtccttaaggctagtaacagttaagcagagggctaggtgttcttaagagcccttgctttttcctcatatataatttatgttaaaagagggtcccccaccttttcacattcagcacagccaaatttcccctacatttgacagtgtgcacactgtaatttagtgatatgcatgcctgttgagtgttcaagtctgatttggcttcaccaagaatagaacaatgttcctaaaaagtttgtcatgaagagaagcccatttagaaattcatcctctaaccattgcattttattgatttttataaagaaagaataaaataattatcttattttcctatgttgctttgccacaccttttgcttttagaacttctttgaattggagtgacttctatgtactgggaaatgttcatcaaactatcttcctttctgctttgaaaagacacagattatctctattccctgaagggggaaaaggatgacagctacttccctgggggtcttaggagaaaaaaatttagggttttaaaattttactatatattcgagaatattgtctaaatcttccttggaaaattgtctatattagggtcttcatttaaacaaaaaccattttaaatgacgtctgtcaatctcatcatactctcagattccaaaatgcaattagtttggagtattcatctattctcaagggcaacaaacccattccaaaggaggatgtagccatatctattagtggtcaaggacagtttctttccacacttgttctgtgatacaaacttcccttttatacaatcctcattccagagacatgatttacagtaggtgaagatgaatatttgttaggaacaaagaaaaggaagaaagagaggtcctgccttctcactgatcttcctgatgtttctgttttcaatttccttcacgatacagccttagtgcatgtcaggacagggttggtgtgaaaccaggttctcccctactcctttctttttccaactggcttccttgggtagcaaatatctgacttgcactattctccacgttgcaacaggttggtttacattgtgtactacatgcagtgggatatgctccaattacagagaacatccgaaacaggcctctgctttaataaagatataaaacctttttaccctggtggggccaagaatctcaacccaaaggaagcattctatgaaatggtctacaaactagggcaaggagtttcttttttctttctttctttctttcttttttttttctgtagtaactctaggcaaattcctcagaaatcagattggcaagggaaaagaaggggtgggctggaaccctggaatttgggcttgctgaatgcatgccattcccttgccacatagtacaattcaacgccaactgcagaaagaaagatctaagtcagaagtgtgatgcagacacaaggcaatcatcagctcaattaaactggttattctacaaataacctagaaacagcaggattgccaaacaatctccagcccctgaaacatttgcaaatgagcatgacgactgagatttttctttctttgtagccatacactgtcacattttaatgatgaattatagacatgggcttttggcagcagactgtagcaaacatgattctacactattttcttttaatcagaagatacaaaggcttagagatacatggcatggtgcctgagaaagagttagataaagctctagaaagaaggatgtgggatggaaatatacatatgcttccccttctttttggatgcaaggcagatatgcttttattgttataagatacatgatcttttgtttcattttaggtggtatttttgcacctgttggggatgtttataataaaatatacaactagctggtatggcatacgtatctaattctataatatatactaatctatatcagtgtcatttaaaaattgcaaattaaacatattttttcataaactagtaatataatctcttgatgtcataaatatgaaagtaacatattatttgtatagtcatgatgtcaggaggatattatttaagtacttaatgggatcagaggcttagtgcacaggaaatatatttttttctataagtttcctgtgtctgttttacttagtttaatcattttaattgcaatttttaaaattttaaaacaggactataactcttggctgctattacttcatttttattctggcaagttcagaaatacccagtaacattgcaaaaataaagccataagttctgaattcttctctggccctgtcttgtcttatgtctttctgccttcatctccctttaccttctcttcctccttatacactggattatttatcccttattcatttcactaggctttcagtataaaaggaagaaacaaacctgagtctctttttataaagcaagattgctttataatacatcttagatgccataaggctatgtagatattttcttgaggagtgtttttgttcataacaatgcctagcattagacggttaaatgatatgtggaaactgatttctcaggaagaatttattttaaaggcgcagtgtaatgagttgaaaatacagaggaaaaaaactccaacacatggattgaaaaaaaagaagtccagagctttggtttaggtcccatatgtgaggatgtgtgacatccatcattgggataaacagtgcctggtggctgatttacagagtggtattcctctacagaaggcagccattcaccccttgacaatgaaatgagtgatggcagctgtattccagaaggatctatttggggaaacaaaacttgggatagggtgggtcggacatgaaaagataaggagacgtaaggatcccatctgtttggccctcttgggttagagccagcctctggagtagacagcatctccctctccctccagattgtgggggtattgagaatttgcatctaggagactcaagcaggccacagctgcccctcagtcagtttatttgggctagaatcattggcatcttttaagagtaattaaagtctcacataagatatcaaacagataaaaatctgtcttataagcaaaactgaaattggtggtttgtacatgaaatctgacaaatggaggactataccacagatgcaagagagtttaaaaacaggatccgtactcctaaaccatcacaacacctaaacgtgatgactatgaaccactgaaagcctgtcccatgtgtctcatttaatcatgacaaccctatgaagccagtatcattgtcatctcttctattctgcagatcagtgcactgcagcatagagagggaggtgtattaacttttgcctatggagctagtaacaggtagaaccgggattcttttttttcatcattttttattatgtaaaatatatataacaaaatttaccattttaaccatttaaaaatgtacaattcagtgatactaagtacatttataatgttagataaccattgctgttatctaattccagaatattttcatattcccaaagagaaactttgtcgccattaaacagtaactcctcatttccccttcctcttggatctgggatttgaactcatgaaacctgagattaaagccccaggtttaagtaccaggctctaccacctttaatggtaccaccattttctccttcattgtgtatttgacttaattccaggttttagtgtttgctttttgtgtcgggcctcatgagtagagcgctccatggtgaaggaatagcagccatagaatagttccagaataatggaggctttgtggcaaaggtagacatcagggtgcaagtcagccttagcactgctaacttagcatcacttactagcctgcgggtagttctaacaactaagcaagaaggccaggatgttgtgctaagctgatgaatcagtttacaaatatgaacctttgctatcccatatcaatggaatcatcaggggcttcaagtttaaaaatcattcagcttcctatactgctatttccatagctaatagggagaatatatattgctttatagcaaatcgcatgctggacttagtgtctttctaaactgtatattatgcccagatgttgaaaagtcttctcttgaaattaaagtaaatttatgcaactatattatttggtaagatcagacaattaatattattattattatttttgagacagggttttgctctgttgcccaggctggaatgcagtggcaggatcatggctcactacagccttggcctctgaggctcaagcgatcctcccacctcagcctcccgagcagctgggaccacaggcatgcactaccacacctggctaatttttaaaaaattttgttgtagagacagggtctcactatgttgcccaggctggtctcaaactcctgggctcaagcaattctcctgccttggcctcccaaaatgctgggattacaagcatgagccaccgcacctggtctaatattttttcttcccgtctgatgttctattatacatacctatcattatgttaccattttgcagttgctaaactaagagcacgggaaaaattgaaggggccaggtaagatgtaacagagagctgatataagagtggggaaggcctttctagaatcatgaacccaagtattgacatcataacaaaaagttgactatatcgaaatttaaaagttctatatggcaaaagacagcatagacaaagctaaaagtaaaaagacaaattggaaaaaaaaaaatctacaaaataagtgataggaaaatggcttcagtcaacagccaaggcaatcctaagcaaaaagaacaaagccagaaacatcacattacctgacttcaaactatattacaaaacagcatcattctggtaaaaaaaaaaaaaaaaaagacacatagagcaatggagcagaatagagaccctgaaataaagccatacacctacaaccaactaatctctgacaaagttgacaaaaataaacaatggagaaagaatatcctattcaataaatagtgctgggaaaactggctaaccatatgcagaagaatgaaactggacccctacctcttaccatatacagaaatttggcctgtcatagtgtctcacacctataatcccagcacttttggaggctgagtaggaggattgcttgagcccaggagtttgagatcagcctgggcaacatagcaagaccttgtctctactaaacataaaattaaaaagtacagctgggcgtggtggctcacgcctgtaatcccagcactttgggaggcgaggtgggttgatcaattgaggtcaggagttcgagaccagcctgaccaacatggtgaaaccctgtctccactaaaaaaaatacaaaaattagctgggcgtggtggcaggtgcctgtaatcccaggtactcgggaggctgaggcaggagaatcccttgaacccaggaggtggaggttgcagttagccgagatagtgccattgcactcctgcctgggtggcaagagcgaaactctgtctgaaacagatacacacacacacacacacacgttttgtgggtagcttgctcaataaagctaaataatgttaagcaggagggtgaaaggagagacaaagtgtcttgaaataaaaacacagcagagcatgatggacaatggggattctggagtcaggactaggtttgaaactcaacttccttacttattacctgcgtgaccttattcaaattacttagcctcactgagcttcagttctctcattaataaaatagtagtaatcatacctttcacccagagttgtcaggattaaacatgatggaagatataacaggcttgacccagagtgggtgctcacaaataatagtgttctttccttcccttcagactttgacatagcattaaatagccacagcagtcctgaaaatagatgcttttgctaaacagcacaatgtcccagtgtactgtttatactgcagtctctttaagtgtcaagtaagggcattgttatgaaagctataggcagaatattttaaaaccaggaagggggaggagagccaggtagggaagctttatattttctgatatccacagtgggtaatattcaagattcaaatgaagttcagagtaacttcccagattttaaatattctgtgtcatgtaagaacgaggaggaatcgctgatcaattaggtttaaaagctactgaaattctcaagaatcattttaaaaaggtacttataaatgcccctaaagagatgagaataaccttccccatcggcagtacatgagttaaatatgtggttaatgatgatacaaaaagaagtgctatgtgaaatatcagttcatgtgagatgatgctcaatattaatttatgggatatcaataatgttttagtctaaatgaaacttccctgtatataaaacattcctaattattgttaaaccattactttccacttaccattgatcttaaggaaatgactaaaatttttggagtgtgctgacacggcactattattctgggtcattattcagagcaggtgtcaatctctttcacttaatctcaaagcagaaaaaataaagactaagtagtttttcctttaatcgagtcgctttcaaagaaagaaaaacacattaagataagagcaacttttatagggatgttaacatgctaatactctttgagataggtgaagcttttgattttcagccaggttcaagagaaaacattaaattttatagagtagtgaatacaataattccctatagaaccaggtcaagccattagcagccaatggtcttccagatgaggttccccaagcttaaaccaggtgatctagctgtctattgttattttttttttaattaattaatttttttaattttttatttttttataatgtaagttctagggtacaggtacgcaacgtacaggtttgttacatatgtatacatgcgccatgttggtgtgctgcacccattaactcgtcatttacattaggtatatctcctaatgctatccctctcccctttccccaaccacgacaggccccggtgtgtgatgttccccatcctgtgtccaagtgttctcattgttcaattcccacctatgagtgagaacatgcggtgtttggttttctgtccttgcgatagtttgctgagaatgatggtttccagcttcatccatgttcctacaaaggacatgaactcatccttttttatggctgcatagtattccatggtgtatagtgccacattttgttaatccagtctatcattgatggacatttgggttggttccaagtctttgctattgtgaatagtgccacaataaacatacatgtgcttgtgtctttatagcagcatgatttataatccttttggtatatacccagtaatgggatggctgggtcaaatggtatttctagttctagatccctgaggaatcaccacactgtcttccacaatggttgaactagtttacagtcccaccaacagtgtaaaagtgttcctatttctccacatcctctccagcacctgttgtttcctgactttttaatgatcaccattccaactggtgtgagatggtatctcattgtggttttgatttgcatttctctgatggccagtgatgatgagcattttttaatgtgtctgttggctgcataaatgtcttcttttgagtagtgtgtgttcatatccttcacccactttttgatggggttctttgatttttttcttgtaaatttgtttacgttctttgtagattctggatattaaccctctacttgaaagttcatgtggaaccaaaaaagagcccgcattgccaagacaatcttaagccaaaggaacaaagctggaggcatcacgctacctgacttcaagctgtatactacaaggctacagtaaccaaaacagcatggtactggtgccaaaacagagatatagacaaatggaacagaacagagccctcagaaataataccacacatctacaaccatctgatctttgacaaacctgacaaaaacaagcaatggggaaaggattccttatttaataaatggtgctgggaaaactggctggccatatgtagaaagctgaaactggatcctttccttacacctcatacaaaaattaattcaagatggattaaagacttaaatgttaggcctaaaaccataaaaaccctagaagaaaacctaggcaataccattcaggacataggcatgggcaaggacttcatgactaaaacaccaaaagcaatggcaacaaaagccaaaattgacaaatgcgatctaattaaactaaagagcttctgcacagcaaaagaaactaccatcagagtgtataggcaatctacagcatgggagaaaatttttacagtctagttgtctcttgttaaacaacatttcaaagttgatacgcacctgcacctccaatccaagagcatggcatttttgagttacacctgttaggatttcaagatgtgattctgaaaactaaatcatactagggttaataattatacaaccactggtgtaaaaatgcatttgtatgtcaagactggaagggtaaagtgtgatggcttcaactagaacatcagcttgtataaaattgctctgttgcccacagactcagtgcagatttgttaacctaaaggtaccatctccttcaaatacagctggcttatgctaagactcaaaaactggactcagggccagttggattgattcctccatctaacccacagaacttcaatattacatcttatatgcaattttatgtaactaatatttattgagcacattctaaatgccaggcacagggctaagcacttgacatgaattattttattaaattctccccaaaaccttacagggcataataatatctaagactattttttcagtaactactagtgtcagacattgttttaagcatgttacatatattaactcactgaatccttgcagtatcctaggagatagatgctgatattatctccattttgtagatgaagaatctgaacttcagagaggtaaaaaaaaattggccctgatcacacacctagtaagtgacaaggctacggctgtcaaatctcttgctgtctgctgcctttcctctcagcatgtgagcatggagctgggggtctggtggatcctgtcaatcatatgtctgtgggcagcacctgacacataatttttgaatccagtgctaactgaaaatgcagggcctcttgtttaaaaggcaagggaaaagtgccaccgaagataataaatagaaagttttttctctcttgcaaagtcagtctcttgacttgtcatggtatgttttatttgctatttaatgtcactttaaatagcaaaaaattaaaatgttacattattagcattaattttactgttcatctttacatcctgcactgctagttttaaatgtaaatataagatcacttaacttgtatgtgaaatcactcaaatcccataatttgtatgtcatggcccgtacatacatatgtattttgttcttaccagaacgtggatacactgtacaaaacaagctcaaccacctttatttcacttcttgatgtgcacacgttctgccaactctctgctttctgtttacttgtgatgaggaaagatggaaaagaaaaagaactatgggccgccctatctttctcttgccttctatgtcatcattttcagtgtatgtggttgcctaacacaggggcctaatgcaggtaagatagggttcttggttgtttatgtttcttgggatgccattggttttttttgcatcccaagaaagttctggtttgaaaggaaagcgtgacctctcagggctgtcagcctcacctctcctctcccatcccactcagtcagagagatcatgaatttaccttgtatttgatttgagtcttgctggatttccatgcaccttgggtccactggaatttggtgctcctgaggcatcatgagcaagaaacagcagacatgccgtgatcaccaacctcctcatgcacatgctccaccaggcttcttttataaagcataagttcaaagataaaattattaagaatttcaagatggtgacagtgagccttaaaccaaatatgggaccattctgagcatgagatgaggccctgtgtgaccaggtatcacaggccatgaagccagtcctgtctgtctggaatggcttttgattaaccaggcacagagtttgcatggaggctggtggcttttcctactcactgccaatctctggcttgttctcaactttcctgattcttgcatcctcaaaccaacttgtgctcaggactaccaaagtatggggtgccttcaggcaggcactgggacaggcaacagcaatgtgggttcttttctcatctctgccatgccccagctgtgcaattctgggtaagttactcagcctttctaagagtaaggttccagctgcctcacagagttgtgaagattaacagagaaaatgcacataaatcccttagctcaagggttggcacagagcaaatgcttggtaaatgttagttaacagtgttgtggttttcacagttttggatgcattttgcagtttcatttatttggaaatctttatcccttcaaataaggtaatgaagaaacctggtgaagacccattttagaagggatggaaacttcccaatgggacgatagctagatgtttaaccacaaaatgggcttcagcagcatccctttccccatcactgttaatttagttaagaaaagcctaaaataaaattttggaagtgggaaaaggtcactctgagtgatgtgggcagaagggatgaggagaagccttctctagggatatgttcatctttttgggaagctgctagaggattggtctcttttcctttttttgaaacagggtctcactctatcatccatgctggagtgctgtggcgcagtcactgctcatcgcagccttgatcctcctgggttcaaacaatccttccatctcagcctcctgagtagctgagaccacaggtgcacaccaccatgcctggctaatttttaaaaactttttgtagagacgctcaggctgtctatgttgcccaagctggtctcgaactcccaggctcaagttatcctcccgtctcagcctcccaaagagctgtggttacaggtgtgagccactgcgcctggccttgatctcaagcatatgaactttgggtcatatttttgagtgtctcaggctgacctcttttcttctccgtcatcagcttcctcctggatccctgcccatctatgaattcattaaactagagtcactcaaaggatgtgtgtgtggtggtggtaggtggggagttccccagacgcttgcatcagaatcacaaatgcagaatcctggacccaatgccaaaccttggaactaaaatccctggggacgtctgactcaagaaactgactttaataagttgcctgggtgttttttgcttactccactaagtttgagaagttctttgggagcctaggagctgggaagaaagagaccattttttgttttctgacttcagcactgggcagatctgctaatgtttgccgaatgttggagaaatgactgaacccaaagtacagagctaaagaatttcttcccatctgaggcctcttgggatggttttattcaggcctgattaagcactagtaaggctgtaaatgtcttaaaatactaaaattcttccatgggagttggtaaatacctagtgcttccccactggcccagctgcctagtcctctcccttccactgcccaggatccagcaactaaaggtctcccaggggtctcatctattctcattggtcactgcaggtgccagtcagctctgcataggtccaacctctctgccaccgccaatggtacctcgggggttggctgtgtccagcctatactcctgttctgtggagggaaatgggatgagcatcgggagaatcttgggtgggtggtaccccagccagtttaccttggttctggtgtaagcgcccctgtctccacacgtctgacaggccacaatggatggagtcctggtgggtgagagggcattcctagtggtggtgctggcaccccagggggcaaatgccccaggccatggccaccgccagtggaggcacccttagagatgctcttgcatagctgctctcagcaactgcagcctccatgaaactctggctctgagaaatcctgggagagactgagtgagcatgaggcagaaatgtgagtccacaaacacaggggctctgccagcgcatttgacagatgagagggctgcttggtccagatgacacatgcagaaggcaatgtggggctgggggaattatggggtaaaggttcccttttcatttatttagttaagtttgtaaaaaaaaaaaaatcaccaaatgcccacctatcacagcattagccaaaatacctttattaataaaaagagagtgagtgcttccatagtacttgccctgtgccaaacacaattcttttttttcttttttccttttattttttttgagacagagtttcgctcttgtcacccaggttggagtgcaatggtgtgatctcagctcactgcaacctccgcctcccagattcaagcgattctcctgcctcagcctctcgagtagctgagattacaggcacccaccaccacacccagctaatttttgtattttcagtagagacgggcgtttcaccatgttggtcaggctggtctcgaactcctgacctcaggtgatccacctgcctcggcctcccaaagtgctgggattacaggtgtgaaccaccgtgcccggccccaagcacaattcttaactcaagtaataaaattcttaactcgagtcgctgtagttatcatcaccatcctcattcatagttgaggcaactgagaaccaggcgtcaagtagcagagctaaaatttgaattcaggcaggctgacactagaatctacactaataaatacctcttcttttcttcagtttacatttagaaatgatttgtgtgtgtgtgtgagatctggaatatgtaaaaatctcagtctgtaatatgacagctagaaaccttttgcatgaaattgcaatgattttatttctacaataagtagaaaactcagtgatgaactctgaataaggctgtgaggatcaaacagtcatcagtccctgtggtttcaaggaacactaaagggcaaggggccacttaaacacttaaaaacagaaacaacatgctaagctcttccatttagtatgtcaaaaccagctcagaagtatgtgacaatccaggcaatgtattacagtttctagccagtccagtcatgattctctggcaaactgcaccgtcatggttgtgatgcattgggatgagaggtactatataaatgtcagatgttacataaatgtcagaaatgattattgtttattaacgagggctaaactgtttctaagcaaagctccatctcccagccaatgtgttcttagcagaggttccaaccaccaataacccacaagaagggaatgcttacccctggctctatgaaggagcccagttgggatctgggcttgaaaacagggattgagttgggcccagtgccaccccttgctcatcaagtgatctcaggccagcccccaaccttctggtgtctgccttagctcacctgtagaatgggaataattataatacctgtcctacttctggtacccgggttggtgtgagaaacaagggaaatcacgtggtcgcaagcgctttgtaaggtgtgaggggctgcgaggttggcattggtcgtctagaatcgggctggatttagcctatgccttctctttgaatcctactcaaagggagaacttctgaaaggaaattcagcagggggatggtgacagtgatggtgacggccggatactggagacgccaggctcctctcgctgcagaccaggcgcccggatcctgcagtctggccctggctctgccgctccccagcccgtgagcttgggccagttaccgaagaggctctggaagtgacagccaagggccctttcggctctgacgccgtgtctaaatcaggctcatcacttggctctagctgtgattcacctttcgccttaggagcaactctccctacagcttctcagacgcatgaagcaggggtcccgcgaagggtggggctgtgtatttcatgagagtgtgcaccataaggaagttattctcctggaggaggtgagatgagggggcggtgaagaaggggtgacaagtgagtgctctgaaaagccaggatgcagggagcactgaaatgaggtcatgactgtcgcaagcaaaaaggagctggacatcctccggtgggggagggaggagcgtcctgcatttctgtttgcaaagtcttttcccacatccttcagcatccccctccccacctctcccctacccccatccctacacctttcaaaccccatcaggccctccccgcagaagagcccacgcccgcgcctcctccgtggtcttgtctgaaaccataaggattgtttccaagctgactcacaccactaatgtcagggagccgtgtcacacggcgctgggctctgcaagctgttgcttgcgcagtcgcccccgccgctgccgctcccgggcgggtgcaccagggtccgcgcgggcggggcggggtcggggcgggaccggggcggggcctgccccctcgacgcgccggccccgcccctcgctccgtccctccccagcggaccgcaatgatttagaagttcaggaatcccacgtgacgtcaccgggggggtgatgtaatgcactctaaatagaatgtattgtaatctttgctcagtccaacgtggtcccttcacccgggctccgctcttgccttctccacacttgtttggtaagttcctaaaaatacggctcggccacttctggggcttttgcatttagccacttttgttgcacttgccgcaggagccatctcgggagtgtacttgtttgcaggggttggttctcggcagcagccgcgaggttacttggtccagtgggcaggtcacagggcaaggagtagggaagatgcgatgcatttttttctggagggtgatctgtgtttgtaaacattttggcggaccagagggaagtccggccccgagtgctggtagactgtggaattcggctgtgtcctgaggccaccctagagaccccgcgccgcgtgagtgccggagcgctcggtggccgccgcgccgcgcgcctggagggatgctaacgtggagccggcgccgagtccgcccggcgtgcgtgcgtgtgtgggagcgcgcgagtcccctgacgcggggaccagttatgaatcgggggtgtgtgtttgcctccagagacctggcaaggtgcggagccctccagaagtgcggtcaagcggcagcggagacggcgagccaggaacctccccccgcgtccccagcttcccagcgtggcggcggaacccccggagaaagtttgcaaacttccagcgggcgcggcgaggacgccgggtcacctagggggcgggtgggcgcgcgcgcagggggctcgctctccccggtgcggagctgcagctgccacctctcccgccgggctgccggctgcagcgggtgggcgcgcgcccggggaggggaggtcgccctcggagggcgcttggctttcgctccaggcgctccgggctggagagcggcgaggctccgtccgctccagtccactcctccggccgcctcctgcctccgctgctttcttgctggcatcgttacctcttcccggccgctgccccaaatgacagctccggctcgagctttggcggcgcccaggcaattcccaagacctggcggcggagtctccccctgcggcagattctcggcagaatcacttgaacttttcacgaagttcttagaggggcaagatgcgaaggaaggaaccaaggagatgttttctctcagcagctgcatcccgcttcttctttgccatagatttatttttaaggggcgtctggtagataaagccctagaccttgtccacactctcacccccatccccaactttccctggaccggtgccgcccccacttgatgcttgctcaaggccggggactggagcgggctacttgtatatttcgttgtcagtctgcagaatgtgtttgatttttatttttccctccttctctgacatgtgtcaaggaataaagactggatacaggtccattacgtcattctgcaggccagtaagtgtttgattaacggcttgagctcctcaagggttcaggagcttagaatgctgacaaagcaactctgctttgcatccccctaccctccccacaacacactcgtgcaatcgccggctccctgggcatctttattgccctctcttcccagcccctccctctccaccactcccccgtctacaccgttatcactctagccccgcccccgcctttttacagctttccctggggcgagcacggtccctggagtgtgggtaaaagcttctggggtctgaggggaccactgtacctgatcagcgcgcaatccgcccttttgtattatttaagaaaggcaccagtaagccttctcctctagggcgaaaatgcttagtcctgatagaaaaggcaaatcaggaaatgtttgcaagcgttatgataatactctgtcctcgtggtggtgacttaggaaagcaatacacccactgcaaacaaagtatttcactttacgtagtgcctgccctttagcagaagagggatgctgacaaaatcaggtttagctgaaaggatcaagactaaacgtttcatttccaaagtgagggaatgtgagtcgttgaacctaaacttccatacaataaattgctgcgtgcgttagtttctagctcttaaccttaagtttctatgttgaaagaggaagtcgaatacgtaagtcattgaactgagtcagaacctccgtatctggcagttgaaataaagaccctgtgtatgacttgttgcaagggatcaaagtaaaaagaaccctcggtgtggggggtgggggggtgggggcgtgagggaggtgtgcagcagaaattaaatttaaaaaagtattaacagagttttggatagagggagagaggggattggagtggtccctgatttggagttggtgaaaactaaataaagaaaagtttatattgcaaatatgtgggaatttcttgaagaacacatgttttcttataattagatctactttcttcaaagcgaaagccatgctgtagggtaggcatttgtgaaactcctgtctggggtctaattgacatccttccccaagtctgtggcaggatttagtatttattcacatctagagatgaaatagtgtaacctccacacaatatatgtgcatcgaaaatgttgaacttcttgtttgtgatgcatagacttaaaggaaaaaaaatggcccagtcatgggcactggaaagtgtgattaatgatcagtgatttagtgatcagtgattagtggttttattcaaactgttacctctgaccagaagcacacatcagaggattaacaggctctttagataaatgctcattagtggaaggggaaaagcaaagataataggcatgcacccagggacaactttcgaagaaaatcattcccgtcttcagaataataagctctattaacagaaagcccttttaatttaaaacttgcttttatcttgtaaatcaaagttagatgtaaaagtttgtagtgccattataacctaaattttcccatatccactagatgtggattatctcagtagcgatatttttttttatttaaacaaacaattggacctttagagcagctgaaccctgacaagttcttaactcccagggtttgaaagtgtccccccttctagcatggagattgcagcttgctaactagatggcgcactgttatttggtgttctctgctgcgtagcgcaggagtataaactgagcatgtagctgcttgcgaggtgttcttcaacatttacaacaaagttgattctgtgtagggttggaggctagacagttccacaaatttttagtcacattttccatgtcagttaaatctagggagttcaagactactggaaaaattagtctcattactaaaagaaacttagagaacgagggaggtaccagagtctaggaggtacctctgggttgcagaagtaattgtaaaataccagacctgttctttttactaaaagctagtttcactatcttctggtctgaaatactgaggcaaatactcaagacttattttcttcctaatcttgctggtgaaacagaagttactagaaagaaaggaagaaaaaacttgatttggtgactgcaggaagcaacacgttgctgcttttattctacagataatggtaaggatgatgtttattatgcatattaaacagagagaaaactttgcacttagttaaatagaaccaatgttgtattttcatagatggaattcagaaatggagtttagattttgcacaaaattttaatgttgcttttgtcagtttcctgggacttatagcattttatgtggaaggatgtgtgtgtgtgtgtgtgtgtgtgtgtgtgtgtgaataagactattatttcccaggtaaaatatgttcagaagcatatgaactacagtggggaagctatggagcatgttaagtaatgtgtcaagcatgaattcccctttctgtgaggtttcatgaatcacttcaataagtatttaagttttaataagaaagttcttgaaaaagaaacctaaaaattaaaaaaaaacaataaaacagttttccgcattcaaacctagatgtgtatgcccctgaaggatgattctatgggttgaatatcaactattactttagttctaaaacttaaaagaagaagtataataaaactcacttgtgtctccccagaaatgtttctcattttcctttgcttatagcattttatatggatctcttatttttaaatccttactgattatagtggtttttatttttcaacttaactcatagtaaacatatttgaaaatatctccaagcccactatttttaatgtaaattgctggtgccgataaattgcctgtcaattagcggtcagtcgtgaccttatatagttgatacctgagaagatagtttattagaacattccaacaaaaaattggaaaccatgcccttatttctagatctctgttatgtcacagcttttatttgaataggtggctaaatgaatggtagtttgtcacagagacttttcctgcatagattttcaattctagtaagtttaagatttttgttacaatgatttgtcagtttcccacacctgcacattcaaaaccaatcaatcatggagtttccatgatggcaagttcctagactcccaatttcttactataatctactttttagcaatgaggtatcacaatcctataatattttcttgtcattggagtttacttcttactaagctaaaaattattttgtcggtgtgtagtgttcactagatcactaagatgtgaactttgtatttgtagttcattttcttctggttatgttgttggattaaaattgggatttgagtggacttattatttttgtcatcttttctttcttctccttctccttctccttcttcttcttctaagcaatgcagttagtcacaaaattaatgtgatcctggctggtgtttcccatctatatgcttcttttgcttcttacaaattggatttctacagcaatttaaggtcttttttttttttagaggcagctttcttggatgaagatggaacagtgatctcagtcaattcattatcttgtccactttgactaccagctgtattatgggaatcaaccaatgcttaattagtgtttaaaaatttaaatctatgactatttctctgaattctatttaagaaaattatacaattgagataaggtaataaactggggggcaattgccttaaatatctaagtgtgaggaagaagcactttcagatatgctaaacagacttaaagacacagaagaccctttttgtgttgctatttgtaaaataagtaagctatctattttgtggcaatgctttaaatacaaagtctggcactttaaaaatgacatcatgtttaatgttttcactaaagaattattacatttcgtaattaggaaaaaaatgagcaattagtgttttttgagtatccattagtattccattgttgagaatcacaaatcatagatttaacataggaatttttttttttataaaaagagagaagccttttagaaatttccagatagtgatagcactcttccagaaaccccactaaaatttttgaagctcttattgaggactctgggactgtcacagtaaaagataaagtttaggataaattcttgaacccataaaagatattatattgacatttcaatatttcttttttccaagttcactgtattgccttccccctcaccccctgagaaatagatcagaatcagtttatcactttaaaaatatgtatttcagctgctttcttctatttccttaaggttacatttctgatcttaaccctaaaaagattttaggatttcaatccttaacaaggattgaaaactaccaggctggcgtttgactagaactgattttagagggagttcttttaggcctagagattctgatggtgagttacaaaggcttatggctttacacggatggtagggctaggggagggcctcggattgatagaccaatttttcattttacagaagagacccctggctcacccaaggcccagagctagagagagccaaaccaggctgagaagcctggtccctgcctccaggtcgggtgctcctgccataaatgcccttgtcaggaatggggcataacctatgactttgtatccttcactcttttcaagccttttgatgactaatctttcaaagacaaatttttatcagatctttggaatgaacaccttaatcataaaaactgtagtttctatttcattcattcttatataatatctgcaatgttattttttctaataagggcctccttaattaattttaacttaaattctccttttttcatcattgttatgagacataccctgtaaaaccacaccatccagatttcatttgagagtaaaaaccaggcaggactaaaaatggtctgaaagactgtctcaagaacaaggcagtgactttctctactacctgtcttttctctattatctgtgaggacgggatctgaaatattatttaaagttaaaataaataaccttttttgtcaaatagagaaacgggtgatgttttcactctagaaggtgtacctttgcctaggatctgtctgtaatacattatctttccagatggatatatatgagtgtgtttggaggtgacgagaagtgaattgagtctggaagtatgttctttgaggtttgactggcaaaacttgaccaatcataaccaaaaaaattcatgcatgcaacacagagggctctagagcaccacacatttgatttaagatgatatttagtctgtgctgtatttaagatggggaataacaatgtctaaatagaaatcctgaatgcacctactgcatgtgttgtttggcctcacccacaggtttcctctccagctgtttgcatgcgattttatatcagaattcaggtctctttttattcttttattacactgaggagctcctgtgttgcaggcatgatttctccaatagaacacatttcagccagttttatgcagtcctctctctgttggcttcctaagggggaaaaatacatgcaacaacaacaacaacaaaatttttgtttttgtttgaattagctgactattagaagaaatacatgtaatctctatttgccagatctggtaggaccatttcactttatcaaaacaagatcttctcctttaagtaagttggcttctgactggccaggtattaattcatgcatcagacagtagaaggcattgggataaagtccgtttccaccagggtatctagctatggtgtggtgcaccatcatgaagggtctgatttgcctcactgcaatgacaacattgtgcagaaaaacactgactcctaggaggagaaacaatattataggctcaagcttctaaaatcatatcagggaatgatcctgtgtcgaaggtgactgtcagaacgctgggggcctccagggtcattttctaaactacagcatgacaaaatgttctctttgtctattctctgcattttccttcaggtagtgtttccctagattcattctttaacatccatttcaactactctgccttgatgaataatcctgcagtaacaagtcacaaatgtgtacacagcagagcagagatatttttccataaggaaaatagatttttatatcaaatcttagaagaaacaattagcaaaacaaaaggggggaagaagagttgaaattagattgatggcataacaagctctgtccattcgtggctctgcaacaatgagcagcctgagactggaggagggacgcaattcccagagagctgccttgagcttattgtgcttctctgcctcagtttcttcatttgtgatgagaatgtcgggctcacccagcactgtccggtagtgagagctgcaaatgtgagctgcacatttcattttaaacgttttagtagccacattaaaaaggttaaaaagaaacaggtgaagtcattttaataacactttgatttaacctgatatatccaaaatattatcatttaaacatataatccatataaaaatgttaatgtactactttacattctctctttctctctctttttttttttttggtactaaatctttgaaatccagtgtgtatttcacaactacaacatatctcaatttggactagccacatttcaagtgctcaatatccacgtgtggtcggtgactatggtatcagacaacacagggtaaatcagtggtttatgatcctggcagcccagtagtaccacctgtggaacttattaaaaaacactgatacccttccactctgacattctgatttaattggtttggggtgaaggcctgagcctctgtatattttaaaagctccacaagtgtttccaatgtgtagcagaggttgagaaccacggttctaactgatctctaaggaatcttctactctaatattctatgattctatttcaggaaagggattgcagtaaagcgttcattcagagttcaagggcagcaagcagttgttacaagcatgctgcaccctgcaacacatatttaagaaaatataactgataaagattaaaatttacagaatgaataacttagacaataattctttgcaccacaaatgggctctgttttgtgtaactttcaaacgtgggtgttttaaatggtctgcttcactagaaatcttaatttaggatttgatttacatgtaacctcgtagaaaccctctgtttcggaaaaggtcaggattctcacatttcagttacagtattttgccagcttactcttttgccccagatacttgcctttagttgtttggggagggaaatttttactccagttgagacatctggatcccccagaattttcttccttccaagcttttaacaaacttgtgttattgcctagaccagattttctcatgtcaagatgttagttataacctcctagacttaaggtattcatttttatttgtcaccttttaaaatattagaagaatcaatgtttttcaatgcacatcagaatgctttattttaatatacctgttttttataatacaccagtctgtgcattcactaaaggatgcaaaaagtataaaataaaaaataatttccaaactcctcacgcaccttcttgtgaagtctacagacagaattgtttgtggaggggaggagagaccttggtgtcagcctcttgtgacttcatgctgcagagagcctctgcatccccaaattcatgagtcatttcactctgaccctctctctccttatcccctgcagagccatctatgtccaaatacatgtctattcaaccatatcgcctttaaagcatgactataaactagttttaaatataaaattacatgtttttctacattttgtggtgatatttgtgttttctgtaatgtcattcattggaagaatgttagctttcatttattaacacatatctctaatccccattttatagatgggaaaactaagagattgccaaggctaggcatcctgctcattgattagatgggtggtcggtatgagaaaagagctcacatttattagtgccatgtattccagatattccagatagaagcactgctttgggttgcttccaggtagggattttccaattgcttgtactattgcgcttgtctttgtatttataaataacattctttcgggtgctttcccatgcattatttgcagttaaatggtttccttgctaatacctcttactttccagcttcaggctacatgtagctggattgattagtaaatacataaggatatattaacttcttaacatggaatctgttttaaaagttgcatggagacatctgttgcaaacctgtgtgtttggtagtatccagggaaactttctctcaggctactttgtgattgactgttaaaagtattgtgtggagagacaatgagattaatgatgtaagttactcatctgttttggggattgaaggcaaaggtctgtacagattcatttgttgagcaagatagactctagccctacctcctaaattatcttttataaaacactttagcccttgtcgtgccaatgtactgtcttcacacttggtctggagccatctgtgtttaagtatttggtttttgttttctcctaacaatggtgatacgttggcttggccatttgcagtctctgtctgcatttctgtgtctttgatgggtgagctgttgattaatagtgcaattttcgaccagtgccagggggcgattattttggattctttcctccaagcatcatgctaaatttaaagcaattttaatattcatacatatacatgcttatggtgtttatgcttatatgaaaataaatatgtatataaataaaaacctgggccagtgaggaccagaatgttagtagggcatacacttgcaaatgtgcttatcattttttttaggatgcccatggacacattgtaactcctattggccaaatatctatttgtaacattgattcagatacatattgttgattaaaagatattgtgagattaaaaaaattgaaaccatatttaagacactccttttttctgagaaggcctgtctaagcacacattgtttacaattttgtcttccagttttgcaaaatcggatgactaacaaccaccattctcagggttgtgctgtgttgacgtcatcaaagatgagggtgcagtgttttggcaccatgaagcagcatgtaatttgaaattgtactttttgctaaacaccaatgctgatctccaaaccattcaaacactaaaaaaccaaaacaaaacagtaatgtctgctgattggatggaggcagcatgggcaaagtacaatttttttttttttttcatatgctttggaagcacttacaaaaatcagggagaaaaagagtacatataattacttgacatgccctttggaagggacattcttaagacagacaggttgagtctttaacctaaagttcatttttatcctttccaggaaatgtgctttctttcttttttcccttttttaagcacaaacgtggttgtatctttaaaaggaaggcttaagagtaaatcatgtggctgctttatctttatttaacatttagaagatattttaggagatctatttagaaagtcttatattccttcacatagttgtagttatttaatgcttgtttaaaaacatagggggttctggagattggttgcacaacagtgtgaatatacttagcactactgaactgtatacttaaaaatggttaaggtgaggccgggcatggtggctcatgcctgtaatcccagcactttgggaggccaaggcaggaggatcacttgaggtcaggagttcaagaccagcctggccaatatggtgaaaccccttctctactaaaaatacaaaaaattagccgggcatggtggcacacacctgtagtcccagctactcgggaggctgggacaggagtatcgcttgaaggcaggaggcagagtttgcagtgagctgagatcgcaccattgcactctagcctgtgctttgcagcaagactccatctcaaaaaaaaaaaaaaaaaaaaaaggttagggtggcaagttttatgttatatatattttaccacagttataagaaatggggaaaaagtttgcttgtacccattccccagatgggggaaaatagagtgtacagaccatttgtttcaagttagatgcatccactttaatttttttttaatttgcattcacttatttttatttcaatagctttaggggtacaagtggttttggttacatagatgaattatgtagcagtgaagtctgggcttttagtgcatctgtcactggaatactgtacattgcacccactaggtgattcctattcctccccctttcccaactttctcccttctgagtctccaatgtccattataccactctgtctgcctttacataccccatagcatagcttccacttataaatgagaacatccagaaatttggttttccatttctgagttacttcacctaggataatggcctcagttccatccaaggtgctacaaaaacatgatttcattcttttttatggctgagtagtatttcatggtatacatataccacatttaaaaaatgttttatttccataggttttgggggagcaggtggtatttggttatgtaagtaagttctttaatggtgatttgtgagattttggggatgcatccactttactgtcataatgggaaggtcaaaaatctaaacaggacttttgcactttgggataatgtagacagacgacattggtatgtgtgtgatgtgattttgacacataggagaatccagggtagctaaaagctaggcacgtaacactgcatgcctcttttctggcttggatctgggtgagccctgtgtgtagaaagctgtatcattccatttgaaaatgcatttgaccttatttgagcagtttttaagaaatttacttgatagcctttagcaccatatatatatacatacacacacactatatatatatataccatatatatatatatacacacaccatatatatagtgtgcatatatatatacacacacacacactctctctctctatatataccatatatatggtatatatataaaataccatatatatagagagagtgtgtatgtgtgtgtatgtgtatatatatatatactcaactgagatcaacgaaaaagtcaggcaagaagccttgtagtttatgtcagggaatgtaaacccacacttcacagtaacactgaccaatgagaagttgctttgcgggggacaacctgggagttgaaaattttggagacagatcacagggggaatggtggaggaaattagagatatttgactcagaaaggaggaggcccaggcttgtgcataatatcaaggaacattctgtggacaagaggatactatttctgacttattctctgtgcttcggggaaaaacagagaaaattgcaggaaggagatggtttgctgtgtggagagatggagtgtgctgtgtttgctcttttggctccaaagagggaagaattttggaacaagtagacctatacatcaatggaaaggactgtctcagaaattagtgacctccctggcatggggtgtcagaattattataggaagagtttctagaagcagtaagaaggagggctggaccagttgctcctggctttttttggattatgaacactttaaacaattaggtaaaagctatgagccagttttcataaaaataacatataggcaaatattcatgagaaggttcatggacccagaagccatggactccagaatgaaaaaatgtctgggctcaataatgatgcttaacaatgctatggttatatggacacataaacttaaaattgctgcggttgaatgaatatgatcagtttcatgtggttcatcctacatgtgttggtgcatacattacatgtattaagctgtgaaagtaaccagagctaatgaacttccggtgaagtgtataatccggaatggaaattcacattcattggattctcatttatgtttctctatgagagtaactgcctgtttgcccaatagcccatacctagacaaccactgattaataacaccttacattgtttaggagtttcaaagtaatttaatagaaattatcttattagggtgatataacaactcagtgaaatatgaaggatagatattatccttcccattttagtggatgcagaaactaagaatcccagggcttaagtggtatgtgcagtcccagctaaagtaagtgccagacatataactggaattcaggtatccttccctcccttcttccttttctcctgcttctctttgtccatcctctctgcctccatgctagccacatacacttatggaaccaagtgtgctctttgttactaagaagcagcaacaaccacaaataaaccaagcaactcctttccaacacaaatatcagcaccctgtctgagcctaaattcctttccttccttcatcccttccttcattaaatattaactgagcatctattatgtgctgggtaccagggatacatgatcaaaatcagacacagtcccactcctcatagaacttgtaccaggtaagtcactgcaatttagtgtttcaggaggagggtgagggggtgcaagcctggagacagaaaacccagttaggggctattgtggttatccagacaagagatgatgggggcttgagttatgatggtgccagattcaaaagccatgtaagaggcaagagcagtatgacttggggattgattaactggaagatgaggggtccagagagtggggaagatggagtcaggataagcctgacccagtaagaaagtctgggtcatcctttgtggtgctgaattgggggatggtgaattgggggatggattctggcccagtgcccacaggcttgtgtctgcatcctgagaacagaaaatggctgtgaacaaaaatgccaagagcaactgtaactgaaaggtacagtgcattattgggttccgtggcagtacagctttggtaacttctcccagagagtggctccacagggagaaaggcaccccctcctcccagggcgaccacatctctggcactcagtgggtctagggcatggccaggagtgttagcttcctgaggctgctgtagcaaagtagcacaaactcgggggcttaaacaacagacacttattctctcacagttctggaggctgcgagtcagaaatctaggtattggcagggttggttccttcccagggcctgtgaggaagaatctgttccaggcctccctccttcttctgtcttctctgtgacttcacatggtcttcccttcgcatatctgtctccaagttcctcttttcataaggatgtcagtcatattacatgagagcccacactaatgacctcattttaacttaattacctctacaaatactttatcttcaaagaaagtccctttctgaggtactgggagtttggactccaacatatctcctttcaggaaaacacaattcaaaccactacagcaggtgtgtccagcaagaaggcagcacccaggtcaggtaataatgggactctaggagaacaagcagattgggagtgatatgttttctaatcagactttttttagcacatgctgaaaataaacctcagatagatccctggaaaaacctggaacaagtcttcggagatggggatccatatgttaattaccaactatggacatagccagcaaaacacagcaaaacaagcctactcttaaaaatagatacatacatgttgcactgactgacaaatttttgctaatgtaggcattacccttggtttggccttgaatttgtcaccaggatttgtaaaagagcaacgctgaaaggttaacaccaacttttaaccatgagaagaaagaattaaatacaactatagtttgccactctggcagccttaacaattattgttttgatgtgctaacatttactgacaaggacaaaaatcacccattcccataaacacacacacactaagctaagtataaatgtttcagtgtgggaaggaaaaaaattctgattttctggttgttgatggataatttatgtctatgtgcttcctttgctttgcacaatgaaaagacaaaattctgcattttagaaacacatcataataaaaagacaactcagtttaaaatgggcaaagatccgactagacagttcttaaaaaaatttttattttaggctcatgggtacatgtgtgggtttgttagataggtaaattcaatgtcttgggggtttgttgtacagattgttttgtcacagaaaatttttaaaagaaaatatacaaatggccagtaagcacatgaaaatatgtccaacatcactacctatcagggttacttgtaatggccaaaaatgtggaaataactcaaagcccatcaactgttgagtagataagcaaaatatggtgcatccatatattgaaaaattacttggttgtaaaaaaaaaactactgaaatatactataacatgaatgaaccttgaaaacatgctcagaaaaggaatccagccataaaggaccatatattatataattccatacataggaaatgtccagaataggcaaatccgtagagacagaaggtagattcatgattgcctaggactgggggtggggtggggagttcaggggtgaccattgaagagtatgtaatttcttttgggggtgatgaaaatgttctaaaattatagtgatggttgcacaaatctgaatattctaatgtcattagattgcatgctttaagtgagtgaattgtatggtatgtgaattaggtctcaataaagctgttaagaaaagataacacatcatggaagaaaacatgggctgctaaattcagttagaatacatgccaaatagggcatgttgatccaacagcttctctgcatatttgggatgagtagctgttgatagggcatttcagacctcagtcttacagcatttatcatatgtatctccagcttgcacctctctccttggcaatggccttcactgcacctttgacattttccaactgcgcctttgacattttcctctagatggactgctgcttttccttaattttcaaattgttcaaacacaaactcatccttataccagttcttctcctgacacacccatttcagtgagggccaccactgtcctctgggcccccagattgaggcttcatgcccttcactgacttggcccttttctttggtagtcttgaacatatcattgccacatcttctggactctgccttagcagtgtccttgtcctgtctccttctaacccgattccccctattaactgagaattaaggggagcagaattatttattgagtctttagtgagactcctctcttgctctactatgtcaaccttcataacaaacttagcaaagggctacaattacccttttttatagctaaggaaaataaggcttagaggttaagggacttgaccagtgggacaaaaccagtaaatggaggagttgggtttggtcccagttttgtctggtcgctgagctcatactctgtccattctagctaccaagaattgctcccttgcatagctctgaacatcccatttcccttttcaagaaccttcactggtgccctgtctcaaggcccctaggcccctcagccacatccttgtaggtgtactccatattcaagacagatccactgtggtttgtgttgagtgcctctctggcatgttcttccctggaacatctgcaatcctctagtacagtggttccagacacacacgtgcacacattcacctagacatgctgcattcacttcctgcctgtgaaaacagtactctccaaggcccatctcagtcatcatctcctgatctgcaaaaccaaaagcagaatgcaaaattaattaattccttagtgctttgttaatctttttcttatggttttaagaaaacgtatcttctattgtgattatttttgtgtttttcataaactccctctcctggattgtaagctccatgacagcaagaactgaatcttgcctagttttgacttctttcatcgaattagcatagagtagatggtgacacacagtagatggcaaattaattttgcatgaactgactaaagagacactcactcattgctgccataaacttcctagaatcagcatgagatcttaaccagcctggtgagtgttcctggaggaccaccctaggaagattttttaggtatacggatgaagtccccttctctcagtatcacattaattttaaactctgttgctaaaagacaactgtcataatattttagaaatcaaaaatggaggtgaatgaatccatcgccaagagtcttataaccctaaggaaaaactgatttttcatttttacattctcttgcattctttgtgcagagaggaacataatttgtaaatagttttaatcagagcatagacatattttaaaattctgcttccttcacttaaaactataccacagacatgttttcatgtcgctacatagttttcaaaactatgattatgcataagattccattgagtttctatgccataatttcttaaccaacccctattgtttgacatttaactttgctgtggatttttaaaaaatgattctaaaaaacacatgaccaacttttggcaagagaaatgtatactctgacgacattaatctcctttcccttaggctggttgaaaaatcttcctttagggttgagcttaggcacaattgtgacagagactgagtttgttttggatacgctcacactttattccttctatctctgcccttcctcctctcaacacattgtatttccccacggtgcctgtcacagggacttggggtctgccctccttctccagagactgacctgcctcccatgaactctgccctcctcctcacccctcctagccagacttcgctctcctcttgcatttccaaagcctcaatcttagtaagatactaggcactcaatctatttctttcctgggtttataatattatacaaaaggacttccggagatggctatgtgataacccagccaagtgcatcactaaaggtggatctttgctctttagttaggactcttccaggttctaaggatatggcagtgaaccaaacaaacaaaatctccacatagataggtaaataacacctaatatagtagtaagtgctaaaaagaaagataaagccagggaagtggatcaagtgttctctttcatgtttcagttggaatagtccaggaaggtggactttcagataaggtgacatatgagaggagagccaccagggaagggaggaattcctatggagatgtggagaaggagctttctaggtaaggggctgcttggtacaagggccctgctgttttggatggtgtgcttgaggaactgcaaggaagcagatgtagagacaaggagggaagcagtgggagctgctgggtggctgatcatccaggggctttaaaccatgccatgatctctggatattaatctcagccaggtaggaagctattggatagttttgggtagagcatctatcacttataaagccctccattgtggttggaggatcgactgtgtaggagcaagggtggcagctggaagacccatgaggaggcaagagacaatggtgggctggactgggtaggttctgggaaaggtggtgagaaagagttggattttggcttattttgaaggtaaacctagcaggacttgctgagggattggctgtgaagataagtaagaagtcagggaagatattaaggtatttgacctgagacaaggatgaagttgtcatcgactgagatggggaagacggcaggtagaacagggtcagtgtgggagaccaggagttcagttttgggcatgttgtatgtgaagagatgctgaatcaatgtgagatgctgagagaggaattcagggaaggggtctcagctgcagatagagttagaatcaggatcatagtcttgggcatcaaataggccagcctcatctcacagcacacagccctttccagagtgagccccagccacgctgggatatcaggtcctcacagggaccacagcttcctcagcctcagggccttggcatatgctgccccttctgcctagaccatccaagcttccccgggtttcccaatctcaatatgtcctgaacttttcctccaaggcacttaaatcaattttatattccttgtgtgatgtttagtttaatttaaaaaaaagtttttttttgagatggaatctcactctgccacccaggctagggtacaatggcacaaccttggctcattgcaacctccccctccctggttcaagcgattcttcctgcctcagcctcctgagtagctgggattacagacacttgctaccatgaccagctaatttttgtatttttgtagagatggggtttcaccatgttggccaggctggtctcgaactcctgacctctggtgatctgcctgcctaggcctcccaaagtgctgggataatcggtgccagccactgtgcccgtcctaaaataattaaaatccacattccgaccagaatctaaaatctgaaatgtcagggataaagcatattttgttcatcaccattttctcagcatctggcacatggcagacacttcttcaatatttgctgaaagaaccaatgactgttattaatgtaatactttacacttgatgcgtcgcacctcctttcctggtaagaggaagcatccttactgtttttcttatcttcttaatttagtggctccacatgccttgggaacaaacgcttttttgataggtaatatttgaggagggactgggctgtgattgggggtggaattattgcttgactgaaactctgaaaagaaaaggaatttaaggcttatataaacttcctaatgaaaatcccccatctcctgtttcctggtcagctactttgttgcatttctgtggacacctttatctaacatcgcctgaggttattttatagtgacctttgacaaggcctattactttctagttgtgaagtttatcaaggtgctgggggcacagggaagggttagaggcgttgtgtcgggatctgagctggctggcacctccttcgctgcctccagcctcatcctgggacatgacaggaaatgataatgaaagaaagagatctgatttaccaggaaaggattgttagctcacaaaagagctcttggtctctgtctttgtcagcatagggctgtatgtaaaacaggattacatgagggaattatatctctactgtctttaaaaaagctggagtaagctttcagaggtgcctgtgttgtttggaaacacacaccctggctccatggatacatatttgtgtattacacattacacatgtatgtacagacattattgatcgatcgatgtgtgaatatgtttgttggggaattcatgaaagaggccccatctttatagttaacattgctgtgggaggcatccactccacgaatgtgtatcaagctgagcatttacagtgctaagcgtggagccaggcactggggaaatggtggccaagaagagagaggaagtccttgctttcaaggaacttttgaaacctgatgagtctcaatctcttcttctgtaagatgggcataataataaggcctacttcacagcctcttcaagaggagtcgatggccatgaatgtgaaaacaccacttggattttaaaatgctatgcaaattatgagcggccgttatgattgatgtagcaaaatatagctatttgggaataaatactggctaattttttgtagttctgaatattctttatccctatgcaatctaaggttttacccttataatttagggggctcagttttcttttgctagcatcctaacaacaacaacaacaaaaatgtcaagtatgtaacttagtttggaaacaattggatcagttagctattgctgtatgacacattagcatcatccccctaacaacatacatttattgtcttagagtttctgtgggtcaggaatctggatgtggtttctttgtgtctctgctctggatctgtcacaaggcagtgatcaagatacctgccagggctgtagtcacctcaaacctcagtgggggaagatctccctccagactcacctggtattgcaggccttaggtgatccacaccaagctcacttgtatggctgttggctggcttccgattcttgctggctgttggcctgagacattagttccttactactgggggctttccataggggagcttacagtatgacagctggcttccccaggagcaagcaagggctccaaggaggagaaagcgagagatgggagtctcagactttctttgggttcaaatcactgaagtgacatcccatctcatttgccatattctattcattagaagcacatcattgggtttagccagtacctatggcaagaagaagatgtaagtttgtaccagaggacgggtcactggaaacatctcaaagactgcctgccacagcaatacatgtaaacaggactatgagttaatgctgtatctatggcattcataatgtcacactatttgaaacgaaagaaataaaagaagtaagcaccattgttcccccaagacagttaagatagacaaggaaaattggcgttaaagcctcctagattttgagttgcaatcagtaaacaaccctgattttttcttttgcttgtggcactggctcatgcttggacatttacactctttatttagcaagaaagcatttgaaaggtacctttcaaatattggaggtaaacaaaggtcagtctttcctaagcaagagtagcaaaattaaaaatatgttaattttaacttgccggttcacagattgatgtatcctccattcacttgattactttttttgacccacacctgaaaacaaagctcttccagtcacttgaagatgaagaaaaagaaaattttaggtacagaggcgttctggtggtatgagaatgagctgtgccatggtttagaaaaaggaaaaagtccagtgtgggcagaatgtggtggacaaggggcaagtgtgaccagatgaactctgggttgggggcctgggtcactggaggtatggtgagcagatagctgtttagatttacatctaaatgcaatggggaacatttgcaggatttgaggtgactgcaaacagctatgcctttttttttttttttttgcttttttttggttgttgattctgatcgaattagctatattgcagtgagctcttgctgaaagagattctgatgtctgttaaccaaaagccgtgtttgggcaaagataaaaacatgcactgaaactttgtaataggatgttataattatgcaatgtgttttatacggagttggagcgttgtgtgttttgcccagccaatggcaaggacaatgtggtagatgcatctggaacaaggtccttggatcatagggattcctagtattagtttcatgtgacagaacttacaagaaattcattcagaaaaacacccagtgtaggagtcatttggcataatctgtgcatattttctcaaacaagcagcaatcatttttcggttgtgtcatctatggctgtcgctcgtacgcagttttgtggctcttttgcaagccggcaggcacacagtggtcatctgggattttcaaatgagagtgcaccatttaaaattagtggtcttggtaacttctctttcctccaaatttcccttgaagctgaccttgtgagaagaacactctccatctatttttcctgaaagagtaactgggaaaggaaaagttcttaagtcttaacgctggaattcaaccaattctaatcctaaaatctttctagtgtgttcctgtccgagtcagaaaggaataaaggaattttagatggcttgaacaaaaatcgtgaaaaaatgatagctatatctcaagttcagggattccctcaactttcttctttttaaaatttaaagataaatttactgttttctgattcaaaaatactcattgtagaaaataaaaaagaagaagaaaattctaaccaaagatgatcacatatggtgattttgatacatatccttcatataatctatgtcttcatccatatcatctagctatatttcatagagtatttacagttttgtgtttgaattttttctacttatcattattttgtgaacatttccccaaggtcatgatttatttttttgaaaatgtgattttaatagccttagaattttctgtttgttataatgtacttaagccattttgcttaatattggttgcatcatctattttgatttttttcctggtaataaataatattgtgataagccatcttgcacataaccctttatctgcatctcttatttttccaaaggaattattccaacgagtaggtgttgatacattttgctaaactgctttcacaacagcttgtactgattgccccacgaatatccaggctatgcaatagtgcctatcacacctgattttcagccaagagtattgggtattgtagtcaaaaagaaatagttgccagttgattaggtcaaaaattgttttaatttgcttttatttgattaaaaggggtattgaacattatttccatttatttgctggcaatttatgaattgttcatctttgtttctgctttttggccatttttctctcagagtattaatattttgcctatcaaaatttacaatttaaaaatgctttttaagatagggtctgtctatgttgctcagtctagatttaaactcctgggctcaagggatcctcccacgtcagcctcttgagtagctgggattacaggcatgtgccgccacacccgcccaaaatttacatctttttattctggaaaggaaatgcaccctttatctttaaaatctagaagcacaagtatagccatatattttcagtgtaaaaagggtttaaaaatttcttttggttcttcattacttgtggttgatttatgagtctgtgaatatgtgaacacagtttacgtttagaatcatgccacttctgcttgctgtagcttcagttataatcttcctcatattttttctgttttcctctttcgtctactgtaataaaatttttaaaagatccagacttctacttatctcactttactcaactccacttttagatggcagcctgccaaggaaaccacagtctgaagagaatctcctatgagacctctagagggtcagtagcatcagttgagaggaagagttcaggagaggaaaggacggcttctggtttatgccatttaactaatgaccttcctgattccggctcagagtgagcagaattagttaacaagggcttgggggctcaggaattccaggtatctgacattccacttgctgcttctgcctgtggccagaggcaactcctcatctcagctccatctccaccacctcattttacaatggagataataatacctcaaaggtatgcactaattaattattcttggaaaattctctgaaaatgtaattactaattatcataatgattcgattattaatttcattccttttatagaattttaatcgaatgccaaaattcaacacccagatccagttatttgtaaactttttttctgcctattatcttagcagcttctttataatgattattttaccccatgctaggtgaatttcttacaatatagaaacaacagtattttaaaactatttagaaattttggagctccaagaagagacaatacagaaaaaaacaagacaaaatgttgtatctccatagattattgtaactcaataattaaatagctaaatatttgaggctgttgatttttaaaccacattaactactttttccttcaatgtgagtcatatagtctgaggtggttagtttactggtaaataattatatctaagactattacagtttacctagatattcagcaggaaagtcatatgaatacaaataatttacaaacgacctgtgctgaaccatggccctggcttttattgtgcaattctaagtttggaactgggtgttaatttattaagaatcttttcatcaattccacagattcatagaattaatgtgactgagttgacaatagttaaaacaatgtgtatttggcattgatgatttttcttgaatggtgttgtttaatgttatttaatttagcacgtgaatgtcttatttttctaattagatcatacgcaccttaagagtagggactatgtgttgtaattcctctaaaagcagagggattcaatgaacactggaattatcacctaggccacctggctttttttttttttttttcctccctcactcaacctataactagctgtgagttttggacacttaagtaactgcatgccacctcagtttcccaatctataaacaacgaaatgataccttctgtaatttacaaggctgttctgaagctcaaatgaagggaactccctaggaggggggtggatcgttaaaagccttgtgtgggcttgtgaaaattcagtgtcatttggcaaggttgttttatatccagatgtgtgattgtcagtggggatgtgcattttgaccttttcccttccatttttttttttttttttttttggtctgggagattttgcatactgataagagctgagagttgatttagcaaagttatgatcagacgtttccagctctagtggcctctagcttctgctgggccggccttaatatgaatgagggccatataaccagcctcttaaatttaagtgtcagctgcatcatcttcatcaggagaaacatttcaaacatttattttctttgcaaaaggcaagttttagtggtggagtcaatttatttctgaaacgatctcatttacctgaatgaggagctcatatttattttcagggtaagtggtggggttgtataatactcgtgtgacagatgaaccaaacactcagatgtaaattacatttggctggaagaagatgctctggtatgaaaccacatttctgccattgctcacttgttcttcttggctgagagctggaagattggtgactcttggatttacctagaaaatgaaaaaatattctttacagaaaccagaaaggggtgagtaataccatatacatatatttatataagaggatttgaggaagcgacctgggtgtaacatttctctgtccagcagactgaaagtgtcacagaacatgtcagagtggcttgtggcatgatggtttattttcaaagaccttttgaaaacaccatcaagcctttttcttttgttttattttaaagtggcctttcactggcttcattaatgtgtcacaaagtgaatttttttttgtttctgtgagccatcagtctcataaaaattaaatgtgtgcattcctgcaacctgatatgccctctccagtaaaaatcaatgcctcttgcccttgtggctcaagctgcagaggtcttagtagcctgtgttgtgtacatttgtgcatatggcctttccacttatgttttccaatgtttcttaaacatatctgagaactcagtcacagctacaatctgttggtttgtgtttagcctgtgtgtgtttgcccgaaaacagcagtgttgttccctcccccgaccatgtttgccctattaagtgggcacagaacggggccctcttactacttatctgtgtattattcctttggttgggtggcaagaagatctgaagaggatggatttttggaggggtagaaaagtttaaaaccactaaattccttttcaggcttgaattatactaccttaactataccaagtgcaaagattctgacacttatgatggcaaattatttacctgtaattagatgcaattgtcattttttcctaaacaagtacaatttccaaggcatttttttttctagaaaataatcaaatgttgaattttagcattaggtttgaaatgagagtaaagactgagattctcttaagttttgcttgaactaatcattgcctctgataaaggggaccagccccacatttcacaccatttgattgtgagatttaagaaagtgggataatgggatgtggggggaacaggttgcatttactctgctacataaaattctacagatggaattgtgtactatgctcttgaggtaactgaaaggttgtattagaggcaaatgatgaaaagcccctggctctactttccccaggtttcaaaggagaagaagcagctgaatgtctttggtttggtgcaattcagtcatgattttgtctccactttgactgcatcccttagagaactcagctcacactcataaggtcccactcccaaccggcagtgacagagatgagcacctgttaagggccatggctaaggacttcacactactgtttgtgcatgttgagaaaatagataagccaattaagttaatgcctattgtaggccaggtactaagtcaaatcttacattgtcttatttagtaggtgttattatctctgttctgctgaggaaactgaggtttagagaagctgaggattttactcaagatcatgcagttattaagttgcagagccaggattcactctctgtcatgggagcctcctttcttggtactccgaatcactctagaaacttgccaagagagatcaccatttcattttcttcagatgaagctatctgtatggcccaaatcccactgaatcttagttccatagatcttccttctatcatcttctaccagtattagatgcttgttggttcaatctgttaccaaatattttagtgagtgcctataaaaacctaagtttagtgacattaatttcaagaagtacaataaaagcacagctaattttacctaacaacaggaaacttaaggtgtagttagtactataatctaaataaatggatagtcctataatctaaataaatggaattagaactacagctattattagtaatcacattgttaccaactctatttaaagatatgatccagttaactataaacaatgccatattatcctacttcttaaatgcagtcacttgaaggattaacattttcactattctttgtatgatgtatttggaattatagttctaaatctgttctggaacagaaaagacgatggagacatttgcgagatgaaaatctgatgactttcgggctcagggtgaatttacaaacaccagtcatttatccctacatgacattttccagttatccaaccaggcttttcttcaggagccatttgtggtcgggatgcatcgtgatgcatcatttatgtagtgtcttaagtgtttactgggcagagcatgtgagagacaaagcacaagaatcctgcccaaagaccttactacctagggtcacattgattgttatgtaacagactttcacccaagagtagatattgcttaactcattcatttctctagagctagagtttagggtttcctttaacatgtagatgaccttaacatactgatttgtatttttacttacaatagatattcacactgaagaatatgttgcatactccaaaaacgggcagggtatgagatgggaatgagagtgtggactgagttgctgtcaaaggggggtgtcggggccactgaggatgggctagagatcactgatccccaacttgaccatatagggcctctcggtttttccttacttttatatttgaaagattttttttctacctgataagtattgattaattcatttttctttttaaattaatggcattcataattgtcaatcagaaattgtgataaacatgagatgtctgatgttaccatactgaatcaaaataattgcagccaacagtaaagaaagttgccattttacttgacatgtgaagctttcttgtgtgtgaataactaaatgtttacatacacgttaaccttttggaaatactgaaaattgaactgatctctgttattacattcacagacttcctaggaatccagagacccccaagtggggagcaactggatttagcaattgccgtaagttcccatctgcttctaacattctgtgatttgtgaacacagcattacaactaataaaatcgaccagttacaaatgttgcttccaacagcaagttttgaaatacaggtccaacatttttgtgggaaaggagcaaacagagatacttctaaaacttggagagcagggtaaagactgggaatagctgcacttcactatgtcccatgattttccttggtgaacaaccaaaattagtgatgtccactctgttgtccttgaccacagacagatctacttgtgatttaagaaaaaccccaaccccaaaccgaaccaaaccaaaacaacagacccttcatgtgatgctttatgtctacatcctgaatagaccttacaccatcctctgtatcgtaagctctatactgcaggcagaatgaaaaaccagacctgactatatcaaccctctgttggttcttcactgcccatagggtaaaatttaacctccttggcttgatgtacaaggtttgcattatataactatcatctgcacctgattcctctccatgtatactttgtgaacctgctagactgaattttccatcatccttgcaaactaccagacctttcttaaatctctgcctttgcacatgccattctgctaactggaatattctctctgctcaatctttgttggataaatccctataatagccagttaagacaatagcacttattatgtactaggcattcatttaatccttacaatgaggtggttgccattatcagccccagtttgcagaggaggaacctggcccagagatgtttggtagacttcccaaggtcacagagccaataaatgaggaagctaggatttgaacctgtgcagtctatcactcaggacctgtattcttaatctctgtgccacactgcctatctcctaagatggcactttcaaaggtgaaggaagctattcccagatgcctcaaattggagttagcacttcagttcttaggattctcaaagtgctttctaaggcatccttgcaatagaatttatcaagttgcattattatttttctctgtgcctgtgtgacctgtaattttgcgtaccattcagccttgtatgcccagagcctagtaaaaagcctatcactggttaaacactttgtagctatgtcttgaatgagtgaatgaatgagtgaaggagtaaaggcagaaacacttgtctgtgcttagctggaacaggctcatctttccttctgtgacatgcttctgggatatcagttgaaaaacactttcttccaatagactttacctgtctcaggggtgcaaaacattccaacaggaaaacttagaactctcagttgtcctctccacgtgacagtaaattattgccaaatcttgcaaagatgcccatgaattctgctgagtatccatgtcgcactccagtccgacaacattgatttatttaagtataggtttggtgctctgtgaggactcaccatctgcttaagttgtgtttactttaagtaccagtcagcgttttcctgacgagttatagaaaaatggtagttcaacttaatttttaagcgaggcctgtttgagaataatttgttaattactagttggttgatcccatttccttaaattaagggcttcagttaatatcacatgcttattgccagcttgctggaagccactgcagtggtaccgccagttgcatgatatattgcagccttattctcccaggccagtcctgccctggcttttccgtttatctttaactaatttaacaagcctgaaaagtaacctggtggtttactagctttaggactgcaaattggaagcttaatttaatagccacttataaaaccactgaggcagaaattggttattaggccttcatatgatggggcacacagagccatctgatcaaggctgattcttccagatacaggaagattggagttcacaccatttgggctggaagtgttttatcaactgcacacaagacagggtttgaaccttgtcatcaggtggcgtggagttcagtggatttcttttcttttctttttggcaagaaaggaaatatttggcagactgttattggggaggtccaaggagattggccacggccatcagaagagggcacgctgaggttgggtgcattgggatatataatgacttttgtaaatgttttggtttcaataaaatcccaaatgtattttatcaatgcatttttccccttaatttttagacccttgtgtatttcaagggaaatttaattcatatggttttgattcatttatacttaactcatcaaaatgttgttttctaagagttatttgatgtccaagaagacttcggagcttgatttaaataccttccagtgtgctttccccctcccttttaaaaatagaaagccatctactcttggcaaaacctaaatgcacacactctaaaagtttgcatttggttgaaagctccaagcccatgaggctgtcgagctgggccaaatgcattctccagctcctggtaatgtgtgagcctgttactcaaaagcacagagagatctttaccacttgataatctctggtggctctccacatggaaagaaactctaaaatataaaatgtctgccatttgctacatctttgatcttggaaaagccacttaacctcccttcacttcagcttcccatcagtaaagtcgggctaatatttattttgcctacctcccagaatgattgagaggattaaagaagctaatataaaagtccaaagataccaaaagcatcacatctcttttcttgatgttattgttctttgaaaaaaataataaatactcagcctttagtgaatatttggtatgtggcaggtactatgtttgactttttgtaagttaccatcatgtttaatcctcatagcaccaggtgaactggagctacttttaatctccacattttggaagataaaacctctgtgtcatttgctcaaagtcttatagtttatgggtagaaaagctggaatataagtcaagctctttatggtttttaaaaacttttttaaattttaaaataattatacatacaggatacagagtgatattttgtatcacatgtatacaacataatgataaaatcagggtaacttgatcaccacaaacatttatcatttctctgtgttgtaagtattcgaatgccctcttctagctttttgaaaatgtacaataaattacagttaaccatattcaccctatagtgccgtggaacaccagaacttattcctcctaactctttgttaacccacctctcccactgtcctctcctcatccccttcccagcctctaatactcacaattctactctctacttccatgagattaaacaaaatttttttccttagctcccacatatgagtgagaacatacagtatttatcttcctgtgcctgacttattttgtttagcataatgtcccccgggcttatccatgttctgtgaatgacaggatttcattcttttttatgactgaatagtattccagtgtgtatatatgccacattttcttcatccgttcatctgttgatggacatataggttgattctatatcttagctatcgtgaatagtgctgcagcaaacatgggggtgcaggtgtccctttggtatactgatttcctttccttttgatatgtttctcaaaatcctccagcagtggaattgatggattatatggtagttttttttgtttgttttttgagaaactttcatactgttttctataatggctgtactaattcacattcccatcaatagtgtataagagttcccttttcccgcatccacactgtcagcatgtgttaactttttgtcttttcgataatagccattctaactggggtgagatgatatctcgttgtggttttgatttgcattttcctttatgagttttaaccactaagttgtatagtaaatggttaaagtcacattaatcactgtaatgttgtgactcaatatcagagtttatcttgagtcagtatcactcatcattgagtctcttaatattgttaagatcacttagtcacattttctattacattctctttttgaataattagggtaaatgcatatgtaaaatatgtcattcaaatatacagacattcaaagatcattccttacgtaggacagtaatagaagctaattttaattgaacacctactttggaccagacactgcagagctctctatatgccttatttcgtttaatcttcagaacaactctataaggtaaagtcaagaactgtgaagagctgagatttccccctacttgcaacctaattagtctactagtttcatggatgctggcagtagctatgagactcctgggtcagacacaaagttctttattactcatggccagcaagcagcatcagcctcatgttcatatcacttcctcttgttcctagctcctatgagagtgatgtggagtgacccaggtggctgctgaacatgcagggagtttacattatggctgaagaactctgggcttagaaatctcattctcttttaatgttgggggaagcagccttgcctgacctttgctcccaagggagatatctttattacactggacagtaagcaaacctgccatctgctccagagggacacactaagtctgtcttctaactctgctgtgcaaacatatttgaaaaaattccagaaccaaggccatctgtacctctgctgctaggacatacatagtccatagaggactgtctcccaacacttagtcgctctattttacaggcaggaaaactggatttagagaggtggaatcattcattcattccagaaatatgtattgaatacctgtatgtgttaaggttccttagctaaaaattggaggagggggagtcaacacaggctctaggccactaacttgtccccttacccacttaacccctctcctcctcagccactgtctcatcttgcctccccaccttatggctaattatataaaatgataattcacttacgatgatgatgactctttgggacacatgtttctcctgccatcaaattcttcctctgcagcttgacccagccccagatacccaaatgccataggtcatttacctgagatgtggaagcggtattggtagatcctgatacaagtcagaatggtgttttgaggtggaatttagtagcacatagaagacagtggtgctaggtgatttgaaagttagattaaacataaaaaattttgtaatggaaaacttagttttgtaagatggaattaatttggtgtctttacaaaactcagaaggttccttttccctgttgcccctccatcaattaatcagcaccgttttatgcttgtataaaagtgcaaaccattaaatgctttataaagattttgatagtgttcatgctagtttgtgggagtccccttgccatgtgcctgaattgatctggcataaaatattaaatgactatgaatttggaatctgggggagaaacataaggtcttggcaacagaagattggacgcatcttttcccaacaaagaggtctcctgcggcccacaggaaggaatctcaggctgcaaattatctcctttctcaacatggcccaactcaggaagctagtttgccaggttcctgagaaaataataaagatggacatggagtgatgaagaggttggtggctggaatacctacctttgaactgtcgtggggaaacaaagtgaaaattagctggtcaatcattgttcctttcaaccaagtcacagcaggggaaagactcttccactggcctctccaccagaggagaagctgtgttttaaaaaataggaagaaaagaagcctgacttggtgcttatttagccctgccactgtgttcatggattagtatagcacagtgagaatttctctcctgctggtctgccctgtcggcacctgaagctattggctctgttttctgggctcatttcaattccccctgatgccagagaaaatccaattagtgaagaatttgaaagaaagaattctagaggaaactctatcaccctgaaaccatagcagagtggggatgtgatgactcttgtggggtcataaatgtcatgagtttcttcctaatcttaaatggtaatccagaaagtaagtttactgatattgtttggctgtgtccccacccaaatctcatcttgagttgtagctcccataatccccatatgtggtgggagggagctggtagggggtaattgaatcatgaggttgggcgtttcccatgctgttcttgtgatagtgaataagtctcacgagaactgatggttttacaaaagggcagttcccctgcacatactctcttgtaagacgttcctttgctcctccttcactttctgccatgattgtaaagcctccccagccacgtggaactgcgagtcaattaaacctgtttttctttataaattactcagtctcaggtatgtctttattagcagtgtgagaaccgactaatacatttatactcagactttctttgatggagccagcctccttgaaagcagttatttttagatgttccaacagccatctatcttacaaaaggattttctcttcagataggctctgcctatcaggttctacagtaggctgcagaaagaggaaattactttgtttttgcactttaacagcaaagtcaagtggaggaagaaactaagaatccttggaccttggagcagggttttactgaagagtgaaagtgggtcccgggagccaatattcttctttttctttttttttttttatttgagacggaatctcgctctgttgcccaggctggagtgcagtggcgcgatctcggctcactgcaagctccgcctcccaggttcacgccattctcctgcctcagcctcccgagtagctgggactacaggcgcccgccaccacgcctggctaattttttgtatttttagttgagatggggtttcactgtgttagccaggatgatctcgatcttctgacctcatgatccgcctgcctcagcctcccaaagtgctgggattacaggcgtgagccactgcgcccggcctattcttctaacatacttgagagggtgagggaatgattgcagctttgctgagggtatccaaggcctgttcatggtagaagcaaaacaacctcaacaaacaaaaccaaacaaacccaacaaagaatgtgaatgttactttcttaattttctgattctgtccctattccctgaaggaagcccttggaccagctggagcacctttcctgaagtcaactataccagacaccagaaaatacacgtgactccaagggaatcttcaggcagaccatcgtcccctcccactttattcccttcgacagtctgcccactgtttccttgttgtttttggttggtctgtttgttttgggtccccccagccgcccctcccctcccccacactcatctcctgcctccccagctccaggaagctatacacaaactggagcatttggagctaacttggtgggatgatgtggcttctggcagctcccacaatatgacaccagtgaaaatacaaaccaaatgttccttgtgttctagggtgtgaagtcttcatcgcccttttctttgagagcagagagcacaaaagaactagacatttggtggtttctgtcctggctctgccttttaatagctgggtgacatctctgaatccaattctttataaaataataattgtaggtccgggcgtggtggctcacacctgtaatcccagcactttgagaggctgaggtgggcagatcacgaagtcaggagatcaaggccatcctagctaacacggtgaaatcccatctccactgaaaatacaaaaaattagctgggcgtggtggtgggtgcctgtaggcccagctacttgggaggctgaggcaggagactggcgtgaacccgggaggtggagattgcagtgagccgagatcacgccactgcactccagcctgggcaacagagtgagactctgtctcaaaacaaaacaaaacaaaacaaaagtaaaagaataattgtcttacccactttatacaggtggtgtcggtgttaaagtcatttattgagagcctaccatatgctagattgtgtgtattgaagtacctcctctactaagccaagagcacctcaaaggcaagaccatttcctattcccatctgtgacaggtagtagaatctgactggctgagcttggagctggactctgcaccttgctagctctgtgtccctgggcaagttactaacttctcacctggaaagtggagatcaggacaccacctcccctctagaattcttgtgagacctaaataagataacacacatagcacagggcttgcagggcacaccatgaatgttagcaattgttctgactgtatttatgagatcagtgcctggcgcacatctgttttttgaaatacggtaaacagtaaatgctcaacaaatggtagttctttttcataagctttctttaaatagtcttgcagttcacatgtgacagatcatggtggtatgttccactgggactgatcccaagaaatgaagatgaggttttctagagtttaactctgaaagttcccttcaaacaagtttcttcatttggtagctgcacaccgacgggggagtgggtgacggaatttggaccaactcattcagtgtcttagggtattagtgtgttcatgtagtcatttgcctcagctaagcccaacctccatgatctttagccatgctgagctggagagaaagcagtacccgagaatgttcatggagcttgctgcctgaacatggaccctacacatgcacctgctaggggaggagagtgatggtgtgtgtgtatgtgtgtattgtgggaagtggtgaggtggtaatacagctaggagagcaagataaagaacatgatgactcaggggtcctttattttacgtggcatttccaaaatgtggcttctgatgacacaactgccccacattcccagcccgtctcaggtatacctcaggctttcccttcttcccattggctttttcttttttacttagagagatatttattaagatcgaaatccactaaagaaaacacaaaaagtagcaagaaaccactttagtgagaggactttttgggagagtgtatgtgatagttaatactgagtgtcaacttgattggattgaaggatacaaagtattgatcctgggtgtgtctgtgagggtgttgccaaaagagattaacatttgagtcagtgggctggggaaggcagatccacccttaatctggtgggcacaatctaatcagctgccagcgaatataaagcaggcagaaaaacgtgaaaaggagagactggcctagcctcccagcctacctctttctcccgtgctggatgctttctgccctcgaacatcagactccaagttcttcacttttgggactcagactggctctccttgctcagcagcttgcagacagcctattgtgggactttgtgatcatctaagttaatacttaataaagttccctttatatctatcctattagttctgtccctctagagaaccctgactaacacagtgtatgtatggttttattttttattgcttccaatattttctagacctgctcaatgtggtgttggagagctcagtttggccctggcaagacaccaatgcaggctcttggttctctgggctccttgtttttcttctgggcccaggaacctttagtgttagtgacatggagctggtgggcttggctgttggatttaactactctcttcatatgttctctgaaggacttttcagatattgaggtgaatctttaaccttctaaattcttcaggtagcttggctggtcaccagccttgccttccagaacatgtaaggcctgaatattttagtctctgcaggggtagatggagtcacaggaggaggaattgacgagctagctgggttttcaggttttcagtgtaaatccaggaacatgggccctggggccaggcagtgttagagatgatttagtctaaccttttcattttacaaacatagaagccgagcccagaggggttaaatgacttgcttttgttcacactgctgggagcagcaccacggctgggatgcaggccgttgtgacttctgctttgaggttctttctattctctgctcacacacctagacttgatgaggtagaaatgaaactctggcttcttaatcaattcataagcattacctactcctcttaccttttttaaaatggcatttgcctcctctttattttgttcaagtttcttcttcttctcctcttccatgtaatatgtgtgcatggaagcaaagtatatcatatgccaaagaacttaagttaaatattatcatttcccctgaccactcactaaaggcaatcttctctaaattgttttttgtttggttttgtttttgtttttggaagttactgctaaactcaataacatgcttctgtctttgtttctttatttgttagctgttgtaacatctcttaagtctctgccttgaaagatgcagattcagctcagttgtcctgtgcctcctctacctctgccttctctcattactttattccattattgctttcgctattggctgtacacttaaaccttccctttgtggcccatcaactttccatcgttttgcgtaagatggagttctaagctctcttaggatccttttcttgccctcctctcttctacatttccacctttggcatctgcatagttacttccacattgttaagtgattttcctctgtattttgtcctgcaacctcaatgatatcttctgtgcttttggttaactctaacagtgaaaaatgagtaaattgcattcataattatgactatgcaattcgtgtttgttgcttgaccaaatcatgtgttaggatccttctctgggggacctgaggtcgtaactcaagggcctctcaaagaagaatattcctaacgtcaatgtcgaattggttaactttttaaaaaacttcattggttgcttaaaattgtttgaccaaggttgataactctgtctgtctctcctaaaaaggtttctgtcaacctttcctctttctcctatctccctcccatcctttacttcacagtgaaatagtcaagtaccactgagttttcttagacttaggagctgtcagaatttaagggtctagtctgtgagaggagctcagtcaatggtgagatcgaatctttggacctcctttggaccaccggaatgaaatcacacgttccctacaataacaagagaagctgttattttgcaaaatcgatggatattgctaatgagtttaaattttctttgtctttatttatttttggtcttttcttcacaaaggagaatgtcagcataatagctgctgtttgattgatgaatcctgttgtgactgataataatgattctgatgctttgtgttgaaccaaaataataaaaagcccgagggtacttataatatgcctagctgagttttgaatcatggacatctgaaggctttacataatatgacactagaaacagctggtgaaggaaaagcctggaagatctcaaaaattatcccagttctaaagcgtgatacctgctgttctaaactgccatttggatgcttgactcgcatatgatgcaaaatattgaaatagataatttaccaagcttgcaatttctcatgctgaagaaaatatgcaattaggaaatgcccaacatagatttagaaaagagtcattgcaacaactcaagtggttgatgttaaaccataattttccccagataatggattgccacaggagctgaatccacttggctggatcctccacctgtcacaagttttcaccccctgctctctgtctgtttgtgggttctagatgggagaagagaaacacagggtggcaggagataagcactggctttccagatttgtcttaagtcttggcaaaatttatacaacggattataacatatattctctgcaattcatgtctttttgaaatagtaattttctttctgatgtgatcgggtgtttggagtggttggtgatgaagtagatgcatatctttatggcattataacctggaggcagaggaagccctgaaatgtggtgagtatccaccattctagaccatttgcaggtctagaaggaactctaggtctatagaggggaacctggctctttgtgcctcaagtcaaggtaatttgggcaaaacatattactgatttttcagttgctgtaacagatgtaaatgatgtaacaagtatgccagcactggctgtgatctggaaaactttaaaggggtctgtgctgtgtgtctatggagtgggtgtgaggtgcgcaaagggaagtagaagtaaaattatgattcagagggagggtctctgcttggtaattctcctcctggaagaactcccccttaatttgtgcattcattgcaataacttgactggaaagtaactattctatactagtggctggcatctaagattcctcagatctaaagttatcccagctatgttaggctttctgcaagtctttctgtggtttgggcataaacaagtaaggcccaggttattcaggtattttacaatgaatctggattctagccacttttctggggtgccattctgtccctttgccaaactgtgtgtgtgtgtgtgtgtgtgtgtgtgtgtgtgtgtgtgtgtttgtctatatctatatgtactttttttttcctggaaaattattcttgagtgaagctggtttgtgaggttgtagcttacaaatagcgtgttttgaatctgcctagaggtttcatggtacatagtacatgtatgtgtatgtgtgtgcatgtgcaaatacatatgctgtggaggtgggacaagggaacaaaaggttgcatgtgcacagaagtatggcggtcctacaggagcatccctatgtgggtaccattgtctagagagtgttgctaaattgatctctccatcctgggtcctgggaacttaaatgtaaaggtgggttggctttatatgcaattcacttgccttactttaaaagtgatccctgagctcacattcttgaataagctccatatggtttcccaagcagatactgcattttaaagtatattcacattgaacatatacatattgacaacaatggaagttgcgggaaggtgtcactctgcatggtactaactttagctgccagctccctttaccgagggagaaaggtccctgcctggactctgcttttccttcatcatctattggtctatttcagtgctgcaccagcccatcttagactggcgatttctttctatcatggatgtcagcgtcactgcagaatctcagcactttgtagttagtcaaagttttgtttctccatatcatgccttcattgtcaccagccctatctgactcaaatggtctacctttatgacaaatattttataataaaccattataagttttccaatgagttttatagattaaaaaaacaaaccctatcagagtcaaatcattcttctttctgacaaatattttatagtaaatcattacaatttgcaatgaattttatagactaaaaaacccaccctagacacatgattataaaaatgccctaaatgtaatataacaaagaaataaaataaatgtaattttaataaaataatgtgtatttgtatcagtcgggttcctgacaggaaacagcatggtaaaaagcgtttaactataaagacttgaatgaaggtgagggtaggattaggggatccagctgaggatgaggaaggatccaggcactaggaacagcttgaagttgttaccatccctagacctgcaggagcaggggagggaatggtgttcctagagccccatgagagctggggcctaaagagggaagcagcaaggtgtggggcagggaaaggatactccagcctctctctcttctcaccctctggtctcttgccactgcctcttactgggagaaagctggaaaccagagggaaaaggcctgggggactcagtccacagagcttagtctctggcagagagagcaggacagagaaagacagagaatggatcaaggaggggtgggaccaatggggaaagcagtacagtgtttcagtatgcaaatgccaggctgccacactggaagactgaaggaagggaagatctcccatgaacagaaattcacagctgtgaatgtgcagcccgacatgggtgccttgtgttggcaacactgattttcccaaatggcgagtaactctctggaaggttctaaattaaaccaaatatgatctcttaatttccaggttgcagttctgaaaatttctgtatatcttaaaatcatgcaaaaatacatttattggccgggcgtggtggcttatacctataatcccagcactttcggaggccaaggtgggaggattgcttgagtccaggagtttgagacaagtctgggcaacataataagaccccatctctacaaaaaatcaacaaaattagctgggcatggtggcacacgcctgtagtcctggctactctggaggctggggtaggaggattgcttgggcctgggaagtagaggctgctgtgagccatgattgtgccactgcactccagcctgggtgacagagcgagaccctgtctcaaaacaacaacaacaacaaaacccacacagagacatttagtttatacatataaaattgacttatcttctcatatgattttaaatgtatgtttcctctacatgaatggcacttgagagttaagcaggtgagtgcaaggcacgtgcctagcaggcgtgtcttgcttatgacaaaacacttggcatccctgatccttgcccactaaaggcccataacacccctccaatcatggtaagaaacaaaatgaaacaccccaacaatttccccaaggcccttgaagcagggcctgccctactatgtgctgctgttctagatatatctggtatttaacatcaccgatgaaattgctggaggtgcaagctgcccccaagggcattgcgatgaaacaaaataaaatctttgtaaatgaaaatgctgccctctttactttgttggtgtgtgagacaggttttgtaaacctttttgctggaagaggctctggtccaaacaaattcctaactgaaagagactcctctccaattctttttttttttttgagatggagtctcgctctgtcgcccaggctggagtgcagtggcatgatctcggctcactgtaagctccgcctcctggattcatgccattctcctgcctcagcctcctgagtagctgggactacaggcactcgccaccacacctggctaattttttgtatttttagaagagacggggcttcatcgtgttagccaggatggtctcgatctcctgacctcgtggtctgcctgcctcggcctcccaaagtgctgggtttacaggcatgagccaccacgcgcggctccaattcttattcctgtgtaagtttcctcataacttctgttggaagtcattcctgtccaacatgccctcctcttccaaagctgccacagttgtaggtaaaatggcccagctgttcttcctggggcaccagattggcctgagtgtggctccagaggcacctgtgaggatagtgaggcagcatctgaccttctgctgtctgccgtcctatggcattcctcagggcattcccccaggacttctcttttctagttttcctcctcatccatgttcgccagattgcttcctggtgccacctcctagcacctgtggatacctcaccttcccctgagtctaatgaccagcttatgtcgtgataggtctgccctcgctccaccctcaccttatttccatgatgcttggttgtcagtgaacgcagatattggagctaaggccagtgtttgtcccagggccccagatccaactggagtgaatattatttctatgggtgctattaagcatataaaattttttttcaaaaggactgagttgagttggtatgccactgtgaacagtaacttcatcacttggaagatccgacctactctaacggaatgtgacccagggctggtgggcagtggagagcagagtatactggtacccgcttccacatggatgctgaagttgtgattttacagtggcctcagcacaccacctcatttgtcctcaaatggagcttcccctgtaattgtgcggagtggatctgagcacctccctgacgtgcatgaacacggtacctctactgacttctgttctgtttatcaaataatgaacagagttttttaaaacagcttttgacaaaagaagtagaagggggcaaagccacatgtgaaacctacttcaagtcatcagttacacgtttaatcttgaggcattaaaaatcattcacttatcagtgggcacatgtcaattcccagacacatttggaaatgcttacagtgtggaagccccgagccgaactgcaggagctgtggagatggatggacagactgggatagcttcctacctgttggaggaatcagacaaacagagcagttcatgatgatttgggagtggaacaagggtgaaggtgggaggctcagaaatttcctcatggtagcatttgaaccaagcctttaagtagaacaagattttgctaaacatagaaggcagaaagggcactgctgactagctatttgaagaaaatagcgactagctattcgaacaaaaatgctgtttgtaaattaaatcctctaagtatgtggtagactctcaggtagtggcaagagattcagaatcacagataggtatgagcctggcagaggatacaaatcaaagctgcagagtggagcacctggaccttccggctcaggagtgaatactgcgctttggggctttgatgcttcatggaggaatgcggggttaaagtagtggggggtgggtgaaacactgcaaagccagtattttaggaagatcccccaggggacagtgtaaaggaggaatgagagaggggagaaagcaggaaggagattgataacagtctactgtccatggctctggccaagagggttgggtgagaggcctatttgtgcttgtgcccgacactggtggatgtgggtagagatctgcatgcatttcactccttggtaaggatggacaatggacagataacttccctttcttttttcttattgtctgagaagtgttactgacctgatcaacttttaacctcagtccccatgaggccaggccacagaggggaccatcgcattttctctgtgctctcactggtactggggaagataatgtgttataatcttttacagtgaaattataaatggactttagatcatgcttaggcaggctgctgacttaattttcctaagccatagctagagtttacatcctcctcttaagaggaaaaaaatgttccctctgaagcatgtactaaagagaaaggctgagaggattgatttttcccccaaagaatccataaatatttacataagtgcaagttacaaatctgtggctttgagattatcgaatttcactgcttttacactcacagcatataaatttccagcaggcatttgctggtcatgaaggttcagtctttggagacttgtcccctagtttatttcctttgctcttggaaaacaaatctctcttgtgctgtttcggatgctctcactcatggttacggactaggcattgaaagccatgtgacaatggtctttggctggggtggggggcttcattgtgaaggattgcctgctaatgggggtactactcctccagccaagaggctgcttctaaagacctttttgatagtgcaataattctctccagaaaggagcctggatgttgttgtagttccaaagtctttgtgaaattcttaggtaaataaaaaatcctctttaaagatcatgttgctttcactggggcaggtaagcaggtcttccttaaatatgggtgttgtgtctgccattttgcatatagacagacctcacttattttattcttgctctctctttacagaattgtgcctgggcacacccccttcttgtttggcaacagccagaacaagggtaaagctgagtgaagctttctcttatgtcttagtccattttctgctgttagaatattacagatgggtaatttataaagaaagatttagttggttcatggttctggaggccaaggaagcccaagaacatggtgctgttacattttggggtcattcctgctacttagtaatatagcagagggcatcacatggcaaagaagagtgagagagagtgagaacactcgagacagagagaaaatggggctgaatgtattctcttattaggagcccactcccacgaccactaacccacttcttgtgataataccattaattcattcatgaggatgaagccctcatgacctaatcacttcttaaaggtcccacctcttaatactgccacaatggcatataatttcaacatgaattttggaggggacattcaaaccacagcacccgcgattatgaattttaccattgctagattttggactggcctgttcatcataaggacctaaatttatacatgctgagaaacaagtgactgaaataagcagagggatgagctcctcccccatgttctgcatagggcaggcagttgctgctcattggtggatctggagagtagctgacctgaaaacagtcttcatctttccgccaaaataattttaacacttaaaaaaattttttttgagaaggtactagatgagaagcaaataaaatgaattctaaatttctgacagtggacaattccagggattggattttatgttgatgtgcttgggtatattagagatacatgcagaaaagtttatgtttgtaggagactggctttcagacagagaaacaaagagaccatttccatcttgtcctgggagtcagttggatatgatctcgtcagttgctaaggtaggattgggggtaggcaggcttggaactgggtttgtccctgacttaggacagaatcttgggccagccctattgagaaaaggtttaacctggagcctatggcggtagctggtcacagtcctgttgagagatttgcaatgggagcccaacatgaggaggtggggtgtacaaacaggcaggcatactaagacctcagggtgaacaggagctgtcgccttagatttcttgttattgaacaggactctaggcctggaaaggggacttggtggagcatgacagggccctatcccccataagaggaagctgtgttcctacttaggtgactagaacagaggctcagaaacggggggccaagacagaaccctggaacagaaactgagagttggtgacagacttcgttttagattttggggaaaggcctgagactgtgtcttacttattttatatcttccagtgcctagcaagatgcctgaccatatagtactcactaagcaaatatgtgttgaataaatgaattgggagggggatgatgagaagatataaactgactaggatctgataacttggttgtgattccaaatgtggcttggtacaatttctaaaaaagataggcagaattggggcctagcttcatggattgcaaatgtgcatgacatgggtgtgctttgaacatgtcaaagagcaattcaaacttatgtaaagttggatttaagtttacagggacatttaagaaaaggccttttactattatttaatttcaaaaggccctttactattactgaacattgaagttatgtaatcgcaaatataggcaggcaggaaagggctgtgtcaagagagggatcccaaagttactgtagatgccatgtagtttgttgaaaaaatcacctgagctgtggtttcagacagacctgggtttgaatcccacttccatcacacactgattgtgtgatcttggtcaatgactttgcctctctgagcccaatttagtcagcagtaaaatatggatgtgatagtattcttggaagaggtgtcatgggaattaaatggattgacataaatgcaatacctaggtggcgcctgagacacagtgggccttggaaatggcagttcccatagggagtcctgcacgagccatgaaggcgagaagccaaggctttgcatgctatgctttgggtgtgataaccctggtgggcctggcctgtattgctccctgagtgatgagattcttgctgatgtaatgggctgggtcgatgttgtgcagatctgatgacagtacatccacaccctgtcgctttccctgccaagacgaactgtagccgtcagagcctccattctgctccccacacccatccagtgaccatccactaacgccccagtgaaagtgggctttatttgagccttccagagaaattcaacctgagtggtttgtggtggtcacgctcctgtgtgtgtgtgcgggggagtctgtcttcagagcttccattcagccatctttgcacaccccacctgtctcagcctttgtccagtgatccagtttttctgtttaatcagtcagaacttgagttttcaggttggctgtcttttcttctgggttggaagagtgggaaagcactgaaaataaggatcaggcaaaggaacccttttccttttgcaaagacctcctagaaaagtgaggctcgttgtcagattagagtcatgtagtactggtgtttcttggttaggtcatggaaagggcccttcaaagggtccatggagtgattttaggtttggaatcttgccattatgagttagctcatgggttacatcccctcttctgcactccagcctctccctctacttccctcctttttgcttcagcccgaggcagatggcagacatggatacacatttatggattggctgatgtgtctgctggaaacgtgaataggctgtgtaaaggtgggaaggcagggtgacgtaagggggtgcagagattcccacttgggtttatgctggcctcgtctttgactggctctgtcatgttgcccttgtggggtcctgttttcattaattaatgtttactgagtgttttgtatgtttctggcgctgaacacatgcttcatatatattatcttgtttaatccttaccacagtcttacaaagtaggcatcattatccccattttatagatgaggaaaacaaggctcagagaagtaaatgaatgacataaagaggactttgaggcgaatgattttcctacagctgcaggtcctgtcctgcgattgcatcttctgttactcataccaacttcactacctgctgattacaactgttccactactgtaatgagatgtatgaagacattcgatggctctataaaatcatttctcctgccaacttcccagaattgctttgaggaagaagaattttgaaaaggattacatattttacaagtgtcagggagtcatattaatgtcattatgtttataaaaggaaataaaaggttgcagggggagcagagatagaaatgaaaaaaggcaaaagggagaggataaaaaggaagatacttacctataaatatagacataccatatctaattgctttacacatgtcattttatttaaacttcaaaataacccaatgatatacatgctagtgctgttatttcccctaatttacagatgaggaaactgaggcacaaagagacgaagcatagacccctgattatatacctggtaactggcagaactagaattgaagcccagcagtctgactccagagcctgaagttttaactccggtgttagtatgttttgccttccaatggctttcaggagggtaagggcaaaagggcatggaaagtcacctaattagttcttcaggtggggtatccatcatgaagatggtgatagctaagatgacttctaaagaacataggaattggcaataagtaagacagatgggttaagaaaaacatcattagtagggttactgtgaggattaaaggaaggctgttttgcacggtaaatgcttcgtaaacgtcagctattcattagtgaggtgtcggggagttgtcgggggaagagagaggagaaagaaggaagtgagaggggagaaaagtagttggaaaaggagaagaaagcctggaagggctggaagaaagtgtataaaagagatgtggatcttatgggggggcatagtggcttgtgcctatagtcctagctactcagaaggcaggaggattgcttgtgcccaggagtttgaaaccagcctgggcaacacagtgagactcgcatcccctctaccaacaacacaaacaaaaaaaaacaaaatgaaatccccacaaaaacttatcaggtttggtggtgcccacctgtggtcccagctacttgggaggctgaggcaggagtaccgtttgggtccaggggttcaaggctacagtgacctgtgagctgtgatggcgccactgcattccagcctgggcaacagagtgagactctgcctctgaaaaaaaaaaaaaagatatagtccccagagaaggtgtataaaggaaagacagagacaagaatgaagacctaggatttagtgggagaatttacatatttgttcaacaaatgtttatggagtgcctattatattagacagccatcagcaagacgagatgtgtttcctgaagtttttgatgggtatcttttttagcatttatgttggttagatgttcagactctgagtttagagtagaaaataggtggtatttattttcctgcataaaagcctgttggtagtcataattttctattaattcatcatgagtggagtctatatattagggtgtgttttttgagtaatgaaatatgtatatctgatgtgagctaatggctgatttacatgaagccatacctctaggattttctgtgacaactccaatttcatgtcattgtaacactttcccaacagatgattagtaaaacgatttcgtgaatgtgattgagtatgtagactttttcatttaaataaattaaaagcagaaaattctcatgtcacaatgtgtcctgattttgtttcagaagatatgtaaatccattgtcatttttcaaacaggaaaatgggagtacaatgtagagagcccacttgtagttttatatatatatatgaatataaatatatatgtcagctttattgagatataattcacgtatcatacaatatgctcttttaaagtatacaatttggtgcattttagtactatgtgatcacagaattgtgtaattatcaccattgtctcattttagaacattttcgtcacccccaaaaagaaaccttgtatcaattagcagtcactccccattattttcccctcatagcccccggtaaccattaatctactttctgtctgtttgggtttgcctattctggtcattttatataaatggaatcacacaacacgtgacattttgtgtttgtgttctttcacttagcataactttttcaaggttcacccatgttgtagcatgtatcagtacttcattcctttttatagccaaataacatttaatgtatggttatatcatattttgtttatccattcattagttgggcatttgggttatttctactttttggctattacaaataatgctgccatgaacatcgatgtatgagtttacaagtttttatatgaacataggttttcatttcttttgggtatacacccaggagtggaatggctgggtcatttggtaactctttgtttaacattttgaagaactacaaaactgttttctcaagtggctgccccgttttacaaacccaccagcaatatatgaggactctaatttatctgaatcatcaccaacactttccggggtcattttgattttgaccattctagtgggtatgaagtggtatctcactgtcatttgcctttccctagtgactactgatgttgacgatatttttatgtagttatttaccatttgtatattttctgtatagaagtatctattcaaatcatttgctccatttttaattaggttatttgcttttttattgtttagttgcaagaatattttttagtacatattctggatactagaccctaccagatatatgatttgcaaatattttatctcattctgtgggttttcttttcactttcttcatggtgtcctttgaagcacacaaaaaattaattttgatgaagtccaattgacctattttttcttttgttgctggtacttttagtttcttatctaaggattttttgttttttattttttgccaaatccaagataaagatttatgtctatgatttcttctaagagttttcagttttacctcttatattttgttctatggttgattttaaggtaatttttgtatatattttgaattagggatccacctttattcttttacttatgggtacccagttgtctcggcatcatttattgaaaagattgtttttttctttcattgcatgatcttggcatccttcttgaaaatctattgatgataaatgtaagggttacttatggactctcagttctatcttattggtctgtatgtctatccttatgccagtaccgcactgtcttgattactgttgctctgtaatgaattttgaaatcagaatgtgtgaatcttccaactttgttccttttcaagattgttttagctattatagtcccattgaattttcatatcgattttaggatcagtttgccaatttctgcaaagaagaaagccgggattttgtttaagattgtgctgaatgtgtagatcaactgtggaatattgccatctaacgatactaattcttccaattcatgaatgtttttccatagatttaggtacactttagctttttaatgatgttttgtggctttcagtgtaccagtcatgtgcttttttgttaaatttagtcccaacaattttatattttgatgcttactgtaaataaaattgttttcttaatttcattttctgattgctcattgctggtgtatagaaacacaattgagttttgtatattaccttgtatcctacaaggctgctgaacacatttgttggtctcaatagtttctttttttagttggataattccttagtttcttccatatacaagaatatgttgtctgtgaatagagatagttttaatgggtcctttccaatctggataccttttatttcattttcttgcttaattgccatggctaaaaccttcagtgaaatagaagtagtgagagctaatatctttctcttattcctgaacctaagtgtaaaacattcagtgttacacaaatgtgatattaatgataggatttttgttgtgtgtagtttttctttttgtaggcagctttgatgcagtttttatgctttattctattgagtctgattattatattgattggttttcagatactaagccaacattgtatttctgggatgaatcccacatggtcatggtatataatcctttttatatgttgctggatttgggttgcaaatcccaacatttattttgttggagattcttgtatctatattcataagaaatattgctgtgtattttcttttcttgtgatatccttgtcttgttgattgccttgatatcaggcaatcatggcttcataaaataagttggaaattgtctctcctttttattctttggaaaaattttcgaactattggtgttgattcttctgtaaatatttggtagaatttagcagtgaagccatctgggcctgatctctcctttgtggaaagttgcgtgtgtgtgtgtgtgtgtgtgtgtgtgtgtgtgtgtgtgtgttactaatgcaatctctttgcttgttgcatgtttattcagattttctattttttcttgagtcatttttggtagtttgtatctttctaggaatttgtccttttcatcaggattatctgacttgttcacaatacagttgttcctgctgcatctacttttgtttcaagttatttttaaaaaaaaaaaaaagactgctaaactttttgaaaatactaccatgagggctcctgaatgacgcagttatgcagttctgggttctttgcagttcatgccttatgataatagctgttataaagtgtttaccgtatactggatattatgcaaaatacttaacatacgtagctgttagtgtcacaacaaccctttgagataagttctatgttattctggaaagagaggcacatatgattatataattggtatgttatgggactggtaattgcactcagataacctggacacttagagtagaaactattagtaggggtactcccattctctccaaggcttagcttaggagaaaagaaaatttgagggtgcctctttatatagaacatcagaagtccagaggataggatgctaatgggagggatatcaggactcctgcagcttcaggtgagctctagggaccatgagactctagtaggtactgtagaggtagagagtgaggaagacattttgaattcccactaattattccctcgaggttgcctcaaacttaagtctaggcttgtgctaggagcttggactgggagtgcagtgcagagcaatttgctgccaggccgtggaaaggtgtttgacaaagtttctccagtctccagggcaaggggacagcctgagacctattctttggaaataacccataggatccagagccttctagagcaatattcttgtatttatatcataaatgtatttccaggattcacaggtgtttagattaattccacgcagtgcagagaccatcccacagtactagaaaatgggttgttccaccctgttctaagaatagcataggatttggaggtagagggcctgaattcaagtcctagctctgcttttactgatagtgtgacctcagtcattttactttccctctctaagtctcagattcgtcattggccaaataagggaaaaaagtacaaccatcacatagatcattctaagaacaaaattaaattagtgtttggaaaatggctttgtaaagtgttaaaactctacaaaggttaactaatggctatttttttttcccatatggaaaaagccactgaatgaataatctttcgcatgagtgtccatttatgtcagcctgctaacgtcatacagtgtggctttgaagtgtagaaggtgtgactgtcaggttttaaaagggaagcagagagactatttctcttgcctctctgcaatgtagcaagcacagctgcaaaagtagtgatttcacaggatctgtagcacctcactggggcagaaacagtcaaaataaggacaactgagaagccagactcaggtaaattgaagaaatgaaataaaaacagacctgaagggcataataacaccttcatttagaaaaagtgttatgttataagtaagtacttatgtttctcttgcggtctttctagtaaattccatccagtttttacccaatcgcttttatcctaaacatatgactggagttaaaaaaaaaaaaaaaaaaaaaaaagctccaaaatgtttagcttagttggtacttcataaaaatcgggaatgataatgttctccaagataatgtcctatctctcatctgctgcaagggaattttcactgctgcaagggaaagcttcaatcagtcttgaaagaaaagtgttgggggtggtggaaagcctgtaggcgttgcagttggcagatgtgtgtttggttcctggctctctcctgctattgtttacctcaaattttctcctctgtaaattggggataataaaatactttttcagtagggttgtggtgaggactaagtcaacggcaataaatctgagttgccttctcttccttctttctgactaagcttttcgtgtcacaagaccaatattaccaatcaggaagcatttccaaacaagtactcctgcctcatcccaaatatgccctgaatggtctgacttttctcggttcaagtgagtccagattctgagagataccggaagggcgcttagacgacatctctccggtgtgttgactcctctgtggagcctgagtctctctgagccccaaggtcaaggctttgcaaatcggggctatgatccggaaaatgtagtgctcatatggttctgggcgtcagaacatgattacatattcctcagtcatagaccactgtgagttaaggtccccatagaaacagatggcacacttgaaggggtaatcaaagaaagtgcaatgtgcacaggctaactggggactagccacagccacagcagggggcttttccaacctctgagcctggagggacagggggccaagggaagaccccataggggagggccgtagctgtgggagaggggctgcctgtcaagtgtagagacacacagtcactactacccagtgcccagcaggcagtgtagggccttccaccctttagccctccaactgagggaatctggtggtggggaggggcaattggtagagggcagcctcctagggcagagggaagagaggagaagagaatggatctggaagggcagaggaagaattgcctgcagaaagacttgccattctctcagtgagggagggtcattaggactggccatgccattatgcagaattacccccgcttcctggaactataggacaagggcattacacacaaacacatcccattattccgtccctgcttttttctatcgttttgcatgcagagaaagaaaaagatgtaatacttcacaggtttcattccaataagtcctgtctactgtttgctgtgcattctagggtacaactctggcaatacatattgcagacctaacacctgctcacaagaccctgctgaggatttttgaaaatgggttgctgctcctggtgatgtttgcagttctttattttaattctgcaagcagaaagagaagttgctgttgtgtggcgataggaggtgtgtcagaatttcccgcattgttatgaagctaccatgcaaatgtaaatgttccctaggatggataacagaaaagccatcatctacctcatgtctatatcaagtgggccaggacagcatccctggaaagaggtggagctaatgggagagtatcccaagacaagctgcagaaggaacttcttcaggatggcccctaggatgggaatgggcgtgataactctagttacagggagatgggttacagttctctatgaggaggaatcagcaataagagaaaatgacgatagtcaaatggccttaggaggtcattaaagctactgtgaggagcagcttaagacaatggtcagaacttcagaagtcgtggccaagagcagatccagaacacagtgcgtgggtacagtgtgagttggtgcccagcctcctgaacggaagtcattagttgctgagtggtaaggagaacttaccactggaataggaatgagcctgtgaacggctgtggcagacaagccgtgggtaggacatagggggctcatttctgggatggagtttacatgtcacaggctgcttccaagggccagcaccaggtcctgtctgccaatagtgccaagcacgttaaagataatgcccagtctctcacagggaaagttcacggtcactgcagtctgctggctgcacctggatggcaagttctttgggatgttgtcacatagactaaagcatcagatgtgtggttgagtaagataaccttgactgtccaagtccatgaggacgagggcaagcttcgatgattggatctgggaccagagacatggaacgtggcatcttacctgctgtctgagacagagacagatctgctcgaccaaggatcatgggcaatgggttgagcaggcaccagagtgggggaaggaggtgctaagaataatagcatttctagttctcctttgttaaatcctgactcctacaggtcggttgaactccctcttctgcactctcatcgtctcccttgagactggatctcactttcacggagatgtgtagttatcagcttgtgtctgcctgccttgaaggccacatatcaagagctaacatttattgagagtcaaccgcgtgctaaatgctttatagctagcttctccttccatcttcacgacagacctatgaggtagttgtcattattcttcttcctattttgcagactagagaattgaaattcagagaaattcagtagcatgtccaagatcatgtaggtcttaatgtaaagagcagacagatgggatggagctcaaattcaaaatcccacgctctcgactactatgtgatctcctagagactacatcttttcttcatttaggactcctcaacacctagcgtagttccaggcaagataggcagctgacaacaattatatctgataaataagtagggccaggcctgctggcatgtgcctgtagtcccaactactcaggaggctgaggtgggaggatcacttgagccaaggggttcgaggctgcaatgagccgtgattgcaccactgaactccagcctgggcaaccggcaagaccctgtctctaaaaaataaataaataaaaattaaaaatataagaaagtggaccacctgtgtacctgccatgctgtgtgattgcataatctaacaaatacgcctatggatttactgaatcctgttgtgccctggggaacaacatagagacagagtgatggcaaaggaagtgctcattggagaaattagctggggcaattaagagtttgctgggtagtcctgaaattatagcttgtgtttaaatatatggaaacaaattttaaaaattaggaccttgattttatttttgccacataaacataagttcatacatgaataaaaattaatgtctctgccaatgaatgatactaaaatgccacactattcttgcttgttatttttgtcaccagaaaataagccatatttacatgattatagaaccatatgcttttctgaagttttagattcagatttcataatgtaataagagctggcagttacatagcacttaccatgtgccagacactgttctcaattgtttacagatgttaactcttttaatcctcacatactaataatccttaggaggtaagcaccattattataagatgcaaggaaatggaggcacagagaggttaagtgatttatccaaagtcacacagctaattattgaaagaaccaagatttgaacccatgtactctttttttccaatgtgatcatgtttatttatttattaaatttaaaatttttgtgagtacatagtaagtatatatacttatggggtacatgagatattttgatacaggcatgcaatgtgtaataatcatcacatcattgaagatggggtatccattccctcagcatttatcttttgtgttacaaataatccaatactcttttagtaattttaaaatgtacaattaagttattattgactatagttaccctgttgtgctaccaaatattaggctttattcattcattctaactatttttttgtaccattaaccatccccatctccccctgacttctccactacctttcccagcctctggtaaccatccttctaccctctatctccatgggtttaattgttttgatttttagatcccatgaagaagagagaacatgcgatgtttgtctttccgtgcctggcttattttacttaacatagtgacctccattttcatccatattgttgcaaatgactgaatctcattcttttttatggctgaatagtactccattgtgtataaatacaatattttctttgtccattcatctgttgatggacacttagctttcttccaaatcttggctaattgtgaacagtgctacaacaaacacaagaatgtggatatctcttcaatatattgatttcttttcttttgggtacatacccagcagtaggattgctgggtcatatggtagctctattttttagctttttgagaagcctccaaatggttgtccacagtgattgtactaatttacattcccaccaacagtgtatgagggttccctttactccacatcctcgccagcatttgttattgcctgtcttttggatataagccattttaactggggcaagatagtatctcattgtagttttgatttgcatttctctgatgataaatgacgttgcacaccctttcatatgtcggtttgctatttgtatgtcttcttttgagaaatgtctcttcaaattttttgcccaattttttaattggattattagattttgttctagagttgcttgagcagcttctatattctggttattaatccctcgtcagatgggtagtttgcaggtattttctcctatccttggattgtcttttcactttgctgattgtttcctttgctgtgcagaagcttttaaacttgatataatcccattggtccatttttgctttggttgcctgtgcatgtgggtattactcaaatctttgtccagaccaatgtcctggagagtttttccaatgttttcttgtagtactttcatagtttgaggtcttagatttaaatctttaatccattttgatttgatttttacatatgatgagagatgggggtctagtttcattcttctgtgtatggatttccaacgttcccagcaccctttattgaagacactgtttttcctccagtgtatcttcttggcccctttattgaaaatgagttcactgtacatgtgtggattcatttctgggttctctcttctgttccattggtctctgtgtctgcttttatgccaaaaccatgctctttcggttactatagctcagtataatttggctatttggggtcttttgtgtgaacccatatactctaaaacactacacagtactacagagctggggcttactgggcattcactacatgctgcatttaatctttatcacaacgctgtgtgaaaaagaattgttttgtccattttataaataataaaattaaaactaaaagaaccttagacgtttgtccaaggtaaaacaaatgatcatctgcagagtgaggcaggccctgcagactctcctggtatccttgctatcatcacacacttccagatatacttgttttatcttacattgagtttttaatttatcttgaacagagccaatcaatgttcataatagaaaaaatataaaatatagatacaaaaaatgcattatctcattgtcccactgtagccactattaatctgttaatgtttggcatttcttacatataaaatcacaataagataaaacacaatttgtcaattattaaagttttgaccaaccttcaatggataaaccaatcctttacatttaaaaaaattactcagttctgtaaagcaaaccaaaaccaaaacaaatctaacctatggagagagaaaaattttatttgacatgctttccatcccaacaaaaacagtctctagccactaaacccaaaatacgtcatcttatagtcaaagcaaaaaaaaaaaaaacatagtaatgagattgtcttaggtttggttatatgggattgaaaaggcttccacatcttgttttcaaggtgaataagtgtcttctgataggagaaaagtagttttattattataattatagctaatgtatattgtatatttactatatactagaaattattctctgcactatatgtatatgtgtatttgtgtatatgctcatttaatcctcaaaaaaatctatgacataggtattatctctatttatagatgaggaaatatgcgtggataagttaagttaccactccaaggttacacaggtgtgatttgacctcaagctgcaactacagtgctggccggtggtggctatgtcacaggggctgtgttctttctacccctcaccgctaggacaacattcttactttgcggggaagtctaaatatttatttacgcatgggataggctgtgtgttttattgtatgagaaggtgagcatctgttctgtatcagtctctatcttggtcctgagatgcctttaaccctcccaggatccccagagtgaattactaggaccctcacgtttcacttggggatggaggaacaggtacttcgacgatccaaggtctctctctgcagcctggaattcctcagtgcttctctgtgctctgagaatcaatcttagccctggttgatttgaggcttgcctgcttttttctcttacctggggcctctctctttcttgtggaccatgctgcagccttgccagccttctttcagtccctcagacatgccaagctctttgcttttgctctcctttctgcctggaccaccctcccctgcttagtcttcaaacagctcatatgcatttgtcaggcctcaaactaaatgtcacctgtccagagaggtaagcattacctcctccttcagaaaacttccccaggctgggtgtgggaggtttgcttaaggccaggagttcaagaccagcctgggcaacatagtgggaccccatctctacaaaaaataaaaaattagccaggtgcagtggtgcatacctatggtcccagctacttgggcggctgaggtgagaagatcgtttaagcctaggggatcaagggtgtagcgggctgcgaaggcaccattgcattccagcctgggcaacagagcaaaatcccatctctgagaaaaaaaataaaaagcttccttgtgcacctttctctctttatcacatcaccctctttatctctttcagtgaactctccaaaatgtgctgttagtttccttggtcacttttttgatttctgtgcttgtgttttttgcttgttttgctttttgtttctttgccttgtaaggtaagctctgtgagaacagaggcctcatccttctcattcagtgttttctgccccatatctgacacactgcctggccctggtaggtcctcgggagacttttgctggaagactgagtcttctgacagaagatggggaagatgaggaagacagtggctttcccagatgccttaagaacgctgaccctgcactgtgctcggctgaatgaggctggaagcagccaagcccgggcagggatctgaggtcagtggatgagagcagacataggctgctgtcccatgtctggaagggcccagtgcccggcttatttggccagatgttcttgggagtgtctcattgtcacctttgggtccatgaccctggcccgtggcagggagcctcccttgtactttgaagatttctagcgagtgttttagggtgtacctttaagtggcttttgtgcactgtggaatttggctcctgacagcctcattttttaacagactatctgaagcctggttttgttgtttgattttgctttcttttcttaccttactccactgactctcctgtttcagagggcatccagtgctgataccgagcaaattctctccctctgagaagtctgctgggtgttgggcagctggggaatgaggctctgtggagaggggaagttttctcttaagctacttttttggaactttctttgagtattactagtagtaggagagggatttcaggaatggcttgggatgtcaggactggtctgtgtaggaaatctggagaataagtgagtttggacttcagggtgcgtgctggggaatcctgacctcagtttccgcgggtgttgactggtaactattggtttcaaatgcgagatgggagtcttgctctccccatgtgtgggatgtgccccgtggggctgtgttttgtaggcagtgaagttaaggcttgcccagaaaaataacatgttttccttgcctggtgcttgagctgtttgccctatgactggctgattggtggtttgcgaagaaaggagacactagttaactggggtgtccagaggatttttgtgtgtgtttgtgtgagtggttttttctgtttctttggaaacagtagaggacggatgaggaaataacgatcatactactacttagaactgcgtttaaggtccttgaggcatcttccaaacattaacttgatgtcactatttaaataatgctatcacttcgagaagaccagaaatcctttgatgtcagtattgaaaagggggataggaacactgagggctttggaaataactgggaattttggcaccctaactcgtattctaacggctttaccctgtgctgtgtttcctacagaggcacttagtggaggatataaatcaaagctctgtctaatcaaggctttctttcagccttgaaggaaaacacttctttgagattaaaaacgcctgacacataggatgtgatggtatgtgaaagatatgttttcattaaataaaattttgactactcccaagcattaaaaaattcaaaatctgttaggctttccacatatataaacctttctgcattgggaggtgaccagattttagggacagaggtattggattattcatctttaactccccggtgccccaagttaggaaatgttgctattatggagacgtcatctctccattttctcaagaggctgaaatgaccagatcattgattatattatgacttcctttttttcacagctaactaacacttcatgcgttattcagaagtttctttttttttttttttttttttttttttttttttttttaggctaggcgtggtggctcatgcctataatcccagcagtttgggaggctgaggtgggaggattgcttgagtccaggagttcaagagccttctgggtaacatagtgagaccccatctctattttttagaaaaagtagcatttttaaaattaaatatcacatgggctatttggggaataaagggagagaaagaaaaaaaaataaggaagagtgaaaataagaataagtgttaagattaagaaaatgtagtgtactaaggaaaatgtaataatgaaaagaagatttggctttttttttaatagttcaagtggagagtgggtataaagagggtgtcacaatctgtgtcagtcttatttcccatgcctccaggtaaacctaaagcacctactgataagaaggctgagtttctcatcttatccaggtgtcttctgaactctcctttcttcctgcctggctggggttcagattgcagggacagggtagccaggcacatatggggacgtggccttgccagcaaagcactttacttgcattctatggctaggagctgttttcaggaaggaaaacagacacgtgcagctccatctccagcccctccaagcccagggtgaggagtccctcttccctggcttgctcagccaccaacagccaaacttcaccccagagtcaagtgacctattaaacccgtcttagtctggcagttatttaacttttataacaactgtgagaagtaggtattgtcattgttgtaaaagagcccaacgcagtggaatgaaaaacaaacgaacagaccaaacctacccaagcttataggttggctggtatgtggcagagccaagttggaacacagacctgtctccgaggtccttctcgggatcatatagaagacaaaataattctacttggcagccttcaagtaaaaagttggcagatcaggatttgcttgataattgctggattatcagagaatcatcaagtcaggatctctttaaagaacattaccttcaacatcctttggaatcttcaatctctcgacatatgccaccaaatgtatacataactctgtgccatgtgccatctctgcaactccatgtctgcgagttgattgtactataaaaacagcaaccaacatttcacagcactttgcagtttatgaagtgctttcccaaatatcccacttgatcctcccaacatccctgagtcagataaaatctatatcacctatagtctctttttataggagaaaattaatattcagaggagttaagtaacttgcctaagatcccacagctaatgagcaaaggagatttaattgtttcttttctaacataaaatctggtttactaatcacgatattaggtttaccataaataatacagttttacttttcagcattaaaagcaaaataaagcctaaatttaaaaaacaaacaaaatcccacttccgaaagaattaaaagattgctccaggggttatatatgtgtttgcagcttgaactggcatcctattatgagaaatatttagctgtgaaagaggagatgatatgatattttatgtagttaatgaaacagttttgctttctcatggcctctgaactctcaaaagcactttactaaaagtactttatggccattaaaattctgcttttccaccatagacatctgggtacacttctctttccttctggagaatcattgcccagagggcaggaactgtttgtgccaagccttcattctcctagcatggggcctcatgcatggtaggtgctcagtgacgatgtggggaagaaatgaatgaatgagacctgtgtccttggtttctgattctgcccctggtgtgtgcccaagttgaatcatatttgaacaagttcactgtgatgggtaatcaatcactgtccacaggccactttccctgaagcagtttgtgaacaataccccatcaagggcagccacaatttcccagtgtggatttgggggctggccttttcccttcccctttcttcagcctttcaataggcatgtctcataggccttctccaacgtccccactgggtgctgcctgcaccctcttccccttttttctttccctttcagaaggatccaggttctgggtttttcctagcatatgatctacactcccctgagcaaagaaaccacgttcatgcgtaggaagggctcctaggtttgggatcacaggggcatttaaagaaatcctctttcccttttcatactgatttgaagtgtggattcgaaaatggtgctgttgtttgggggcctgagccctggggcagaaaaagagaaggccctgcgtttgtttattaatggcttggaccttttgatgaattggagtctggcacagtgttaacctctcgtgggtggtggggttcaaggaaaaggccttttccttccatgtgctttttccagagtgttttagtggatttgcaggctttagtgagtgattctttgtttagtaggaagttgagaaagatatgaaggacttttctagtccatggaaataatctaggaatcccccaaaacacagcttattagctgggcatggtggctcacacctataatcccagcactttgggaagatgaggcagcaggattgcttgagcccgggagtttgagaccagcctgggcaacacagggagaccctatctctacaaaaagtaaaaaattagctgggtgtggtggtgcacacctgtggtgtcccaactatttgagaggctgaggtgggagggtcccttgagccctggagtttgaggccacagtgagctgtgatcactccagcctgagtgacagagagagaccatgtctcaaaacaaacagacaaacaaacaaaccccgcaaaaccccacacggcttatttctgcactttaaacatatttaatgatccttcattctggtgaaccttgtgcagaaaggtgggccaagagttttgtagttgcttccttatgagatcagtatcctcctcatggtacaatacgagctaggcatgagttttgagtcttgagcttgtttatcaggatgaaaggatccctgtaaagtgtgtgaatatatatacatatttatatatattatatataaacttctcaataagaaaacaggccaaaagaaaaaaatatgtatatgtgtgtgtatttttgctcctttggactgattaagctttcttactgagaagctggttaagaggcaaaagtttccctaataagtattctgtgagcggagggctaatggtgccagcaacgttaaagcagaatttagaagcttgtgatgttttctatttaagtataaaaaaagaaaggaaaacacattctctatgatggagctgtcctctcagtaataatagaaaatcaacaaggcaattatcacaagtggtaaggcattggagtaggagatatatttgtatgttggggcaactctttcttttgctactgttgagtcaacactgctgtagataaaggttaagttatctggacagtgggagctgtaggtggccaaaccagataatttacccagaaaaagccaccctaattgataccagcttagtcatctctctcctctatggactgaacctgcaagggtatgcttatgcttagcttaaatgttggcaacagaccccagccctccctcacactgacagggaatgataatttcacatacttttttgaatattcataaagttttaattggcattgaatctggccttgtcataagcttaactttgcccgagtttttcagagctcttgggaaagtataaagaggtggggacgcacttagtcccttcctttcatctcctcttctgtatgtggtctttgttttcattgtctcactcatcctgttgtgttattcttaatctgccttttaccctaaactgggtggcatgggcgaggcagttgtgggtacttatactctaattattcttgcagaagccacactattggctatcagatcaggagactccagtgttgcacagaaccagtcattctgtgcattgcagaatatcccatatcccaggccccttcccactaaatgccagggtgacccccttctaataatagcagacaataattggtttcacgtatttccaaatccccttactgggccacccaaggaaatgatgccttttctaggcaggcagatgaaatgtgccttttgctaacatttagaaagagaaccttgttcgaatgatgagagaatcttcagatggcatgagatttttgccttaacatggcctttaagtgacctcctagtactgtcaaatgttcacacacttgacatttgaagcagaatgtgtgaggaatctgaatcaaggcttcggtatatttttaccctgtgttcaacggacatcgtgagctgtctcaggctcagaacacaactgctggctactttagaatacaacctgggaatgccccagctttctgctggggtcgtgggaaaaaagcacccagtatgataccatcattctcaaatgtctttcaagaggaagtcagtagtggtaatcataggagttaatagtaagatgaaatagtctcttcctggtttcgccgaaagcagagtggtctggcttgggcatcactgggcttgatgcagtctcacatgtggtagctcacattcatgcagaaaaagacacattttcagatgttttgagtatgacttcagcccgtacattgggtggaccaaatgtatattgttgctgaagatatagatacttatctagaataaaaatccaaaacctccccccccccacattatccaataaaaatcatctgcatgtgtgaaaagaaaactaagactagactaaaaagttgtgactcttaagaatatttaaagatatttattttacatgaaaattgtttaaaaatcaaatgcactcaaactgcattaaaaagtatctatctagaggcagagtagtaccatttgggaacgtgttccaattctaaagaggcaaattttactgtagtagggcacaaagggagaagagaaaactatactgctgacctttttcttagattttccaaaaggcaagctgctttccaccagtatgaagaatagatccagttttgcactgaatttcgttgctatcatagtcttttctctcaggagttcatgggggcagttattttaaatgacaatgaaatactttcttttctggaaaaatagagatgacagggtcgacctaaaccttggctatgttttgttctaatttttcttttttgttttctttcctttttgtgcacagtgagagcaggtaaaaaggaagagagtttgccaccagtcagcatgttttctgaggttatatgtttagtcccattagaaacaagctaaattatttggttacattcaatatttccttcaaaacctaagaatctctacacttgtattttgttaaccacacacatgtcaaataaacttttgttttagagatgtgatgtcttctgcaagaaagtatattgtactgcatggtaacaaggggacaaggacctaaatgcggttcatacgcattcagcgacttactcaacattgcacctctcatgcttcacacaagtgcttattaccaagtatgttctgaactattgaacccatagagaggaaagctataagacaggattatgtgaaacaaaaatcagaattagccagtaactttgaacaaagacctcctatctaaagaaacatatggaaaatttaaaaaaaagaaagaaagaggaatctaacatatgaaaacccaatcccactggaatgttttcctatacacagcataaacgccacataaataaaaccacaaacctctgcagaagtacgtgagaggacgtgagcccccagcactctctcctgttacggccccctctgggaagtaagacccgggttagtttccagagacaaaagctgtttggaaatccttcctcctgggagcagtgggcctcattggaagggaacttctgacagcctctaagcataatataaagtgtgacgcaatcccaaagggggctgtgattcaggttgtaggattctgagcttttgggataccaggggatggcaaatatctttgaagaacagggatattcttctggtttgaacagaatagtaatatttaaccgcagtgttatgtgtcaagttcaggccttctgggggagactactggctctaaactgcccaggaacacaccctcttcacgccaagttctggtgaaatgttcacttataaggtacagccccactcttggtcttgttccctgtgtaaatctctggtttgaaaaccttgtagcattcaggcgtttcaagcttgagggctgaaatgtcacttttaaagcagggttaaaaaggtcacacagctgcaaataataatagcccaatgaaattcagattctgactgcagcccgcttcaagaataacactgcaacaggaaacaagaccacaagatcctttcaccagtaacgctggtaagaacactactgataaaatgagtatatgcatgtgtctgtgtgagacagacagacagacataaggagacaaacacacaaagagaggagagaaaggcacacatggagaaatagacatgcaaagagacagagggaagatgcccacagaaagagagagagacacacacagacacacagaaagataccaagacaaacacaaagtaattgattttcttggactgaaattcaaggtgtttatttttctgtggaaagttacaatattcaggtttgaaaaataaagatatatttgaaatccagaggacttacttttctcttaatttacagttagcttccaatagttatgttttcacataatacctctttgaatggtcctgttctacagtgttttactacaatggcactgttttgcagatgagcaaataagataatgaaagatgcaatatccctcccaaagaaagaaattcttagctccaaattgcatatgcaattccttcccaacagctagccacatgtggggataacctacctgcatccttgctttgaaagtagaaccaggcatctttgaagaaaataaatcgagagtgtgtttttggtgaatgtgtgttgggttattattgtgtgtgtccccttgcccttctgacagatgtattgagataaatatttgctttgtttcagaaacacgaagtgcaaattggccatggccttaactaatataattaataaacaacatttgttcctaggaagaaagcaggattgatgtggagtgtcatacagtgtgactgactcaaggtgctcctgttttccagctgtttttggtatttcaggaaggtccagtttcctcctctagaaaccttttgaggtctcataagctcaacaaagcagaaagatctgtttcgtgtgagtcctgccaagaaggctcttcccacactcacaggagagtgataaatgctgataaatgttgtcaatatcacgaataaaattcaagcccccctttcagatttataatgcattcatttccaggttaacaatatcagaggtgacagggacacagccatattgttagtgctcactgatactcatgatttcagtttgtaggtttgaagttcccataacttttggtatttataagaatacatgccaggctttcagattagaacagcccttttagtgtcttactatttattattgcaaattccatatcactgtatgagtccatctgctgtgaatggaggaaacttgtgccatcccactaagattagagtttgatgttaactagggattagtaatggctttctacaatttacatgggcaaacatcactcttggctgattacagcaaaccagatgatgtcaatttatcccccctctgggcttagttgttacccttaagtttacaataggtatttacagtatattgtgtaggctgtccacgtttcagtatcatttgctttttgcagtgtttgcctttcatgaaatggtatttccaagtatatccctaaatggctggcaaagcatttgaatggattgcatgagacattgtggacgatttcccattttagaccaggaatttgtggggtcagacactgaacaatgaaagagattcttgctcattgcgaggccagaggaatccagtggcagtcgagggtttgaattgtaaatcaagcttgtcatctctttgtcaaccatgaaaaacctcaactcactttatgtgctattaggatttgttatcagagtttttttgttatcttcctcaaatttgaaggaaattaaaatcaggaggcatttttttctagttgactgttgatgctgaattttggaaaagaggaacaaaaatgagtaccgtttagaaaatattaaatgatgaggcagcatctgccacaattatgacagtgtctaaccaaaggtatcggactactcagagtctttcaaatgttgcttcatgggggtcatactcagcccacatgtggttaatagactggactttaatgatgccaatgtccatggcaacattaacagacaatttgtaatgaattaatacatttacttgtgagattgaataaaattagattcactcattgtttctactgaaagcacctttgacttttttccatgaaatctggagagatttcttctctggccataactgtcaacaggtagactgagtgatccccaaaactacttacctcaccaataatttgattcagggcaaacagtgtttgaaaaccactgcctcaggagtagagaatgggcaagctgtttggggcagtgtattgtgatgattcaggatcattatccattccacaaatatttattgaatgcctactatgtaagctctatgcagtggagcctagggtatggcagttgccaagcaaaacttggttcattaaaaaatccaagccagtaaaacaactgaatgggaaatgagaggatgaggactcagggagaacagcctcgttcaaatcctgtctgagtaatttgcccccacctgatgaatggttaaagaatctatgcagggctttatttaataagagtctgtttgagagaataattattacaatatgtgctagaaaagaaccataataatagaccataaaaataaaccatggctcttgactaatacactagaccagatcatactcgttgataaaagtaataaagcctacatggtagagaggtaccatttagaaaaactattgcaaacacctacacagaaaggaattagcaagagaatgctgtttgcagagggctaaatgtgggaactgcagggcatcagaataaagcagttgaagttcacacacttacaaatacacacccactcacttcagaccttattaatcactgaaaacttattttagcaactgccattccacttgaagacttttattccagtattacgttgctaaaacatatttggtccatgggatccgtggcatgtaatacattgatacagactcacttatgttgtaaaataaaatagtaacataacaattgtaacccagtagaacctatcaatgactaaactctaagtgatttgaggacagactgtatttctcaacttgtgtcttctgaggcatgatttcttatactgacatatctcagtggctaacagattagattgctcatattcctctaaacatatcatccacatcatgaagactcaattaagacagtagaatctatgtggccgagcctttcgttgtcttcaagcaccagcatcatcctgtaattctaaggtatttgctgtagctcatatgcaaatgcagccattaattaagataaggcaaaccatgttgatatcggacagaattgccaaagtattagcattatgggcctgaatttctggggaatgtcagtactttggtaggccagggcttgggatggagttgggattacggtagaaaaatactttttcctcatacttaagtgtctgggcttggtcaatctcttccctactttggcttattaatgaatctctttaaactttcagcagtagcacttccagtcttgatcatttctgttgcttggacatgaatctaattgttatcattaatgaccactttcagatgtaggccataaatgtgcgtatatgaaactttctcattttactgtcacatcatctaatgttacctggtaagaataacattctacagtagcaactaaaactcttaagtggcatccaagaaagactcaccttaggcaaataaaatagtactttatattttataattttataaatagataatatttaatattagagtgaagtttcggtaacactttcccaaaaaaaccctccaaacaacacacaaatatacagacatctctccataatttgaaaatatctaccaggccccatagccaatatgacaaggaatgcggttgctgaagtttggtctttatacccctcttattaaggtatggaccttaggcatggagcaattaaatgatctggcaatggtcaggcagatgaaagctacagagacagagaagttccaggaaagcatttaaacgaatttactagaaaactaagatgtagttaattaatggatagcccgacaactctgttgtttattttgtcttggatcaaaatcattttctcagctttaaagtcacctcttattttgagacttagtagtaccttctcagtattcacagtggggaagagagatgctctacaatcagtgatggcaaaatcaaatgaacagtgaaatgtgagaagttattttaattgctcaacactccccagacaagggcaagcagaaagatcccaaagatatttgtgtctaaatataagacagtaaaggattttgaacaatatgcttaatacaggaaagctataaaattatggtaatcactgtattcatgggtggccaaatggagagtgaaaatgcatcgctctgtgaaagctggataattgtgagaaatagtggtttgaataggtttacattttaaaatttcctttatattgctttaaaatatctgactgacaatgttatctcaggcaagtcttttcactttgtgcttcagaaaagtgaaagtatatatatattttcccgaagaatattgtcaaaaacattagtgtttgtgggggaaagctgtgacaatatacaaagtacagtataattggttttggttgaaagatagtgaagcttccttcagacaaagggtgattattctatgactccaagcagaacttcctatttcagggtccaaggtgacttgtgaatcctattggaatcacctacaagtggcattttaagaaggcaaattacttcctgtgtgcacagtagaagtagtaggttttaattcagtaatagagccatatactgttagcagcaacgtacaaatcgaactctaagaaaggtacaaaaaaaagagggggggtatgatatagaaaattatttaaattgtgtgacttaaataactaaacgtgtatctcctatgattttatatatatatatatatatatatgttactgtgtggattggtaaccacaaaaccatgtatgctatacttacattggcttttgggaggatttgcaaaggtaattttgactacattcaatttttgcctaaggtatgcaccttagaattgaactacagcagggtgtggtggctcatgcttgtaatcccagcattttgggaggccaagatgagaggattgcttgagttcaggagtttgagaccagcctggcaatacagcaagactttgtctctatttttatttaaaaacaaaacaaaacaaacaaaaactgaactgctacataagaaaagactacagtataatttaacatgtgtctgatgtttatttttgagacggagtcttgctctgtcacccaggctggagtgccatggtgcgatctcagctcactgcaacctctgcctcctgggttcaaacgcctctcctgttccagcctccagagtagctgggattacaggtgtgcaccaccacgcccggctaatttttgtattttgggtaaagatagggtttcaccatgatggccaggctggtctcaaactgctgacttcagtgccgattacattagtgatccaaccgcctcagattagattacattatcgatccaacattagcgatcctcctgccccagcatcccaaagtgctgggattacaggcatgagccaccatgcctgtctgattataaggtttttttcctgaaagctaccttattccagatgatgtatttggatcaaggggcagcaaccttaatctgctgttaatttcaagtcagcttataaagccaaattaatgaaatatccaacgttatgtttttggcatttttggatttctacttactcctgcgtacttggataacttttgttgaggcatatcaaatgcctgagataagagggaattgaggaccacggttcgccaccagaatcacttgctaagctggtgccacagctactttgtagtcccttgggaatgctgaagcttgctggggtggttgtgggtgtctcatttcacctgttgctcaggggtagcattttcatactggcagttacccagtgattgccattcctcttgctgtcctaagtagcaaatcccaaaagctttcagcaggactggacaagggttggtgtacactttgcctgagaaccttcttgcataggtgtggtctttcctggtagtaacacccaccaggtggttttccacagggaggatttctgctgctacctccccatagcagttttcttccaagtacagtcagtatgcactcgagtaaaggacagtaggagcccagcctaggtgagcccaaagaactacagccaagcagggcctgtgctcactcacattaatgttctgctcatctaattttggtattggcatagaaagggggctctgagtgattgcctttctcacgttgctcaggtagaagcagaagatattcatggatttctttttccttcctccctttccctctgatccttcagatttatgaggaatccaagatgaatttggagcaggagaggccgtttgtctgcagtgccccaggctgctcccaggtgagtgtgcggatcctccctgctctgacatgcagggcctgctttccgaaagggaagcaactctcacccggcaatcatgcctgccctgggctttccttctttaccaagacaccaccaaagtccccctccccatcagtatcgtgatcatcatcattttcatcgccatcattatattctgttttgaatggtttgaaatacttccctcttatgccctgaaaggtagcagtgttaggcatttctgccctttacttcctcctggaagcaagccaggtgtatcctgcccaccaaatatgcagggccatcatttcagaaagagggaaggagagtgcttacttttacaaaagccacttgaatatactggctgggcttcgagattactgatgaaatagcttaacaccataggttaaattttattttgttttgttttccaatttgagtaaaaaaaccccaaactccctataactcttctagagtctacagttttcctacgtatgtgaactttaagaggataaattgtcctgctgtgttggattaaatctcttttagcctctgatggcttccatcaagtggaattagtgtgggaattcgaagagatactgctggtagagtgtttaacatagggtctgcacacaatacgagctcaattattgtccactgttgttactactattgctgctgctgctgctactattattatattggaatctatctctttgaaagaaattagaaacattcatcacctaaaatcagagttttgcactttacctttggaaggtgacagtgactttttctactcttgaccctttgggtgtctccacattctagtcattggaaaataactacacgtggttgctgtcatgcctagatcttcattctgtgggatataggacaagtttggaacccagagcacaggggtctttcaggtgtggcgagttacagtctttccctcactctcctgcctgtttatgtggtggggttggcagtagagcatggagcaatgcttagcagtcagatgagagcttgataagaaggattcattgaggacccttctttttttttttttttttttttgagacggagtctcgctctgtcgcccaggctggagtgcagtggtgcgatctctgctcactgcaagctccgcctcccgggttcatgccattctcctgcctcagcctcccaagtagctgggactagaggtgcccgccaccacgcccgggtaattttttgtgtatttttagtagagacggggtttcaccttgttagccagtatggtctcgatctcctgacctcatgatccgcctgcctcggcctcccaaagtgctgggattacaggcgtgagccaccgcgcccggccggacccttcttattaacttccctagagagtttatggaggattctgggagccttttggaaggaagaggccatagaaataaaagacattgttgctggtgttatcaaccactaactgaacaaccagagtcctttgctcaggttctagaagtttcaccaggggctttgtgtcaatgtttatttccaacttataaataagaagagcagtgcaaaaattattttgaagcaaactggtttggagatgattttgaagtagaaaacactaggaaaaaaacagagtgataagtaactggtaaaaatcctgctagaccaggactcttcattgtggatgcagaatgtcactctactaagttactagagtaactaaattagaacttaattcctaaggtagagctgattcccattcagcttctttgaagagaagtcttgatagccaaagggaatcagataatttgagcagtttgctttgctttggtggtgaaaatgtcacattacgtttgattcaactcaaatttctcaacacactttttgggagcctactatgtgtcaggcaatctgattgctctggggaaacagtaatcacaagacatatgtgtccgtgtcctcacagagattctagtttaggaatcaagtctataatcacatgatcagtaaatcagttaattagtcaattgcaattttccatgaaggaaggccataggccaccttgaagagtataatacagggattaagtttacttggggaggtaaatgccagtctccactaaggaaggggcatttaatggaatgggactctccagagacccagcaaaggcaaaagagggttcagggtgagttaggattcccagcaacctccagggttgtgtaggacagtagaggagagtgtttcaaggaaggggctgtaagccatatctaatatttaggtaagtcagagagaagagagctgcacattagtcattagactgtatggcagaattttccaagcttggcaccgttaatatttgggggctggataattctgtgtcttgggtagctgtcctgtgtgttgtacgacgtttagcagtaaccctggcctctacccactagatcccagaagcattccccacttgtgatgaccaaaaatgtttccagacattgccaaatgtcccctgtgggcccacattgcccctggttgagaatgactaccctctgatttgcattttggctttagccttcctttcttttcgatcccttgtctttggggatcatctacttctaatctatgttctcccaaactattttatgtattgctgtaaacccttcttctttttggcaacaggcagggtagaaagaaatgaatgccacagacgtgtggtcactggtgtcaggcaccgctagagctgggacagctagaggcctgggcagaggctgttggctttggcagctgggtgctcgccggcaacctatgagaggggaacgggggcggaggccaaactgcaagggattaatgagtgagtgggtggtgaggaagcggaggtggcaagcatagagaactctttcaagagcactaggcagtgacgggaagcggagtgatataacggtagcctgagaaggaaacagtttttttaaaaattaaaggatagccgagctggagtttgtcaagaacaagaaaccagtgagacagaaggggtgagcatgctggtttacacggctaatccccagaagataaagggtgtagacaaacctggggaggagtgggggtgccaattcctctgagaaaggaagggttggaaagagattcaaggaagtgacttgaaaatgctgaagtagaggtggttaattaaggttgaagggagtccattttgaatgaccttgaacttcttggtgaaggagcaggtcatttccttgagaaggctgaatggactgaggaaatggttggacagacatggaaattgggattgacaaagtttcttgattttaaggaacaattccaagcttcccccacttcagatttaaatgtaaagatgcttctaaaactcgatgtcttcatttaatgtggaagtgtattttttccttgacaagctgttataaaaatatgtgcatttttcaatggaagaggtgttagaattaagaaaatgtagcagtcacccagcagtcacaaaggtctcctgggttattagaaactcacagtcaagccaattgttgtggccatggtgtttactttagggatgtcctacagcctgggaacctgcatggagaagacaggatgactgagaattggaaacgggaataaatataagttatcactgcttgcactgtgctaggggtgaagaaatgatttttttctccttttccctcatgggaaagaaacttagctctgttaggaatggcctataatacgtgggaggtttttttgttttttgtctcgttttgttttgttttgagatggtgttgcactcttgtcgcccaggctggagtgcaatggcacgaccttggctgactgcaacctctgcttcccaggttcaagcgattctcctgcctcagcctcctgagtagctaggattacaggcacttgccaccacgcctggctaatttatttatttttagtagaaatggggttttgccatgttggccaggctggtctcgaactcctgacctcaggtgatccatccgcctcggcttcccaaagtgctgggattacaggcgtgagccaccgtggccacgtgggagattttttatgttaccgtttcttcgacattatctttgtctcagaaggaagagtttctcttgccctttgtaatctcacagagctcagtgttaatttcactctctctttgccttctaaatgaaccacgttctgaattccagtggcctttctcagctctgtctctattgcagactgtatatttttgttatttgcaatttgctgctatgttcctgctgaattaaaaaaaatcacgatgtcctttattgtctcacttggaaggtaattatagtcagtatgtggtattatggaaataattgttatttaagaagtattctggttcatatcctactttaggctattattttataaagtcaaaaaatggcttatagatatgaaatgaaggctattaccatgttgtgtatttttgtatatacaaatatatatataaaatatagtatatttaaaatatagtgtatatataaaatataatatttttatagtatatttgtgttatatacgcatataaaacaaaaattataattagttgtttgacggaaagactaggcaactcagtctctaaatcacacgtggtagtgctatgtatttggtgcagtcattacacagtgttatagaccaaaagaatggatgaaccagtagcaaaaaatcatgtcatataaagcaaacttcagtgtattcagaaatctggcataattaccatgttttgcaaaagccaatgctttccaatttatataatacaaatgacaagtaaataagtgatatttattcagagagctacttttagaatattttgtataattcagcccagggaattccttcattctcatgaatacaaatccatgccatttgcagaaaacatttctaccctagtaaacaaaggtaattaaaacttatattgactatcctgaggaattagaaagctctgaaagatttctaaattgttgaagatttggaaatgttcagcagaatatatcatcctctgttgtattttcatttgacattgataaagcggatattctgttaagttcagttactacaaacataccagtctgaggcaggataggctaggatctgctataataacaaattaccccaaagcttcagtggcttagagcaacaaaggcttatttctattccccaaggatacatttctattgtagattggcaggaagttcttcataatcctttagaattcagaaatgcttttcataatgcctcagagatttaggatgattgggtagccactatttccaatattgctagttgccatgttaaaacaaaggggaagggggaatgctagagtgtcttacaccaggaattagatgctggcccctgggtgacatgtcactttcattcattactcaatgggcagaactagtcacatggcttcatgcaaccacaagagagccagaaaattcagtcccaccatgtgaccagaagtcagacagccaaaaacatttgggagcagcatttttgataaccataatatcattccctgaaaattaaaaataagcattggtttattacattgtacagaacatagaatactaaaaataatttgtcatgttactctaaaatcatatgtgtaatttaaaaatatcagataataggtgggcaaggtcttcataaatggaaatatactgtacagatttcacagttacatttgtagatacatatgtcaaataattaggcatggcatgtaattctttcccaaagtctgacttgaatcacgattctcttctttcatcatgtatatctcctatttttggttaatccatagataatgtctagcatacttatcataccttagacttaacttttacactgttgtgtaaaacattaactacatttgaaaagttccaaatgattttgcaaaattccagtgctactgaggtctaaattcactttcatgttttgcacatggttttctcatatgtataagaagaaatggaaaaattttaactcgtcatgctgccattattagttattcttcatgaccacaaataagcattcatttaaacacttattttttgtaaaatgctgcctacttaggtaggcattaggacacagctcatttttttgtatatatatgttattttaataccttcagtattgttcatttacttcttcctgttttattccttaaatacaaagtttaaagtgcaaacccatagctcctaaagaaatatatagtttagtgattaatcagcatagttggatatatccagggactatctaagaagtagagtgctttcaaaaaaagttcccagggaaggtatagaaggcaaaaattttctgcttattatcagtactcagccagatttttctgcaattgtagttaacccctttggtaaactttaatgaaaattagaatgcatatatttgggtgtaatttaaaggaacatcccagcacatttgcttgcataaaaaagctttgcaacttcacttactcatgctttcacactttttcgaaatgtttttttttttttgttttgcctgtcatgtttgcaatgctaaataagtctttttctcaataatggtaaatatgttttttaaaactgaatggctcctcttctcccctccctttttttttattcgtccgacagcgcttcccaacagaggaccatctgatgattcataggcacaaacatgaaatgactttgaagtttccttcaataaaaacagacaatatgttatcaggtaaggagccatcaggaaaagaagctttgggtgatcagatctgttccatgcgagatacttgttcttcttttggtaggcgagtcccactggtaaattgtgcaccttgaaaatacacatttctaaggtatagcagaaatataatcaggtaatattcacccaagtgactgaagagcggcaacttctcattttctagatatgaaatatgtattactatgcaacttggctctatataagttgttttaaaaatcacatacctggctgggcgctatggctcacacctgtaatcccagcagtttgggaggctgaggtgggcagatcacttgaggtcaggagttcgagtgataccaacctggtcaacatggtgaaaccccatctctacaaaaaatacaaaaattagccgggcatggtgggatgcacctgcaatcccagctacacgggaggctgaggcatgagaatcgcttggacccgggagggggaggttgcagtgagctgagatcatgccactgcactccagcctgggtgacagcaaaactccgtctcaaaaaaaaaaaaaattacatacctgtaatcacactcgagcaacaaatgtgaattgggcatctatgcacgctgcactgttctgtgagccatgggaaatgcaaagatttatattcttcctgtcctcaaggatatcacaatatagcatgcatgtgaaaacttagctaaaataaaggatcatctatgacatacatcagatgagtattttaaggaaaaggtgctatgcaactttggtagaatgagctctctttctggattgagatggtcagtgaaggtgtccttaggaaacaatatctgcctcatatgtgggagattaaatgagagaatgtatggaaacagcaagtgctcagcaaatgtgagcagaaataaataataccaataatccattagctaattgtgatttattctaattttgagaggtagtacggcaaattagaaaaagtgcagggacaggagtgaggaacctgaactctatcctgggctttgccttacctggccatgaccttgagtacttattgaacctttttgggcttcagtttcttttcccaaaaaatgggaatgattgtgtctgccaagcctgtttcacaggcttatgatggagattcagtgaaagaatgtaaggaaaagtgttgcataaaccctaacaggataatcaaatagtttcctgttattcttcttaggctagaaatatttcaccttagcacttctctccttagcacacctatggatatgttttaaatgtattagaagagaaacaaactgtcctgccaggcctggctcatgtaatttagtgtttctatgttactttaattttaaaagtgctttattattacaatattttaaattcttttttactaattttattttaagttctgggaaacatgtgcaggctatcactgttatcaataatcctctaagggttttgtcagacaggttattgtaacccattgttattgacaggggaggaagggcacaggtgatggagcttctgtcccaggctcagaacacagggaaaagatgagggcccttgatcctgcagtcctaacccactaacctgcacacggctactgcatcatcagactttgccactttatagacacggtcagattctcccaatactcccggtgtcggagccacccacacatccagtgacttgttgatagtgccaatgtgctctggcttggaagacaccgagttcaaaggcagcatctgcccttctcttcacccaccactcgccacctctcagcctctgtttgttattgtttttttttttttatgagcttgctctttaaaaattgtttggtctccttttaagtctacaaacagagatggagaaactcaaattcataagaattataacagcctagaaggattaggaaggatggcctattcttttgttttgtatccgttatgttctatagagtcaatgtagtataacttaatggttcatcagtgagcatagatacacaagtagcaaggctgtagattctgcaattcccaatatttaaattcaaaagttctccctttatttttcccaaattggatccctcaaataagctgcctggtggtaaaggagtgggaggtgagtttagggaatgatgattatgtagggagattactactacagtgtaagtaccagacagagcagcctttcaggcaggctgccaggatggtcctctaaggagccccatctgaaggtctgaaaaagagcagctgaagatgtgtgaacactgaaacgaagcattcttctatatagtgcctaaagcaggttttttgggttaatctcttgcagctttgcaattgttcttaccggatccttattaatttgaggctgtccctgccaatcactggcagtgccaggtggaatattatttggggaaaagtaattctaatttttattatgtcaaatttggaatgagaaaatgaagagaaaaacagtatgagtattatattgacatattttcttttgctttctcatggtttatgttgaggttggtgttgaggttggtgtgaggccatttaatactcctaatgaaatgaagtgctaaattttaaaacttgctacctactttgcatgttcttaggttcatagaattttcttactggaagggaatgcagagctatacagtctggttcaatttctttgcacttagagaactctgtgtaatataccaacattgtccatcctgaattataataggctattgtgttgggtatttttactttgttattttttaattttttctccaggaaatccttcagtgtttatttttctcaagccttattttccataaggctaattgtggcatattggattatgattgcatatatgacaagattttacttgactgttgcttgatttatttaaattcaatttatcaaaagcttcagagaatacttttattaaaactatgtttgtaggccaaattagtttgtatttgtattttgtcatactgtccatgatgagttttagtatcttatgagttttagaattagttctcttattttacatgtttatgtgatattataatacttttttttcttaaaagattgctagaactcacactaaagccttctggtcctggaaaacaaacaaacatgctcattaaaattttatttaccttatcatattttgtggcctatcatgaagatgaatgattttatatgacttgtaatatagtagcaacaataataaaaataatgtaaatcaaaatatcagggtaaaaatcttcaagttcctcctagactactttttcaagcaatattcaattacacattttatttcagatgagttgaggctcatcatattttaagaagataaaatataatagatatttgtatgacaaacttcagaatatctggttaacctttattttggaaaattttggaaaatcactttatccttaattagttgtaaatattgtagttggggaaggtgttaagatgtcacagatatactctaagtttccaacgggttgaaagatcagaaataatttcatagctttgtcataaggttcatttcatttaggacaggtagagtcactcccaaaaagtgattgtaaacgatttttgacatgccaccaggtagggtattaaaagtgacagtcctcgtgttttattagaataagccctatcttctgggtagacagtaaacatagaccccttattcaaagggacagagtagagacacaaatggagatgacagtgttggattttgagagcaaagacttgcacaacccttcgcctgggtcttctcatctttatttggtccacgtgatgcatttctagagccctaatgtgatgatagatgtgaatcactctcttcagctgttctcattgtgaaaaaggataatttcatagtaagggaagttgtgatgcagaaggtttttgagtgccaagtttgaagtgggaatgtgtagaggacaatgcacatccataggcagctttcaaaattacaagctattatatgatgcaacgtttggtttgaaaatcatgatcaaatttcagcagagcggtaaagagggtggtgtttgagtctatttccatggtagtacgggtaggaacctaggaatttccaaatcttgtcttgttaaatatccccaccctgagttctttatagggttcctgggttctgtgcaggaaaaaaaaaaaaaaaaaagacccagaatcagaatcaaagtgcaaccttatttatagctgaacagacaagtaatattccaaatgagaattcctattaaaacaaaaattcaaatggagcacatgactttttctccatctccactgtaaatcttgataccagcaagttcagtctttactgtggagagaggttgagacagccctccaaggtagggctgtgtgtgcacatgtgtcctctcatgtgctcacacgtgtgtgtgtgtgacctaatagatgatagattgtgttgcctggagggagaggggaagataaagttcaagagtgttgtggatctttcccgcaaggtaaaacccaattgacatctcatgtgggaagcctaagaaagataagaaagacacacagaaccgtgtgtctttttgttttgttttgagatggagtttcgctctcgttgcccaggctggagtgcaatggcgctatctcagttcactgcaacctctgcttcccgggttcaagtgattttcctgcctcagcctcctgactagctgggattacaggcgtgcaccaccacactcggctaattttgcatttttagtagaaatggggtttcttgatgtatgtcaggctggtctcgaactctcaacctcaggtgatctgccccgcttggcctcccaaagtgctgggattacaggcgtgagccacagcacccggccaactgtgtgtctttcaaatgccttggtagcctacctgctgacgtcatggcccagctaatgctataggcaactggtctgtgcttggatggaagttagggcaggcaccagtcaaggtgtaggaaaaggggctgaagttgcccttctacagccatgtgattcattcattcagcaaacactcactgagtgcctacaataagtgttaattgctgcgttgaacaagacaggtgaggtctcttttttcatgaaacttactactcaagtggggtgcagaggaagggagataataaataacaacaaaaaacccagataagtaaataagtatcagttagtgacaagtgctatgatgaagataaaacatgactgtgatggcaagtggccagcaggaagcggggtcaggaaaggcctctgggtactttatgctcaggtgtcctttctccctgaccgctggatgtggtgggactggatgtgggtaagaccacaagcccacgtgtggcacagctgactatatcttgagctgacgctgaagagaggcaggaaagactggcttctttatcccgtcttcctttattcatcagattctcagcactcaccatttgatagaaagcatctaacataaatgacaatatagtccttcagaacccaactgtgtccctggattaggtctataatcagggcccatctctagttccaggctctaaacctgattctcaccatggagaaggcaagaaagtaattcagggaagtaaaacatttgtcctcaagaggctaatcatgatcatccaatcacagaactgagatccattgctcatggttctttgctagaagagtctacttaataatccctgggcattttaagggggaagctggagggaagatggcgtatctcactccaaattcttttttagaacgagttagggtattgtaaaaactgagtaaataaatcacacgcacacacacacgtgacccatacttacctcttcttcttggcaattccattgatagtaaaggtatatagtaacttcccaccgtgtgtattaattggatctttatggagcagagggtgggggagatggcttgcaccagagggcagcatggtaataatactagctaccatttactgccttcccttataccagtcattgcgccctgtgctttacatacattaggtcatttaatccttaccactttttttttcatatgaggaaataagatcaaaggaataagtagtttgctcaaagtccatatatgtctgtaattttcctaccatacacctagatgtgtgagctgtacatactaagaacacattttggtctcagttgtatgtttggatataaatctctgaactactttttcttatattattggtatctctttaatagtcatccaatggagaaaataatcaaaagtttttaggagattcttctaacacataagcattgaaaagaacaaagagttgtggtttaaaatcagattgtctcatccattgtgacaaatagaatgtaagtgttactggcatttataggagttgtccgtttctcgtccgtattcttagctggtcaagcaaaatggaattttgaataattcccctgaatcctttggaggccttgctctgcagtattcttttttatatgaaaagcttgcttgctgtcttcgttctgtctggaaaccagtcccctttgactaagagtataggagaactcaggcaatcagggactcagtggaaagttaagcattagcttctgctattcagggcaatttttgataataaaatcaccttgggtcccctagctcactcggccagcagagacttgatctcttggtgttaataacccttcttactagcttagcctcagtaatgcaaattgaaattgtggcttgattgcagttggaacacttggggtagctcatggttgatcgtgagtaggtgtggaatatataattggttactttaaaactatgtcttttggagctagttgagcatgcgttgtaagagacacctttgtcagagcattgtctaatggactcacaggcacttggaagagcatctagtcccacagttgtctatcttggcaatgaatggatcccagtatatgagtcaagagtgtaagagggtgttccatctccccactgacctggatcaccctggccaggatggtttttaagcattccatgtctgttgcttaaaaaccaggtctgccttggtttgtcccattgtagcactgcctttcaggacagatgcagggaaacagtaacatcagtgttactgagagactcctattatatattcacactcaataaaaggcacatttgttgcaaagaagtctaaaattccatggaattctgtgtgttgtgattgattatcgatcttacaaatgattatgtgtattaaaattcatttaatgtaaattttcttaaattagggctctattaaaatttagatagggactaagttggaatattttaaagaaagcatttgctgaaatatttatgagataaatgtaaccaaaaaaaaatatgaaaagtacctaagaaaaatacctttttagataactctaactcttactaaaatagatatactaattccaatatttttctccactgatttgaatagccctcttgaggaatcctattaggccacctttttgtttggttgaatctgagtcatgcaaataataaaaatgcattgcctttaaagaatatcctgtaattagactggccgctaattcagactaacctttattgtaactaatgaggctttttatagtatttctagccactatcagtttcatgccatatgatgtaacattattttcacagtcctttagtaataccatagttgagaatatcagaccaataggaaagaaaattttgcttaggaagttaatattattttctggtatgtgatgggacccctgcattttcccttcttttcttttttaaattggtgatttgtcactttgacttttttaaccattgaggaaaatgaaacagaaaaacacataatacaaatgcagctctgaaagggagtaaggtagcaatcaattattaaatgtagagcagactaaatgctttttaaaagaagaatcagatttcagaatttagcatttttcttgtcatttagttttactttggaataattgcacttgctgggctgaagctcttgatgctaggcagactatgaactgataggaagcgctaagagtcgcatatgcattgagccgtatgcttgtctgcccagctgataatgtgactgattgggtaattcctaattcgtaaggccaagtttgtagcaatctgctggatcgatccacaagtagtctcagcaaggcaagtatcctgtacctaccaatttacagaggcagtgattccatgatttggaaattgtgtcatataatttgattggtaattgataatcctaacaactttcggttcttttgaaatattttggaatcattcatatccctcaccaatagaactgcattacaatcctactgactctctcctatcttaaaggaacagttttgcaattaaaatacctgagaaaaatcacataagataacagaaatattagactacccatcatcagtgggaattgagtttgccagtttttaatcttccttttatccctttatgcttctttgcttgagatttagaaattgagggccatgattcatagagaggtaaagagaacagtcatcctagcagcctctctcagactcctgaactctgagatgaggtcatgagatggtccatgaaattgaattcaggctggcatgtgagagcccaagccccaagcacgttgagcgatgttttctgtctgctcttaaaaaagattgttcccagataccagcacacacctacacacatgaacaaaggaggttgcgggaggatggcataggcatgggattgacacagtccagcatcaccagcctcttcagccatggagaaatgaaagctccggggccaggggagccacagactgcaaagacaactgcttccctcccacccccagagcagaaggaccagaaaaaggtcccagggctgttaccaaatgtgattttctttgctgtaggatatagttagagaaaagcaaagtcgatacccacatttggaatagataaggcacactgtcccaaattttaaattcattttctttttgtgagtgagctattctttccagttacaacaagaaccagaaaatggggcttaacttttgttttaacatttatgagaattaatacaaggtctctagttatctttgatctcacacggtaccagttccaagtaagccagaaaatgtgcagatgttaaaaaaaggggacagctaaatctatcaacacacgaatgccttgtcaaataactatttctgctgaaattagacctgaagatggtgtgcaatctccatggccataaattaaaattcttgtaaatcacaccttatttagagccaagaacaggcaccagtcagctccagccccagtgatttctagatcctgaataataatggcggatgctccattggtgcataatatctaaggtgtgctcattgagtattgataggaggcccttggggggtttacaggagctggtttcaataagaacttaaagccaagacgattgtttcaggccttccactcactgttcttttagtgcttcaactacagtgaggaccctctgaatgagagaagggaataaacccatctcaaaccaaactaaaaacaagtaacttttgagtttgagagttgaaagttttttttgttgttactgcttttgtaaatctgaagtggcgctgcataaacacccgtgtgttaccctctccagagagtttgcaaatagcacaccaggttcccaggagacctaagcaccagggcaagtgcgagtaggaactgttacccactcctctcactgtcttgcatatccttggggatttctttgacaagaaagattggcaccaaaaggagtttaaaaaaacctcctttgcaacgtttgtcatatttcagtatctggttcccttggtgagttggtttgctgaaaaaaaggagtgtcttttcatggaatcactacctctgtaaattggttggtacaggatacttgccttgctgagactacttgtggatcgatccagcagagtgctacaaacttggccttatgaattaggaattaccccatcagtcacattatcaggcctggggcaggtctcagtttcttcatatgtaaaccaggaaaaataatttttacataatatggttggtgtaaaaactaatgagatgctgtatgcaaagcacttagcagaatatgtgctcatgcacgtgcacacacacgcacacacacacacatgcacacacgcacgcacacacgcacatacacccttttactttcactctcagatcttgtccatacactttctattcagaaaactcctttatctatatagccagcccttgcctctgacctgttagtatcaaacttccagctgttacttatgttcccatttgactgtcctttagtcacatatttcttcgggctatgaacagtgactttttaaagctaacccattatggtggtgattttaggatttataggatcatacaactttagaaatttttttgaaagatgaggaatatgaagtccagagaatgtaggtaaattcccccatattacagtattctcaaatctagatttctgggttgttgaaattgttttctacacacacaacagagccctttggatcagggagggcaaagcattgaatttagatcaaaaagggatagtgtctgaaggtaagagaggacttagtagtgataagatggttacaaattgtgtaaccttgtgcaaggaagctcgtttcttcatttataaaatagtatcgactcttgttacctcatagaatcatgcgagatctagattctagacaatatgagtgaaaatgttaattgcaaaatcctgcataaatattaattttgtcttctataaacacacaatagttatatgtgtatattagggacctaggtgtatatgtgtgcctcttaataaataaattagttgctaataaaacaatattcaacaaaacccactctttcacacatcccttatctgtaatgccgaatttacgaacagctgtggtatgctctctgtgaaatgcaaggagctcagtatcttggagattaggtcaagaatgggaaaaaatgcagatggggattttgctgcatggaatccaagtcagccatttgggtgctgaaagttgcttgcccagagggaatcaagagacattgcctctaaagggctgattcggtgggggatattacaccattttctgcttcatgggtattaagatattctttgaatcagacaatttactgatttactgggcttaactattctctgtatgatttagaaaagtaaatataattctagtttcttataatataggaatttataaagagaatgcaggaatggcaaatttgtttcaacttgagggcacctcttcagttgactggttaatggcttagagaactatgcagagattttgagacagtctagatcaagctgggaaaatgccataattaatctaatccagtctactacagggttaggtgggaataatacatgtacacagtggaaatagcattgaggccttggttataatcctgttgtctctaccatttatctgggagaccttaagcaagactgttaattactctgggcctctgtttttctgatctgcaaaaatttagcatggctaggctttcttccgtggtcctttctgcttctaatatctcctgtttctgagaaaagaccatttacacaattttatttgtctcaactcaagtacaccttcaccaaggaagatgattgcactcaatgacgatggaagtgcaattctactctacttaccttctatttaatggaatcttgtgagatctagattctcaagaattgtatgaaaatactttataaactgcaaatgctgcatatatattaagctacaaatagtggcttcagctccatcagttttataagtagaaagctctgtagaaagtaaaaaatatgaaagaaattcttttccttttaaagagcatttgcagaacattctttttttggctatagcaaaggaaaataaaattaataatgacatttttaaaggatgaaagctgaatgtgtttgacttggaactttttatcatccttctatgattttcagaaagagagacagaattgttaagttttctttctccattaagaaaaatgaattaacatgcttgtttgtttctttttgtttactataagaatttgcaaaatcctttttctttccagccccctgaagtcaggcttaacattgggtcagatttttttttggccttattttagcaaaatcattttctttttaaagttcaaaataaatatagaaagaaaaagggtcattccacatgtttcaatgtgtattcaaatggtacagacttcagacaagtggagagtgagatctcctgaagttgtctggagggagttcagcaaaagccctcgcagactacagccttctgtctactgtattcctgcttcggaatttacggttttattttcttgcatatcgttatgttatttaaagggccaagagactggatggctagtggacattttaattaaggcaaggggaggggattagtgaatctagctcatgcttgctactggcttttgagaaaaaagacccatttatgagctctccgactctgttttcagatcaaactccgaccccaacgagattcctgaagaactgcgaggaggtgggcctcttcagcgagctggactgctccctggagcacgagttcaggaaggctcaggaagaggagagcagcaagcgggtaggtttgcttggatggccgccttgagaggtgtcctgctagaaacttccacgaggaaactaggtggcactgcactgcagattgtgttgatgtggccttgaagtattttagccatttgtgagtatttgtctaattttttttaaaagattactccttgattatggcagaattcaaagctagataaatcaaaaatttagtcaaacttacagattttttctattctcaatcagctgttttactttgctaagtatttaatagcaaaccttttgtgagcagtgagtgcagaagaatagagccaatgggtgagagaacaggcgagtaatcttcatggtagaagaggggatttcatcagactttggcccatgttgtaactgtctgttttcgataatctttccagtcattctgcaccaaattcataattatttcctggtcatattaccttgttctagtattgaacatctgttgttgctgagacaaataagttgagtacaactgtgaatcatttgttcttaaaaatgtaggaaaatcattttgtgaaacccttaagaatatattcggtgtttatgggaatgtgctgaaatttaaaatcactttacaagaataatgaaaggagatggtggtcacaagtcaatgtgatgaggatgctttttggtattttgttcattgttattatacagcattattgaatgcccacattgtattaagaaacaaattagatacagtctgtgaacagaaattcaaaatgtgaaaggtgattgaaaggaaagaccagttaggtagtaatgaattctgaagtccagctgttccatccggaaaagaaattttaaaaggttctgatatttctctaagtgtttcaaagccttttagtccttgtctatgtgaaattataataatcccccctccaccagatttttcctgtcacattctcatgtcataatagtcaagggcttgtatttagcctgtatggcttcaggagaaaccatgaaaataagtgatgcttacaagaggggtacaaaatctcagtcaactcgttttacttatttataattaatttatcatgcatgcttgactctctcctccactccccctcaaaggatatgaagtgccttttttcttttttaaacaagcacttacatagcaactattatttgccagccaaataataaggttctgagcactttaaaaaattaacttaataaaaataaaagacatgcattctatattttgttgcaatagaaatgtatatgtatatatatttaaaaccataaaaatagcatgcaagagaggaagaaattctcatcatctagtcaacttcctttggttgagtaataaattttttttttgatagacatgtgtatgtagaagactaaggaattaagttcattcattcctcaagatagtcaaagctggcttcttaaactgaactataagaaagatgtgtatttcatccatattgtcttcatttctgatagaatggttttacctcaagtgtgtgcccttgattttactaaagacatttttccaagaacagtttcgtgaagcccgtggtcggggtgtggttttagatattctccattgcattattcatgatttcttatatgaagccctgtgtgaggaaattcttgcagatctgaattccaggaaatggtttgcttcccctgaggaactgaaatatttttctccttatggacatgagaatcatgtaactggttctgtttctcttttcgctttgactgccaggttaacacaaagccaagtttactgctaaactttgaaaaccttttcgaacattgtgacgagcatattttacttcctccctagaccagactttcagttctagtttatattttctctggttctgatttttaatttaaaaaacattgtcatgctatacatgtttcgtgagttgctttaaatttcttgtgggttgaaaaagagtatagataattaaattttaaaaattaaaataattaagcaaccaaagtaagaaaaggaactattgcagctgtagaaacatgttattttctctcttttaagtgttgctcatagccatgtgatgctttcatgataggtgtgtgggtggggaacggccagcctccccatggtctagggccagcatctcaggacaccgccgtctcatgcctcagcctcacttgcacgcatgggaagctggacaatattcaggctgttgaggcttcttcttcctttgcctcattcaaaccagaggggccaaatccagcctcaggtggccatggttacacgagagggcattgtcttgagggctaaaccacaatgactcctctggcagcaaagacggctgtgttggtggctttggctctggcatttctttggaagtcacagggcagggaaatgaggagtaggaataatgctcccccgcctgacaatattcttttacctacccctttgaccaggtttttccagctgtcaacatccttggcatcctgccaccccagctcttctttccctgcttaaaaagcagaaacacaggttcttattcagtgcctatcttatcattttttagtattcttttctttttccttttggtctacattctgacaattatttctttttaattctacatctctagttgtcttctgatttcttttcctctgagtctttagacttgcattggttccctcattaggttttagtaaagtggaagatggattaatttatctggagaatttggctaaagaaagttcttgcttgaactttctatgtgtcttacacaaaaaatattggaaagattggactggttctgcacaccacctttaaaacttctagctgcagttggtctagaaaattctgttaaagagcaaatagagaattgatccttacttgacccatgtggctgtccattggggaaaagtctgttgtacagactctgtctctaatcccagcatccttttccagaagcatcccaatgtgtatatagaatcagcgcaggctgtaagcaggttatgtccactggagaaagccctcattatctgtattaatactatacatagcagacaacacgttccataatagcctcaatttccatattaatagaagcttataacctcataaatctttaataagagaattgtttccccttagaaaagcatgttgtaattcactatcaggtatcataaatgtcaacttgccaatggcttagaactcagactagttcatatcctgaaatatataagaaattttgttcatcatttttcattcaagaaacattttcaagtgcccaccacatggcaggcactgtccaaggcattgttgaatataccactgaataaagatgataaaaaacaaacaaaaatacctgccttcaggtagtttacctctagggggcaagagaaacaataaatatgtgaaaaaaaaatctataacatgtcagatggtgataagtgtgatggagaaaggaatagcagggaaggggcacagggcatgctgcgggtggtcaggcaggcattgatggttagtagatgtgcaagcagagacccaaagtgggaggaggtctgaaccaggtacgtactggggagaagaatgtttcaagctgaaagcacataagtgcaaaggcctgaggctggagggtgctctgtgtgttggaggaattacaaagagacccaaggcgggtgtaataaggctagagatccgggtctgggagggcagatcctgggaggccttgtaaaggggctttggcttcaactgagtgagatgggaaactataggacaattttttgggctttttttgagacaggttcttactctgttgcccaggctggagcgcagtggtgcaatctcagctcactgcagcctcgacctcttgggctcagttgatcctcccacctcagcctcccaagtagctgggactacaggtacccaccaccatgcccggctcatttttcatattttttgtaatgatggggtttcaccgtgttgcccaggccggtctcaaactcctggactcaagtgatctgcccgcctcagcctcccaaagtgctgggattaccggcgtgagccactgtgcccagccaggacagttttgagcagaaaagtgagaggatttgacttacatcttaggaagatcactttggctgctgagttgaaagcaaactatcgaagagcagtggctgagagagagaccagttgagacggtattgaaagaatttagattagagatgatagcaggttggctcaaggtggagatggaggcagtggatagattctggatacattttgaagagagagccaacaggatttgctgatggtttagattgggaagtaatagaagcagcaaaaccaaggatgaacccgggtatttggcttgagcaactggaaggatgggattgcctgtgggaggagtgggtttaaggggaaaattgggggtttctttttagatttgctaagtggagatgctggaccagcagatggatatataggtttggaattcaagggagaagaccagcctggagatgcagatttgggagtcactaatgtagaaacggtgtttatgtacttgagattgggtggagtcacctgagccagaagtgaatagagatgaagtagagaggtctgagcatgagctgggcggaatcttccagaattctctgacacagaggattgcactcccctccgtggtcagagacgacgcaggagaccatgaggtatgaagaatgaaatcaagtagggaagcccagccctagcagacatgttgaatggacaactggcatgttgattttgtgttccatgttagaggaaagaaaaacaaaaatatttttaaaaacagaaaaagaaaaaaagaggtgtgtgaattttccttttatgtttaatgacttaaaaaagaaattgcataatacacatctaggagatgggaaatagatttatcatataataactgtgtgtgtgtgtgtgtgtgtatgtgtgtgtgtgtaaggaaggacgggtaattgaagggactagaaatgaactcctttgtcctgctaagagaaacataacattacagcctaaagtggttaaagaccctgaagatgaaaagtgtggtgtataagtgctaagtgttgttattctcccataggacctaaatcggactcattatgctgatgcagcaataggaaattaggacatttccatgctctagaattcctaccaaaatgattaaaagtgaagtccatccccagagagtattgactgtttaacacatggaacaagggacaagctacagtcttaagatcttggatcccagctcaacaggagtcacagaacagggcatggtggggtcagcctcagctccgcaaagcaggctgtttaatctgattaaattctgtacctggaaatcatgttacccgatgccacccattacttggggcaagaaggtgcggaaggagaggcactttgccttcttacactatcttgtgcccatcagccgctagccagcatcgctgctctgtggggaaggtatgagtggtgctggatggaaaataaaagatgccaagttgagcaaacttgcaacagctgcacatttccggttatgctaacatgttgcttctctgatatttgtgtaaaacaatccttccctccccccagaagtatggagaaaaagaatattctgaaacctaaacttggttttatccaggttttgaaaatgtccccgtgtttgcttaatcctagtagatgaggctgcttttgatcttttcattttttttttttatcagcatgactgaaaggaaacactcattgacagtgatattggagatgacaacctctttcttccaccaccccaatgactgaaaaccctaaggcttatattataaggattctttttgtcctcccatttcagtgcactacaaatgtaaatcacgttcaactttctccttgcaggttaaaattatgccctcatcttaggtggaatttgacgctggaagggaatttgacttgatctttgcatcccactcaggggaatgactaaaccagtggataaactggaagctatttcatgtgttttaggtcactaggatttaggaataatgagtacaatcttagcagggattattaagagttggtatttacttccacatatgtgaatgaatgtgatctcaggttctgcttcaactttaaaatggagtggagttcttttcaactcataggagttcatttttggtttgtttttgggttttttggtgaaaagacagggtatcctgaaagtagcaatatacatagtctattgtcttgcaaagagtggacacttaatattaagtgttcgatgtagatgatgagagcagctcaggaagctgacagcttagaggaatactggctaagatggtgacagatatttgttcatcatctcccttggcgagtttgcatattcgggttatttggatcttaattgatgaatccttacaagctaattttcacagtaaagaaaaaaagtattttatcttttgcgactggggacttgattttgagtgcttgattatttggcagctggtggctctgtcttcaaccagtgttaacaggcaaagtgaaggggggaggtggttgtgacagtaatttcagacgaatgtctcctagcctgtggcagctttcattgttctctgagttcagtattaattatttaaattatttatcacaggttttatttgttttatttattttttattttttggagatagagtcttactctgtggcccaggctggagtgcagtggcgccatctcggctcactgcaagctccgcctcccgggttcacgccattctcctgcctcagcctccagagtagctgggactacaggcgccggccactactcctggctaattttttgtatttttagtagagacgggatttcaccgtgttagtcaggatggtctcaatctcggacctcgtgatccgcccgcctcggcctcccaaagtgctgggattacaggcgtgagccaccgcgcctggcctatcacaggttttatttatatttgctatgacaggacatttgttctggcaagatagaagtctctgtctgatgtcttcttgagaactggcccaaggttttcagaggctggagtctgaattagaaaggttgcgcattcatgtcatgcctgtggcgggtgttatcggaggtgctaatgtctcccttgaagctacagagtaggagggactggagaatgcttggaccctattttatttccatcatgatgattgctagggaagctggacgttaattttgggaaagactattgtgttggaaatattgcagagtaaaatagtgttttcttgcaccagcatttcctgttcagttgtgactggggatggtaacaatcaaaggacttacatattcataaagcatattcatgtccacatatggacatgaattaatgtccattaaatatactattaatgataatttgatttgggcctcttcagttaactgggaataattataagtggttatactagtaatagttttctccattggaaatgcagagaaataaactgtcaagagagacaaaaagggagccagtggtttatgtggaccgtcttggcctttctctgacctctctgggtgtccagctctgcctccctgtcttttggatgtatccactcttaggtggattttgtttacaccttctcttcagaaaacccatacattctcatagcttaagagtcaagtccacccagacaattcctttatcgtacatctagcccttgcattggcataaatattggtctctagcctctagctgttactgatgttcccattgaacataccactgctattcctcactcaacatgccggaaaccatacccagggctttcccatacaaactcaccaccatgcccgactcccctggttctgttagaggcatgtttcaccctcccactctgggactcagctccctccctaccctctttcgttccactccttaggtccaatcaaatttctttagacacagtcctcagatcttccctttattttccgtttctattacctcaagcctagaccattcttacttcgtactgggttattgctgcgaattctaagaaggctatatgacctttaacataactttaaagagatacctagtaataagtattattgtaataattattattgtaaaattgaatgcatttaaaaaaaaacaaaaactaacagaaatgtttaaagtaaaaatatatatatatatgaccaggtgtggtggcttatacctgaaatctgagctctctgggaggcctcggggtgagaggatcacttgagctcaggagtttaagattagccttggcaacataatgagacctcttctgtattaaaaatgaaaataaaaaaattatccagggttggtggcccacacctgtagtcccagctgcttgggaggctgaggcaggagggttgcttgagcccaggtgttcaaggctgcagagaactgtgatcgcaccactgtactcgactgagtgacagagcgacaccttgtattttttttaaaaaaaaagtaaagaaaacaattgttcttgaagctgtttgccttttctttgtggttaaaggaaaagttcctccaaatattatcattgttaaaaattagagagatcggtgtgggacatagtgggtataaaaaggggatagtttggaaattttataaacacagcctcatgctgtattttactacagcaacatgtggtcagttaatcctggtgctacaacattgggactgaagtgggggcaataaatgaccgaaaaaagaaacccaaaacagccaaaaccacagtgcagccctgaagctccgcaggcaccgccctcagctcagctgcagcctgtaagggccacttctttggcccgccctgccctcccatcaggcagccttactgcagctgaaaatcagtccaagtggattctagtggttgggatgatcctcactaaaacaattaggaagctccgccttaaggtctggggaaaaggtagcttttcccagcagggaactttctcatcagggtgattgttttaaattccaggttgggtcgggtactcagcttgtttaaatcgcttcttacctgtcccaaggcaggcaagccaggctgcaatttcaaggtattaacccaaatggaatcacaacatcgaatggacactctcctccgaatgaatccatttccagctgtgagtaattcaggatttctgacgtgccagacaggcacacagagtggggtgtgtacctgggctcaggaggcccttgcatctgcagaggaagctcacgctgtcctccgcgaggccctgcattaatactcccaaaggcatgcaggaaaacagatctgttttctgggccagattaaaagtaaatgactaaaagatgaagcttccgttctaggcagaaaacagcattcacatttggaaaactggaccaaatgatagactcagcatctgtagctaagttacttacctgggcccctcacagagacgtgaaaaaaactgacattgtaaaaagaggaaaggaaaataatataatagttgcaagaaactgtctctgcctccatcatctcataaatccaggtgaacattaagtacggcttggagcaggtatgggagtgatttactctgagaactctgctccagcatttgtgtgttgttaagttatttccatactgaaaagtctgaggccagaactgggattccgagcattcctcccatctgcatttccagcacgttggctgtcaactcaaacctgtggtacgatgactgattttagtatcagaaccatgcagggccatttcccttgttcttcacccaagtcccaccaaagtccaaagacttaggaaagttgatcaaacggtggattttcccccctgaattactggtacctatgttcatgtactttttggaactagttgttctggtgagccaggtggggcttacaagccggttgggttggtgaggaggctaggctgttttctttgggtggccacgcacctcctgtctgcagtggaatatctgtcgcaggcttctctgcttgactgttgttaggtttccctctgtgctttgctttctgggatagtcaaagctattgttcagtttgttagaacttgtgactctgttctgtgtgaccagtccagtcctcttgtttggttctcgggtgaagcagaattccaaaaggactttactttcagcatctcctctaagcacaaatttgctaatagaactcacttgctgctggcaggatgagaccggtgtgtatgatgacattttgtaagacaacattcgagctattattcgagagttttgaagctagaagaaggctgtcccacctgcaagctttcccttcattgtctggtgctgagggtgggggagcagcttgcttcccagtcctctctgtaaaatgaggacttcatattttggatttagtgtggctgcagccagcggagcccttgagatctgaggtatgtgcagaatacaccatctgttctaagaaaactttgaaagttaatcatagtgctgaccgaatcctgcctgagttggtgctgggcacagcctttttctggggctttatgtttgggtgggggtttattcaggctctgcaagcagtcacttccccaaagaagaaaagcagtcgtgttttgtgtgaatgtcaggctgattgactacaggtgatgcagcactgggcatttttgaatcacagcctctctcaaagaagtcgtccccttcctgccttctcccagcatgatttgttatgcacagagcttaggaactttcccagaggatttatgaacataaggttattgctgaatttgttggcatggttggcccaggcattcctgtccattgctctctaaccagagcaacaagcctttggataaggaagcctgggcttctcagtgctctagaatgtggtgggcatgcgagtcccacccttgtaaccccacttggttggtctccaaatggctagagggaaacaagatggcccagaattctggcaacccctttctcagtgtgtcgtgcccaagagctcttccccatgctgccaggccacctgaaagtggcctccaaacacttcctgtgcgatccacactccccccatgtggattgtgaggatgtgacttggagtgtggtctgaactcaggacgagggcaagaagtcagctccattccatcgctctctaaaagtcacacatgactttattttctcactggtaaaatgggccttttgacaactttgaagttctaaacacaggaagttagaatacatcaagatctgaagaattgacattaaaactggttcctaggtaggggttgttagattcatacatcactagagcatctcactttgaacattctttctgatgttgactacaagaagtgtccaaaaagcgagcaggaaacaggaatccaaactccacgttcacagagacaattacaccgttgtgacattgctgcctggaagaggcgtctttttcctgcatgtcagcagtaaggaaataattccttgatccagatctctgctagatttttttctttatttgtattacaacaatacatgtgtatatgttttaggcacatgtattacaacatacatgtgtatatgttttaggcaaagttgggaattcagactttgggaacaatttcatgccaatttctgggaagttctggcagacattctgattatacctaaattgcttataatgttcaatccaacaccagctttaacagataattgctatcaaagtataactacctgctgccctttgattttgaagatggcgtcactgatttacccataagctggaggtgaacttagagttgatttacccttggtggtaatgggtttgcacaaatctaaacacacgtgccctcccatagacttccttgcaaccagaggcacatattgtaagacagctggccagggccaggggtgcagtctgtgatggtgggagagaggcactactttgacctcattaaagtagtccttctaattgaatgcgacagtcatagaccacaactgctcagtgctgcacttatacaatgtactggtgtatttcgcaggaaaaacatctgttaataacactgacggaatattcccagcattattttctcttctattttacattttgctcttcttaaatttgattgctttttggcaaaatctcaggatgccaaacaaacataaccaaatcacgtaacagtggtttgttgttataaaaaagcattgagagctcacatatgtgcattaaaccaaactgaaaatggacaagaactcataaagaaggacatgtgtgtctctgatttttgcacatgagttggtgttagaagggaaaataggaatggtgctttggtgtgtgctaggaatggcttgaaaggaactgatccactaaaatactttgtttagttgcatcgtggtatgggttcagctcatccgcctggattactggcttttcatcaaaggctaagtaggtactacttcaatagagccgtgttccttcagtatgaactagctgactcaggtcagtttttaaacatcagtttataacttgctatgctcacacacttatgccaacttcctccttcgtagttgtctccgcatcctcctgcctcaggcttttgggaggcctcttccctttcacatttgtcactgagaccatttgacatattagccagttggggcatgaggtccaaacaagaattactcatatttgcattctcctttcctatccgtggaaaagaagagaccaagtctgatttctgaagtgatccccacttcctgcaactccctggcagaggtaacttgctcctagggccaaatccccttcccaacggctgtttggtgattctgtgtcactgggctgactgtaaaatcaggcatatccttttaattacctgttcatatttcagcaatgccgagctctgtggcacagagagaggggataaaccttcattgtaaaggatttttagaaagactatctctgagataagagttctaaatcttggcagtctcttcagagcacacactttgtgattgcacacaaattcttggctccccagagccgtgttgtaaatggagcacagtgtacagggttgggtaataagatactgcagatacattttagagcaaggtgcacttttgctttatttatgaagatagacaggctggttgagggcttaatcacagctgataaatcattttaagaaagcctattagaaccatatgctgatttttttgcattaatatagtgtgtctgtttccagtctaataagacagggtttttttctcctgtgctctgggtctctccagtgtagactatttatctgtttaagtggtatcacttgtgtgggggcagtctctccttaagaggtaccattaataaaggcaaaagaaaagggggaggcaaaaatgagccaaggcacccattgcacagtgcatgtgtgtgtgtgggcatgcaagtgtgcctgtgcacgtgtgtataagtgtgtgtgtgtgtttatggtattacaaaggaaagagtaaaaaagctgagaacaggaaacatctcaattagagtttcggaaggccgtggattggtcttcacttggcataaggtagtcatttcagcccaggtggttataatactgtaggaaaagattatctgaagttggaagagggtgtgcactgacattttggttacctcacttctccccaggctcgcggaggtctgccccaagaacaggtcccaaggctctttaatgagagccacattggagctccgactctgagccaagctctgtttatcactaattgcaggggtgccttgcagatcttttctattatttcctgattatacccctgctctttttattatcttgccaaaattcaaacagtaataattgcatgatttattgtttatttataacccttctactgcttcaatccctgtatttaatagattttaaaacagcaaatagctcttactaaccttctacagggaagtcatgtatatgccaatcttacttggcattcttcaaaccacttccatggtacttctgcacaatacggtgtctctgaccagatacagaagggctgtttttaagtgcacagagagtttgtgtgccaggagaatgtgttaggaaaggatattaatttatcctataggattacgttgagttatgttaatatgacttctagtctttccaactcacactttccaagagagagataaatgaaaagcctgttttatacacatttagacatagtggggaaatataacatcacattattaaaattgagattataaactagtaataataaaattcaccatcattccttgggctcctactatttgtcaggtgccgttctagaagttttgtttatattatccccgttcatcatagcaatcctagaagatagatgtttttgcccccattttacacaatgagaagttaaagcttaagagtttaaataatttgctgaaagtcatgaagctagtaagttgcagattgagtatataggactgtctgctgggaaattagtgtgtttcccgctacttcagatgcttcttcctgtctttcgttgtgtgcatatgcattttaatataatttacttgaaaaaatgtccggtggaagcttttgcagaacatcaagccatgcttgaccttgacaaacacatgaaaatatcttgactgcactgactatatcctgctctttgtttttttttttttttttttttctgaggtggagtctcactccgtcgcccagcctggagtgcaatggcacaatctctgctgaccacaacctccgcctcccaggttcaagcaatcctcttgcctcagcctcccaagtagctgggattataggcatgtgccaccatgcccggctaatttttttgtatttttagtagagatggggtgtcaccatgtcggccaggctggtctcgaactcctgacctcaagtgatccgcctgcctcagcctcccaaagtgctgggattacaggtgtgaggccaccgtgcctggctataccttgtcttttaaaagtccttcgtaaggcttctgttgagcttcgtcttagctctggatttgcccacattctgcagatgtggctagagacagcgtggctggccctgaaacctagcaatgaaaggtagcttgctctttcttcgtaatgcacttttcaatgccaccaaaggcatgtaacccaccacgactgctctgctcaccaagatgcgtaattccagttcccaaccaagcatgggaatcctctcatctccagagttctgtgagagacatccactcgctgtgaggtgttttgttctgtgcctggttgtacagactgccaccatcctagagtaaaatgaacatttggtgagtgaagaggtatttggaacctatattagattctaaaagaccaatgtctgcttgaatgactgccttgaggaaagcacgcttgggtgagcactgccctgggtctcttagggcataaccttgggattcagggagttgctatgccatcacttttgggtgtcataggagttttggcagtgggataaagattaattactggtatataagccgtgctatgtattaatttgtttaaatgttggctcttaaaggaaactgccacacaccctccctatacctatgcccagcttctaccactgggaatactcccattatgttctcccaattcaatcgaaaaacgtttattgaggtcttaatgtgtcccaggtgctgtgctagttgggtcaggagccaaggctacattctattagaggaactgctagtgatataaaggaaagtttggcttttttgatgggtcctaaactcttctgggatcgtgtgtacagtagaaacagcattggtggtggctactcagtttagctgggtattcttcatgctctgaccccaacttaattttccagttttctttctcatttgtctctcatgtcttttctgctcaggaaaatgaaataagccatcctccctgaaactgctctgtggcttcaccaccttgctgtgcttgcccatgcagttatttcctcttgcaaggtcttcttccctcatctttgaccgaatctaatccacgcatgaaagctcatgtcagctgccacctccatgaagccttctctgatctcccctcacctgatgcaatcttgatctttcctgaattcctgcagtgctttttcagcactgcttatggcacacctcacctcctaccttgtgttttgatatttgctgaaactgcctcctgggactgtgagccatgttatcacagggctctgcctgtctccacctgtcattctcagcaccattgccttacacgtggaaggagctctgtgaagaattactggaatgagtgaatgaatgaacatgtaatagtgaatgaatgtcctcactgaacaagattacatcacttggtttatctgagacaaggaagactgaagtgctttctacctctgaagtaagatgtctcttagacagctttagtatacacttccttttaaagaaatttgctggctgggtgcagtggctcatgcctgtgagctcagcatttcgggagtcaaagatgggcagatcacttgaggtcagaagttcaagactagcctggccaacatggtgaaacctcgcctctactaaacacacacacacacacacacacacacacacacacacacacacacggcagatgtggtggcacacatctaatcccacctaatcaggaggctgaggcaggagaattgcttgaacctggaagtgagctgcagtgagccgagatcgtgtcactgcactccagcccgggtgacagagcgagactctgtctcaaagaaagaatgaaaaatttgccaattcatgaaagagctagaattattgaggataaaaatacctaataacatagttattggttaatagccatgctgtgtagagaatcttgaattgaaagcaagaagaattttaattagaaatgcttctattcattcaaccgtttttgtgagttttaatttttctttttatctatttaattttctaattgatacatcatatttgtacacacttatgtgatagatgtgttattttgatacatgcatagaatatgtagtgatcaagtagggttatttaggctattaccttaaacatttaccatttctttggagaacatttcaaatcttccaactattttgaaatatacaatatattgttgttaactatagttaccatactgtgctattaaacagtagaacttatttcttctatccaactgtgtgattgtgcccattaccaacccctcttcattccccgaaccccacccccgacccttcccagcttctggtaaccatcattctactctctaccttcatgagataaacattttaggcatcacaagtgagtgagaacacatgatatttatctctctgtgcctggcttatttcatttaacgtaacgaccttcagttccatccatgttgctgtaaatgacaggatttcttttttagggcccagtagtattccattgtgtatatataccacattttctttatgcacttatttattgatagaatatttgattgattccatatcttggctattgtgaatagtgctgcaataaatgtggaagagcaggtatccctttgataaactagttttatttcctttggataaatactcagtagtgagattgctggatcctatggtaattatatatttagtttttttgagaaatctccattctgtcctccatagtggctatgctagcttacattcccaccaacagtgtgtaagaattctctttcttccacatcctcaccagcatttattattattattattatttataatagccatcctaactgaagtaagatgatatctcattgtggttttgatttgcgttaccctgatgattagtgatggtgagcattttgaaaaaaaatgtatctgttggacacttgtatgtcttctcattggcatgcagtaaggtaccactcagaccacaggcacttataataaggtgtgacaaatattttgtaccataaatataatagacataagctaaagatttcctaatccagtagtgtgtgtgtatgtgtgtgtgtctgtgtgtgtatgatggggagagtggtagatatcaatggcaggtcttagttaactaacctaacactctaagcctcagtcttctcatctgtaaaatggcaataataattacttagctcacaggatgatgtggtgataaatgaaacctcatatataaagtactgtagcttgtattcaggggttctcgataattctaattctctttcccttcactggatgtatatccaagaatcagagactgctgagatttcagcgccaaatctgggatgggaaattaggcaaatactctacactcataatgttccctggattttaggtggtggttgtgactcagaaatccctttcatcactgcagtgagcccagagactaaaaccttccaaaagccttagtcaaaactcagaggtgggttagtgtctatgatccatactgagcaggaaataatctttctgttgttacaggtgattattatataaatcaaaagtccaagggcttccccaaagttttgctttacaacctaggcaatgcagtatgcccagtatttatttttaggaaggtttggcagatgttaggtaggctgacttccaggtcagaaaaaaatgttcagagcaatataatagaagtccccgtgggacaaattgaagtgaaacgttatcatctttggaacacattcacctattcatcagttacttagcctctaaactgtggatcctgcttataccatcttactttgccttctttggtggcatttaagtaacttcctggaaagacgtgcttcttgctgtgtctggctgtttagggttaccagagttttggttactacagaacattgttgggaaagaaaaataaatccttgctttgggaagatttaccatcaaagcagagtccatggtttaggcaaactcgaactgcctggaaaaagcaggctgtgcagccacatggactggccacgctgagaagccgaaaggccgactgtgcacaaaagaggtgctgcctgcctggtgatcctgtcctcctgggataggggtctgtgcacaggccccaaacagcttggagcacaggcactgaatggtataatcattcattcctgttttctttctttgtcagaaatgtcacagacccagggaggtcctctatcctgtactcatggtatctaattcatccatcttttattaatcctgtgacagcaggtgctggacacctggacacatactctacaccccttatgaagagtgaaatattaaaccaagggtgggtggcagaaccttgacttttccattgtgtatctgaggaggacaactcatcagggaattggagctgagacatgacatacaccctttagtgaaaacctggttagttgcagtgagccatgccttagcaggcttttccaacatccaagaagtagtttgggtctatcataaccaccatgactatcactccttcctaagcaaaagctgaaagaccaactctttgcccagtaagaacccatcctgcttttcttgttgttactgaagctgaatattccaagatcagtgccatacaactgcttttatctcagtgcttaccaaatgccttctttggaacagtactcctgagaaacttgctgcattggaattaccaatgtgacctgggactgtgctacaaatacaaattctgaagccctattctggaccaattcactctgtccagcctgtggcaagttcccagatgatgctgatgctgctggtctgggaccacactttgaagaccactggtctaaaaattctcttgacagccaggtgcagtggttcttgcctgtaatcccagtgctgtgagaggctcatgtaggaggatcacttgaggacaggtgttcaagaccaacctgggcaatatggtgagacatcatcactacaaaaaagtttttaaaaaattagccaggcatggtggtgcatgcctgtattcctagccattcaggaggctgagacaggagggtctcagcccaggagtttgaggttgcagtaagctttgattgcatcattgcactccagcctgcgtgacagagagagatcctgtctcaaaaaaattctcttgtgaaatatacttattgtttgtttcatattattcctttcttgaagccaggatcttgtggaacctactttgcaccactgtaatggaaagagcttgagctatccatacctactggctacgtggccttaccaagtcatttaactttttctgagccgccatgtttatctaccttgcaaagttatagtgaggtttgggcacaattacatgtgcgggtccagcaaattgccttgcacatagaatatacttactaaatggaaagcatgttttgtttagttcaggccagagctatgctgacatttgctgcacccacactttcttgggatgtactgacacttcaagacactttgaatgtacagtccaaagatttcttgaaacttggggcccatcgcttctacctgtgtgcaagtgagcagatcttcctgacataggctatcactgagtcggcattaattgctctgtaattgtcaaggggaatatttcatgatgaaaggatagtgtttgaagatgctgtgacatcctgaatgcttaatatttcaattctcaattatgtgaaagcagtttgtaaacttcagtgtgctatacaaatgagtatgtgctgggtgcagtggctcacgcctgtaatcccaacactttgggaggctgaggcgggaggatcagctgaggttgggagttggagaccagcctgaccaacatggagaaaccctgtctctactaaaaacacaaaattagccaagtgtggtggcacatgcctgtaatcccagctactcgggaggctgaggcaggagaatcacttgaacccaggaggtggaggttgcagtgagccgagatcgcgccattgcactccagcctgggcaacaagagcgaaactccatctcaaaaaaaaaaaaaaaaaaaaaaaagagcgtgattataattgttattaccttaaccaatgttttaggttaaaaaaaaaaaaggcttgccaatgcagaataggtgtgtttctcacttttaaagaagaatatgatatttatttcccttctttggccatactctgaacattatctcagaatctctctggtggcttccacaacttccgggatatcctaaccttgttgctttaaggctggaccttggagaggtcatgagagggtagaacatcaattgactttgcaatgattcctcataaccaaggagacacaccagtccttctgaggcaacaaacttggaggtggaagaatgtgattcatgaggaaaagcaacagcaacagattcctgattcttctgtgggagcaactctaaagctatgacctggagcacaactggtgtctgttgcttattcctgtggcctgctgggctacatctggaggttctggagaccagctgacccctggagggatctgggctccagtttttccacccaagaatgcacgagagtggtcactgactatggagctctgctaattgaccactcaggcaatagccaaagccccgaaggaggtgccaaggtgggaagcacttccctgtgctccctgcagaggaccctgttggcaggcagaaaaggatgggccaggaaagtagggaaggagtgagacgagagaaagaaaatcacagatgtcccaagtttccacaattttatcaaaaatttttccatgactcatcttgtgccttctccccaaatttaacatgataaaaccactggcctaaatataattaaactgcaattactcaagagtaagagggtggtaccttttaatcaaccccttcattccctcaaacacagaatccaaggtgggaaaataaagaacaaaaactgtctgtctctcttcttcccaacctgatttccttgctctatggccctctgagagggagagcaagtcagaaggatttccagaataatttcttcccacccaaatgtggggaaatcaagtgaaagctgcacagagacagctggaagactgtcatgttttgcttgtttgtttcctcaacccaacttcaagacatgctcagctccaacacactttgctttacctttctatacgttaatctgccaggaaagtttcttctacggtgaggctatttgggacacctgataatcacaccagctattgtttactgagcacctactatttgccagatatcttgcaaaattatctcttatcatcacagctccatgaggcaggttttatcacttataattttcctgataagaaatgaactcagagattaagctatttgtccttagtcatccaatggcagagctgggatttaaactcaagactgcccaattctaaaagtcccctctgactttggaaggagcagtggtgaatagaacaggagcaaaagcaattcagagtcgcttttgtgattgcttttgaattggtacacactgtcacaggctccggatccaggcttctgatccaacccacattggttttcctcgcccgtcagataagaggagccatgcttgacctggaaggtgttgaaagacatgctgctgtgtgcagcttatcaaagggaacaaggttcaccatcactgagacctaggaaggggccgtggtccagctggaccctagtcgagctgctcaggggcagcttgggctgtcgtccagggtgcacgaagccatagccaatgtcaagggctcctaatgtccaggcaggaaactgtgactgaaaagctgaaaaaacatatgatcccataaaaagctgcctttggggaaacaagccattagtcagccttatttatttttccttcttgctgcaaagttcaatacagatgaaggagctgcgattatcatataaaaggctatgcaaaatggccctccctctacgctgctgaagaaaactttaccctggcttttcgccatagttagctttgtttgtgttcttcagattccgagtcctttgaccacagttgtgatggcccaagtagaagcgcaagtgtgtctcaaaataaacaagcagtgctggaactctctagagtccccactcatctccacccgcagtcctgccttttatcctggctgatgatggaggccagaggaaagggatagtggtggccttattaagacaagatcttctgcgggaaaaatatgcttaatgagcttaggaaaaaccttgtggtcgtggaatgtaataaaatttccattttcttgggtgagatcaggaaaccttgactgtctattctgagtttttgccagttttactggggaatgtgctttttgaaggtcaaatgttgtttttttttcccagtgggtggcggggaagaggcacaatataatgttttggggaaagccccatggtcaatccatgggtgcaaagtaaccaggcctgcttgtcttatatagtctcttggtctctaggtttttttttcttttcatctcttaattccccatggcttcggtaataaagtaccctagactgggtggcttagaacaacagaaatgtgttgcctcacagctctggatgcttgaagtccgagatcaaggtgttggcaaggctgatttcttctgagagctttgaaggaggcactgctccaagcctccctcctggcttcgagtgttttgctggccatctctggtgttacttgtagatgcatcactccagtctccaccttcatgttcatatggtgttcatcctgtgtgtgtctgtgtccacatttccccttttcataaggacaccactcatgatagattgggagcctaccctcctccggaatgacctcatcttaactaattacatctgtgatgaccctgttgccaaacaaggtcacattctgaggtcctggggattagaacatcaatatatgaatttgaaaaggagggatacaatgcaacacgtaacaccatctcatagactcattaaacttttactttacataggaattctgaaaccaggccaacagagaggggtatggagaccctaactaaaaactgaggctagccgggcgtgggggctcacgcctgtaatcccagcacttagggaggctgaggtgggcagatcacgaggtcaggagatcgagaccatcctggctaacatggtgaaaccctgtctctattaaaatacaaaaaattagccgggtgtggtggcacgcacctgtactcccagctactcgggaggctgaggtaggagaatcgtttgaacccaggaggcggaggttgcagtgagctgagattgtgccactgcactccagcctggcaacggagcaagactccgtctcaaaaaataaataaaaactgaggctaaaactttgtcagtggaaaattattacttcaacgcaagacaccaacatttgtgaaacagggttctgtaggggttggggaagccagagccatgctatgaggacactcaagcagccctgtggagaggtccacgtggccaggagctgaagccccctgccaaacagctataggagagactcatcttggaagcagatcctccagtcccggtcaaaccttcagatgaatatagccctggctgatatcttgactgcaacctcataagagtgcctgagccaggaccatccagctaagctgctgctgaattcctgacatagagaaaccgtgagataataaatgttgttttaagccacgaaattttgtggtaatttgttatgcagcagctgcattgcaaaattgttatccagagatctaatacagctcctggcaccccaaccctggaaaagcaaatctgcctctactttgtgaacagtgtcatcgtgacaacttcagagggaaagagtcccagaccaacagtgcctcgggtctcgtggatcggaaggttttctttgtttgtttgtttgtttttgttttttaaggaaatggagaaaaaggaactaacaaagtaattgaaaattggtatattttatttactacaactacaaacacattaggctaaagcaagaactttgttcatttgatcagcaggataacatagtggtaagagcacagaattccaagccaaaagatctatgtttgtatcccagcttttgccagctatgtaatcataggaagttactatacctctcaccctaagtgttctcatctgtcaaatgggataacagtaatagcaccaaccccttagacaagagttactgtgggaaataacttagaactgtgtttagcacataataagatgtgagaacacaggagtgggaagatccacttatgacataaaatgtcccacagttagagacataggatgcttgttgaaagagccaggcttggatcatgaggtcaggagttcaagaccagcctgaccatgatggtgaaaccctgtctctactgaaaatacaaaaattagccgggtgtggtggtgcacactggaaggcggaggtagcagtgagccgatatcgtaccattgcactccagcctgggcaacagagcaagactccatctcaaaaagaaaaaaagaaagagccagcctttaaggaaacgggaagtcaaagcttgtgtaacgaagcaagaccagactttttaaatctacctcccttaacctttataaacatgtggacatcataaactttagggaaaaaaagtaattgtccccagtgacagaagggatggcgagaccgcataacttgttccgggccataagacacatggacactctggtgaccatacctgtccccgcacagttgctgtcctttcctgtcgtgcgtacctgcactttgcatggagacactgacttcagtcatactgtcagtaagtcatttcagaaagcaccacaggatttccggaaggacatagcattttaaaattctactgggtaagaactaagttccccacttataatttctaaaaggctaagggttatttttacgggtttttgagctctccattttacatcatgtcctctgagaagttttcaatgagctcagtcctgtattgggcagaggctgcctcctcttctgttttaaaggagcttgaaattcttttacttcttgatacagcaaccaaacctgaatatattgtgaggttcccatcccaagtcagagctcttgaggggaatcatccttgtcctcctcttcttcctcctcttctcctaaatggtgctacataggctggcttaacatctttttttgaaataaaaaccaagtgtaaacatgagtcagaatgacagggcatatgcaggactccaacatttacttttgacatgagttgattttcagttatgttctgagaacctagatcctgtcatcccaaccctggaaaagcaaatctgtatctattttgtgaacactatgatcctgacaacactggggggaagagtctcagacccacagggcctcaggcctcaggaataggaatttccagaagaaaaaaataaggacgctttgatccacttgcccttcgtattattgtctccctgtgcaatttgctggagaatttcccactggctcttggctcattttcaaattggagtgcagtctttcagagattactctgtgtgctgaaaaacaaggaagtctttattgagtaggatgaggaggccctgccttctaggaagggcaatagatgctctggcctctgtgtctcagcccaccctgcgtcctcccccgcgagccctctccagctcagcccctccctctcccagtggaggagaagggctgggtggaccccttgccttaggctgaagggaaaacatcttgtaagctatgtagcaattgaggcaatccctcctgtaatcgtggggcctctcagagttattactgagcaagatgacaattccagccagcatcccagtgtaacagggcacttcttctgcagccacttttctccaaacatgagaattttcaaacaggagtctcagataatatttccttctcttcatctcgacttcctctttcatttaccttactttccttcacttatgcttgtttaaaaaccctggattttcagacaccatctgcatcatcatcttaacaaatatttatgtagtgcttatagaaattaatttttgtaatcctcacaataaccctatgaggtacacgctattatgtccccattttggagaccagaaaacaggcccagagggataaagtgactttctcagggtaacaggccttctaagtgagaaagcccaggtttgaacctaatagtttgactctggagtctgagttctcaaggccctgatgtcccgtatcacctcccagttatttatttatatttagaaatgtactcatccttggccatgtgtttcttacctgagggcttgcggactgcagctcgcatctctggttcctgctggtcctggtgaattaggcaatgggatattgtggcccctttgctgtcccatggtcaccccatctacaccggctctttaaggcccagtgtggtcacacgaaggcagccttacaaggaaggctaggtcgggcccaatttggtaacagactcaagtctttttgcaggaacattcatacttgtggattacatagtagaggtttttcctctactggctgcaaatagtcctctgtggttaaaccaatttctttaggaaaagtgaaaggagggagggagggagggaaggaaagaaggagggaaggatggaagggaggaaaggtggaagggaggaagggaggaggagggaaggaaagaaggaagaagagagggaggcagggaaggaaggagagaaggaaggaaaaaatgggagtagaagtctcataatatttccttctcttcatctcgacttcctctttcatttaccttactttccttcacttatgcttgtttaaaaaccctggattttcagacactatatcatcttaacaaatatttatgtagtggttatacaaattaatttgtataggagagaaagagggaggaaggaaaaagagaagggaaggaaggaagagaaaagagaaagggcaagaaggaaggaaggaaaaaggaagagaagtaatggaaaggagaaaagaaggaagaaagggagaaaagaatactattgatgtggtgagcatgaattttctaggaaaggttctttctgccctcctaggctaaccatttctattgcactcctttttttctccttggttgggctgtgctaacttctgtcccaccaaaagcctacatggtagaacttggttatgttcttcaggtttccaatctaaaaggacggaaaatgaaaaaaagagaaaactgtgttacaacttaattaaaacacatcaggtcaaatcataattctgagcccagagctgtaaatgggtccctcagagaccctgggtctttcttgtgcctgctgaagtatttattgtcacaagtcactcctcatagagtgtcttgatttccccatctatgttgcagagaaaacacgctgtctgcctatgtctgctgagaaaccagcaaacaatgttcaaaaagcaccttgagcctataaggtacacgaagggggatgctgtttagttttctctttctatttcaaagtcatagaatagtctcaaaagaacagtgggaaaagcgtgccttggacttcgcagagccgtctaacattgcacctgtgtttcctgatcccctctcagagtctgtctgtttcttttctcccactctatcatgaggtaaggcgcatctccttggaatgttgtccttgctgcctgcttgccaactgcagcgctcccttccagctctgaagctcagtgattctcctagtggtaggaactctgtctctgctgttttcaagcctgacccagctcagacctgaacttccttgcattagggtttggcagcttcacgaggcagcactgtactggcctggccagcctggggcttgtggaatcacctactgaatcaggtttacctctggcattccaggcaagagccggtcatcaatcctaaattaacatttttgatagcattagtgcctttactaataatatctactactgtttactgaacatgggtgtggaacatatactaatgacttgtgagtgttacatgttgtccatcagtattgtctatagtcacaatcttatttagtttcacttaattctcatacaaccctaaaaaagtagctattttatatccatcttaagcttagcatactgaagcccaggacggttaagttacttgcctgaggtcattctaccagtaagtggagaagcccaaatctaactaacactggtttgcttttttccaaaagtggtaccactgcttaaccatgctgatcccctacaatattagctgtactgtactaagcacgtactacataccacaattgtgctggaagcttaatgcttacagtcctatttaattctcacagtcatcttcaagatgggaggattggctccatttttaaggtaaggaaactgagatttagagaggttgaattgtgctgttcttgtatattcattgaagtccagtcagattttttctaatacattttattgtctatatttgagaaatatgacatgatgttatgagatacatgagatacatgatacaggattactgtagtgaagcaaattaacatatttgtcatctcatatggttacccattttttccccaataaatgtttagaacagctctgaactttaccaccaaaacacaaaagaatttcctacaacatgcacttaaagccttttttttttaacatagcacagtatatgcaattatgttgagcatatggccatttaaaattatactctgagacagctcacctgatgcaaatgcctcagaaatggacatggaggtgtacaaagatgggagatggcagagacagctggggttactggatggagttgaatcatagcctatttacatgaatacagggggagttaacagaggcagaacttgggagctgcttgacgttctgtggggagtgaaaaggaggaggcagattaaagaaatgtgaatttccaacagggtatgcttacaaatccccaaaattcataaccgatttgttcaaagtaaaaaataagaacaggagtctgtcatgagaaaggagaacttcatgtcagtttcaagccctgcacattggagtcagtacatgcacattcttctttttggcatccattctttgtttatatttagcagatttgaataccgtttgggtttctacccacatacatactagccttactctatcttgatgtacaggaaggtttagacctttcactagtaattctctgtaatcgaatgtgaccaagttcaagggaaacgtcaattacaaaaacactgggggaaaaaatctgtatgttgcctccatggtttcttaactatggtttttgttgttgttgttgttatcgttttgttttgtttttatttttgtttgagacagagtctccctctgttgcccaggctggagtgcagtggcgcgatctctgctcactgcaatctctgtctcccgggtccaagtgattctctcacctcagcctcccaagtggctgggattacagacactccccaccacgcccagctaatttttatgtttttagtagagacagagtttcgccatgttggccaggctggtctcgaactcctgacctcaagtgatctgcccgcttcggcctcccaaagtgctgggattacagacgtgagccaccgtgcctggcctcttactccatttcaactagacacatggactctgtcttgtgatgaaacctttattcgcttaaagtctttatcttttggtggcatatgtagctatgtcccctattttattcctgatataatatatgactcttctctttttttctttcacgacgttgctaggggttgatcaattttattagtgtttttaaagaatcaagctttggctttgtcagttttctttattgtatatttgtgtcttaattcattgatttctacttttattttttataatttctactttctctgggtgtaatttgcccttctttttgtaacttcttaagatggatacttcgatcattgattttcagccacttttcctttctaatatgtgcatttaaagctgtgcatttccttctaagcacaactttagctgtatcccacaaatttgatatattatgtttttattatcattcagttaaaatagtgtctgttttcactgtgatttcatctttaaccaatgagttatatagaagcatcttgtttcaagtccaaacatttaggtattttctagatatctttctattattgattctagcttaattccattgtgatcaggagaatgtatttagtatgattttaattctctgctgtttgctgagacatacattatggcttgaaactaataacctgctatggtattttactttaatagttcgacatctttctatacatctactggaaagttattgcatacatcactggaaagttgcttaatctctacatgtctcagttttcttttgtgtacactggagataataacagtgtcttcctcaaagaggtcctgtgaccattcaatttggtaattctttaaaggttttcagaatggtacctggcacatagtaaatactcaggaactgttagctgttattacttagttgattaaaattatgactgattatcctgctggatcaaatataaacatccactgcctgtcaccagcccaccttggctgtctgctcttacttgctgctaaactttaaggcctatgtcttaaatatcacttaagtatcacagaatttccaagacactgtaagtattattttctgtgttttacaaataagggaatttaggcacaaaatcggtaaaagacttgaatgaaagcctgtttctcaagatattagcaacagcctgttatctggttcacatctatattccttgctcatattttattctatacaaataaaagaagtaatagttttgcaattaagtgtttttgtggttgacatcattttcaggtgttgcctttggactcctacagccttcaggccatgggaaggtctgctccctaatcagtaggttagcctaacctcagtcactaagtttcagtctgagtaaaggcacagtccctgagggctgaacatatgtcaaggttcccagcccttaacatcctccaaagacaaaacctgccttcgtcaccttgtgggaactcaacaaatggtggttgatgaaccatcatggtatcagttttgaaaataagcacagacatttttggtaaccagcccaccatcgcctaagttgtaaagcaagtgaaatcaacattctttctcattcattgggcataaattgttatggctgtttccaaggatgcatggtacacgtgtaatgtggggtctttcagggaaatttgacatcaagcctagagtcttgagagactagtttatatttttaaggaacgttgaagactttagcatattttataaagggcatttccaaaaccataccagtttctcagcttattttataatatcgaccacctggtcttttgctcaatgtgatttcaaagggcctagtataatttttctgagtatcctaaatctccttgggtgccctgtaaatccacaatttgaaatttattcttttaacatgtcatcttgatactttgtttattggttctaatatacaatcccttgggaaaaataatattaagtcccattaattgttaatagtgtgggtgaatgagtttattagattggctcctaagaacaagttttgagttagattgaggagggcagggtggaaggaggagatgatagctctaataggcatctatatttggaagtgctgggtaaaagagcacagtagtctgaggctgcacaagggatacgggaggaggcttcatgatttcccctgggctgcctctgcccacatcttctcaccacacatccaaatgaattcttctataccattccattaggtaattattgtaagcctttagaagtaacaccattactctcatgtcacaaaattctgtgattatattaaaaattgctctttttctgttctggcatatttgttttcctccctggtcttagatagcttttagggttggattaggtgttgatggaaaagaagagttgagatcaggaaagtaaggtgtgattgtaagaaggtcagaaaggagctcttgcagtaaaagacacctagggcgctttcatccctgttacctccttctgccatgatacccatgagcatgtgggagagcttcttttcatggacccacatggagtccacctgctgaattaattgatgctcttcattctctcttgaaaacatacccactgatacccacgccaccttgaatgcttgcaaccaccagtcctgtcctgtgcttaccaacatcagacgtatttccaaactgtcaatactagttgtgtctattgctgtaactcaataacttaattaaataatgcgtaaatgaataaaatatgagcatgaaaagaaagacctaatttgattgcttgcaaaaacatgatacaggagaaactcttagaaatgctattaaattaagtacggatgagaagtataaaagcttgtgaaagtatttagggaaatacacacaggttctgcactctcactggtctttacgttcttgctctactgttaaaaatctaaaactagaagtcatcgaccatatattaggagtgtggcttatggaagaaagaatgcgcagaacccagtcagcagaccccactcagagaaaaaacctttatcctggccaggtgcggtggctcacacctgtaatcccagcactttgggagaccgagacaggtggatcacttgaggttaggagttccagaccagcctggccaacatggcaaaccttgtctctactaaaaatacaaaaattagctgggcgtggtggccgatacctgtaatcccagctacttgggaggctgagggaggagaatcacttgaacccgggaggcagaggttgcagtgagccaagatcacaccatgcactccagcaacagagtaaaaccccatcacaaaaaacaaacaaacaaacaacaacaacaaaaaacaaaaccttagtcctgtatcaaaagattggcagtcaggtgcttttacacatttcaagttaaaaagatgttgaaaatatacacctgtcatgtttatggtgtttcccctttattcaactttttacttaaccagttaacaactttgtctcaatggcttctactgtggttgaaaaggtcattgttgttgttctttatgctcaattcaaaggttagggctatcctgaccattctctcttgtttctatggagaatcttattgtggatccatgattcttaaattccttagtgtgtgacttaaagctatttatagttttggcttatgttatcaaatatgcttgtttgccactaagcaaagaaaataaaaatgcagctgatgtcatcacagtagccaacgtttgacaagggcttactttgtacctggactctgtactaagcattaactgatattattttgtttaatcttcacaactaccgaagagtaagtttcattattatttctgttttatgggcaattgaggcacagaagggcaaagtaagttgcctaaagtaacacagttagcaagtagtgaagccagattccaagccagacggaatccagaccctgtgctcataaccactgtgctatttatttttagataccttaagtcgttgttcctgcttaatatgtttatgacccctcttcggggggcaggggcagagggaaacaaagattgattacctgccaatgttcctttatgtctagaaggtggtaaaacactggttgttttgcaccgtcactgttatctatgaacaactctgttaaatcttgtaagagacagagtggaaaatgtaacacttagcacctcagaccaatcatcagtaatgcagagggacgtgagtgcacgggtgtgtgtgtgagtgtgtgtgtgaccctctctctgctgctcaccaagaagaaactggtattttagtgcccttttgtgccactgtgcttttaactgctgttaagataaggagtaatgtccctccagctgtacataatagtgttgtaattccatcaaggggctttgataacttcataaaccctgacagaaaagcttgagtggattttcatgtcaccataacaccaagatggaattacagccttaatttactgggtgtacattttgggaggtacattacttaatgttaaatcttgttaaaaacaaatcagctgatgccatctggctgttcccgttccacagtggtctccaagctgcaccctgattttgggtctttgttctccgtcaccctgcttttcctgatttttattttcctcatcatcataattgccctgatcatcatcatcatgcataccttatactcatataactttttttttaagtttacagagtgtttttcatacatgatcctatgagcctcaatacttgcttttctctctcctcttgaacatctgaaatttagttatttgtgttatatggaacaaatgtctgttggccattttttaagaataaaagcaatgtgtgcacactgaaaactttcagacagtgcaggaaggcataaaatgaaaagtaaagtttcctttccttctgccttccaaagtgcttcccccacaggtgatccttgttaatggtttctttcatatcattccaaaaaatgtattcatatactaaaacttatagcattccacaaaaaatattatgcatttatgtttgcctgcctagccatttgtctatccacttctcctttttgatttatgcaaatgagattgtttgcccaatgtctttttaaaatacttaattatatatcctaggcatctgtccatatcattacaagtagctttccatcagtttttgtacataacaataccagccatttagaggtctgtctttcaaatatcattttaggtaaaaaaaaaaaaaaaaaaaaaaagtgtgagttaaggatgactctggttgaaaagatgggcttgaatgagccagatcttatcagaataaatctcaatccagtccactggagaataaagaaaatggaacttttgttttgaaaattctttttcatgctctgtgtttaatataacagcagggcattctgcaaatgttatcacagtgccacgttcctgtgaggctggtcggagtccacacggggagtgggcatggtgttgagggaagcactctggaccaggtgcctggggaccagtcacataatatgtgattcaccatattaacccatctgagctcagctttctcccctgtaaaatggggttaatcatatctatctcgtatgagtgccatgagcattaaatgagatgattatttttgcctcgataaatggtgagttttatgagtattctgaggcttcttcctacaccataactgatgaaataactttccttacaggaggctcattttttaatggttattgtctttttataacttagcatttattgttgtcccatagattgcatgcttctaatgtaatgaaagtgactttgaaatgtgacttataggagctggtctcattgctttatagttacattttgcttcatttgcttgttattttctctctcacagcctggcacatggccggggctttgtaaatcctggttgatccagagatatgtgagctttggatgttgtattgagaggctggctacgtgaggctgtcaatgaattgccgaatttggaagaaaagtccacattctgaaatgtgtgttccaacctgccttccaaagccctggcaccatctctttttaatataataacagtctcctgcaaatttcctagtatgcacatcttttaaatttaacttttgctccattagacttcctgtgaagtgatatgtgctccataaaacacagaggcttcatcaggctgacacacttgcctagtactttgcaatatggttttttttaaggcagtaacatattttcttagaaaaacaaatttctccagaggacagggctcctaagataaacagtacaatctgaggagccatacaggataatgcccaggctcgcctctgcacagcactgagcctgtagaactgacctttgggaagcacactgttgcctctttgcagatgctacctatggcagagcatcaccagggctggaaacagagaagggagctggagaggtgggaggtgtcagggcgggaatgggagagtatgggacggaaagatccattaatccagtcagtgtgcagaggctgcaagagaaaatataaatctgggaacagctctgcttggtgaatgcctctgccagagtttgagtaactgacaaattatcataatgtaattggctggcagggtcagcccttctcctggagcattagccatggggaaggtaggaagaggcagataaggaattggagggcagtgttttgtctgtcaccaggaaggagttttcatttcagcactgcttagatcaatattatggccctggagacagccctcttcaaattagtaaagttcccatttttgaaaaatttcttccttaaaaataaaatctaagaattccacttcactgcccatgccaaagtctaaaccaaagccaaacaaaagaaaacaatcgagaaagaatagaaggttttccttttcctttctactctttcccctacttttggaagttcttcctggaacttggggatcgcatatcttttgactgacacttctcagaatgattgatttgtgtaagttacttcattgattgcctacttattgtgcaggcagtgccttatcctttctaagcaaagctatggtacatttcttttcttttcacctagttattacattagcctatacagagaaagattcagacacatttccttgttcttccaggggtgttacatctgggtcattttgttgttcatgctattttcagaaacttagaagatcatccacacctaccgcttctttaagaaacatatgtatatatattttaagtgtcttctgctttactttattaaaattgttttcaaacctcaggtacagagagttgaattaattaacactataaactaacttctcagatcagagatcattgtcatcacagatgagagaaaatttccactcttgctctattttctcctatcttcagtttccacgcccattctcttcttctgcatggatccatgtaaaattcatagctgtgtgtgtgtgaagtgaatggtattgtgcgtttcttgtgctattacttttttcacgcaacatcattttaaagatttctttttgttgcacacttcttcattgcttctaactgctctgcagcattccgtcatctgaatgtacccattttatttatccatttctacaatcgatcttggaacattttcagcctccccaaaagaaacttagtgcccataggcatcactccccgtccccatccccttagtcctaggcaaccagaatctactttctgtatccatggatttgcctattctggacatttcatataagtgggactcatactacatgtcatctgctgtgactggttttgtttatttagcataatgttgtcaaggttcatccatgttgtagtatgtgtcagaatttcattctctttaatggccaaataatattccattgtatggatgtaccacatgttgtttatccattcctcaataatggacatttgggttgtttccactttttggttattatgaataatgctgataggaacatctgtgtacacatttttgtatggacatgagttttatttctcttgggaataaacttaggagtggaatttctgggtcatgtggtaactctatgtttagctctttgtagaacctccagattgttttctgtttttcaaaatggcggcaccattttacaatcccaacaatttgagggttcccgttgggatccagtattgtaaggacagactgcatcactggcctgtgtagtggccaagacctgctcgtatgagagggatgtgcatagatcttgtatatgtgggctgccatttatttatggcaatgattatcatccagggttatcccacctcatcttgagagctcaattttaggactatttttatgagcaattctctggttaactttgttcactgaaaataactgagctttgcaggatttggagtcaggaaacctaaattcaagcccagattctgctacttatttggtgatcttgaataaattgtccaagcctcagcttcctcatttataaagtgtgtttacatggggccactcttggtgtggatagagctggggttgggaaaaaaataggggtgtattgggggtcagaactagagaatagggaccccaaggagttacaattaactaattaaaacctggccttccaggccattatgaatgtatgtatttgtcaaggttgaaggtagaatatatttgttacttgattggtaactttaaataatttagttatgtgggatgtgggcttccatgtgtattcttgccctgggtcccacaaatgttatagggatgctttttcaagatcaccattcttgtatcgacctgtgtgagaatatagggacatttagtctatgcgtatttaatttccctgagttcatctaggtcaatttccagaatgaccatagaaatttacactaataatatagggttcttagatctccatatcagcaccaacacttgtaattattcacctttctattttttcattgtttttcttgttttaatttgcatttctctgactgtaagtttgagcatctcttcacggatacaaaatatgaatagaaatccaaaaagagaaagtcagtaggctggaaactcaggtaaagtttctatgttgcagtcttgaggcagttgtttcttctttgggaaacctcagtctttgttcttaatgcctccaagtgaggcattatgaggcccaccaacattatgaaggataatctgctttattcaaagtctactggtttaaatgctaatcacatctaaataattccttcacagcaatgtcttgacttgtgcttggccaaacaactggtcaccatagcctagctaagttggctcataaaattaaccatcacacctctgaactcttccctgaaccacttatttgtcttacaattatatgaaggcaggctaatgacatctctcgcattgtcatctttcggtatgtagctttggaagtgtgtaggtttgcctttccaactccttgaagataaagaccatatcttatacttcttatggggttcctggaatgcctagtggggtgctacacagaccttgcttaataaactactgtccacaaatgaatgcacaggagaagcagctttttgaagaaaacatcgaagtaactatttggagttaagaatagaacttgggtcttttgcatcccattcttttactcctcagttatacaccaaaagacttcaacacattcttcatttagttcttgattggaattttagtggggtaaattttgtgaccaggtaggcttttcatcagcttgagtttaaactctttgaaattggcccatgaatttgatgctgttctcttggtctttttcacaactgaaacattgggccattggtgggacgttctgtgccttgaaacttttaatacgtgcagctccatctcctctatcactttttagattcctagtccataccttttacaattaaatgcatgatgtcccagtagactttgggatattgggtcccaacttctgtaaactccaatagacctgagctctgtaattttcttagctgtcagttgaaatgtcttctaaaatgtgttaaactgtctcaggcttacccagaaaatgaccgttgttagtgacagatgacattcatggtaccaccctaaaagcaaagaataattatagtaagataattaggcattagggcattgatggggccaaacgaatgtggagaaagttaaacatgcagaaatatctggctctaggtcttatatgtgttgggaactttccaaaattcagagcatagaaattcccatgatgctagctcagtaaattttcaagccattggaatctctactgacctttggaaaacatagcagattcttcttttaatcacacaaccagctgtcctaagggccaattagcccgaattatgtttttttctaattacgtatttgttaaatattaccgttattaattttctgtatcagttttccctagatcagaggttctcaaactttgtcagttccagacatcctcagtatttcaataacttttcttctggcatgcctaggccaaaagaaataccatactattctgcttattaaataattaggtcaaaactacttaataagcatggaagcatctatgtagatatttgaaataaataatacacagatattaaaagattaaggaggaatcatcttatttcattcttaaataagcataattacttcctaatggaatacatgtaggtacctgttgggctctgcacaatttttcaaatcttagaatcgaattggacaccaccaccctcatttccattccacatttatttttgcatgatgttggcttttaacagcaattgccaaaaattcagctttgtgaagatgtgaaataatctaaaagcatataagtatgatctaatgttgaaatgctgataatcttgagttttctcagtgtccaacagatgtcaaatactgctgtgtattcttcaaaatataacatattctgtggcatccctgtgagttcagtacagcatcctggagcacacagtttggaaactgcaaccctacacattaaacatgaatgattaggtccaacactcaaatctgtcaaatttacaaagaatgggaatttctgatttatacttaagactgaaatttctcctagggatcgcatctggtatttagtacctacacacctcgctgttcttcacttccttaggaagctatatgcttatgttcaggatagcatttttcccctcttctaattttctacctttggaaatgttcacagcctgctgtttccttctctaattccttgtcagtaatcatgctggccaaaatgacctggtgagaaatgttgtttatttcactggatgcctgttttttttttaacatcctgttttattttggttattaattattatcaagtatcctgagcatgagaaacctaatacagagcttacataagggggaaaaagaatgctattttctcttagaggttacatgctgcaaagcgtgtcattgctgatggtttgcttcaaacccttagccctttgtgagccagcagatgtcacatgaactaagaccctagagcacatcagccacttggttggtttcacatgcctgttttctagcctcttcagtggattttaataccttggcctttggctgcttttctgaagaagcctcatgacatcactaagcttcaggctcgaagatattttatccatactttatggcactcttagtctgacaaagattttgctgcttctccttcctcctctttctcctcttcctccttttcttactcctcttcttcctctcttcctcctcctcttctcttctttcttctccttctcctctccctcctgctgttcttttcctcctcttcctccttctcctccttctctgtcttcttgttcttcttattaacgttttcatagtttcccttggaatattttagccctgaagagctaaacactaaacaccaagcctattggttgagtggttatagtagctgaggtcagtgctgtctcccagacccctagatgcaggatacccttctaagggacagggagattgggaattgggaatggagcaatgcctggttgtggagggggctgaaagagaagttggactcaaaatggccaccattgccaattcctttgctttacagtttaaaagtgactctgtaagatgtcggtcgagctctcctcagcctcttctctcttccccgactactttccctgcatctctgcctcttctatctccctcatccatcccttacttcctcaccttctccgcctcccacctataaaatgttcttgggctgtccccagtcaggtggatattgcctaactcctgtgtgatatcaataacccatgctagtgaagccaatgaggtaattttccctgaagctctaaatataatttaacaagttaaacactgtaacattgtggtgaatgcgctattaagggactgtaaattgcttacatagcatcaataaacacagtgccctaaagccaggggccgttaagattttataatctaaagcagcacttggagtatcaccccgaggcttcagcttcaagtcagataaaaacaacgccggctgaaggcttcagttgatgccaaatgttcataggaacacaacaagctttagggggtaattactttctgaatacttgatgtggatttgctgagaaacacatctgttatcaaatttgccaatgattaatttgattcttccatttccacagaaaaaggggcaagtgaagttgatgattaccagtgccaagccgattggtatatggcatctcccacagattcaagtattatattcttgggataggaaaaaaaaaaaaaatcagtataatctcctctcacacatacattggattaaaccctataggattatgtgtatagaaaaacattttctgtaattaaattatctttggtgttgttgaaaaaggtgcagagttttaaaagttaatggcttcttttggaaacagaatagttcgtgtttcagattttgcaagtccccaagcttccttccccttctttttcctttcctctgatgtccgcccacccctagccaaatcctttcacaaaacacacctcccctctgtaattccttcccgggttcatattctcagccaactggtgactaaccctttttgtgttttaactattatccagaatatttggtctaaagcatttgcatttgagctctggaaagctcttagcattttacaaatgttaccccattaatcactgcagccatcagcctgacagtgtttaccttctatttaaaagtggtggaaaaaagaaagctctgagtggtcccgagacctgaccaaggttgcttggtgagtcgggaggggacaagggaggagaactcactgtctcaggcctcccagctctcacacctgccatgccacacactcctaaaacctgcgtaggacctttgggtctgcagggtctcagggtcacctctatgatttttctttctttctttctttctttttctttctttcttttctttctttctttttctttctttcttttctttctttctttctcttttcttttctttctcttttttctttctttcttttttctctcttttttattctttctcttttttattctctctttctctctctctttctctcttttctctctctctctcttttctctctctctttctctcttttctctctcctctcttctctcttctctttctttcatctcactctgtctcccaggctggagtgcaatggtgcaatctcagctcactgcaacctctgcctcccagttcaagtgattctcctgcttcagcctcccaagttgggattacaggcgcctgccaccatgcccagctaatttttgtatattttgtagagacggggttttgccatgttgcccaggcaggtctttaactcctgagctcgagcaatccacctgccttggcctccaaaagtgctggaattacaggcatgagtgagccaccaatttatttctaactagcttgctgagttacacttcctgtgcagatttatctccttttgttattatcgaggccatcccgagactatggagactttcctcccatgtttctggtctctggtacaccatgcccatcccctgaggagggacagtaactgtgagagaagggtacatcacgggggctcaaaacaacaagcaaaatgcctcctgctcataaatggccatcagcagatagcaactcatctgtctcctgggcagtcttgagccttccccttgacgctctttagccccatctttcagccacatgtcatgttgtcttatgactttactcattagagtgccatcagggttcatgctacctggcttcactggcagaaaggaatttaaagatgggaagatggagaaagaaggagatggtacaggatgatttgatctggaggtcacagtccactagggatggcttttgtcccaggacaaggttgaaatgaattatctgcgatgaagtacgaggtaggcatgatcctggaaatgtttcttacacattagattactaaaactgcttccagctggtctcaacatctctgttaggaaataggccactctccagcagatgtttccactgatgatagtcaaccagaatagccattcatatgtctctgagcgtggtgggcgcaattcagttttctctcccagctttcttcatgccaataatacaccttcaaggtgggctacttaggtcttgatggtaaattataaaaacactaaggtcataacattctctaaacaagaacaacttcatcctacttctatgcagcttcagttaatttctaaattccccagcactgcagggactccctactttctacccacccctaatttattttttataaaacatgatccaaatatatcatgggagatgcaccaggccttttcctgactttcaagtaatgcatttttgtgtaaacatgttgcttatgaaagagcctttcatggatgccttgtgttgcctttgctcaagaaaatacattttaaaagaattctccccagcctggcatgtaatctttcattagccaacataaccttgtttatttgctttttaaaattttatttgggaaaggaaatcaatttgcacccctgacatgctgccaggttcctgtttatatgcacacaataggcagcttggagggggtaaaaatatatagtttatgatttcagcattaagtgtgacacaatctgtatatgaaaccatagaggcagtcctgttttcctgtccctgcagccacactgcagtttaagctttttatcggagcgttatttcagtgtgcacagaggaaatggtcttaatcgtactaggcacttttagtatgaggacaaactgtcagaatgaaagtgattctttgctggattttgtttgtttgtattttcttgtttgttcttaggaaaatacgttaagtggccgactgggactcagccttataactgggctatgctttggggaagcttgaaatgtctttccagaataaaatgtcctcaggcttctgtggtcagagattctttggctgatgggaggttgagaggaccctaaggtcagtgtgtccatcaaacagaattcctttcccttcactccagtttccaacagtaatatccagcagatggatatctgctgaacttgaccctcactcctgcctcctttgagtggacccctgggcttttctcttccccaaagtgaaataattaccttactgatccagtgtatggagatccaaataggaacatgaaataaagtaattccttcccctttgcagaaatgacactctctaaaatcacccatcgtcacaaaaaaatcactgaattagtagtcaggagatccagattctagtcctactcttgcctccatttagatgtgggccactggtctggtcacaccatctctttggcctccaccttcttctctgtcaagtcagggagttggattcaaggctctccatggtatatttcaactctgaagttctgggtgcaggtactgacaagtttcattaaagacatcttcacctcagacttggaatttcttccttcctgtctcccagcttgcatccaagccagaccccctgttttgggtttatctatctgaattcctgtttctgttcctgttggggtggagccttctcccttccttttcactgccttggcttcctctgtgttaataattatcttaacttccatggatctgcttttttcttttcattttcctaagttaccactgaaacctaacaatcaaatcttgcatattaaaagtgtaactctactgggcagcacccatttggttacagacactgtgcctggaggcaggacagggtccctttccattccaccctgctattcacaaggtcagctctgggccacagcctcttattggaggcccggagggcgtttccagtattttaagtgaccctttatttggctaagtgtgccacaagctctaggtatgctctatatgtgaatctagactgttcacatgagcgagtcaaggagggaagcggacttggggagagcttgaatacaaggagaatctttcattattcatctctgctagtaattagagggcactattgaatagatataattggatcatgtcacaaaaattaagataaaagaccataagcaccccattctggctcagtgttcctcccctctcctccgccttcactggagttttgttcagctggtggtaggactcagcacactagaggtcttccagttgtcatagatctataagctgcattgtgtgtgtgtgtgtgtaaataaaaagcttcctgcatatgggtttacctaaacctttatcaaacatggtggtgtgcaaggatgttagaataaatggagcaacatacaagacaaagcattcatgagggctggcaactgttctctcttcctgtgccagcagatgtgagattagtagttagctacccagagaaatcaatactaggtacaactgcatgattgacttgtaggcaaagccacttcacaaatgtgaagataatataagaaattcaaatactttgtggtttatcttttgccctgaccataccttttatcaatgattataaacctttaaaaaggcgttttgtactgagattctatttgactttttagggaagatttaaatttctaaatccatccatagggtttgaaaactgtttcataaagtgactagcaaactatataggtgtgaaaagacatctatctgaaaaacgtatttctttacatatagggctgtaatttgattttttttaaagtaactggacaacactcaaatatttacaaaacagatcttagagcaaaataaaaaaaacaggcaaacaaacacataactatcattagcataagaacataagcatcatcacaaagggaaagttacaaagccttttgtccaggaattcacttactgaaagctccagcaatatgggtgttgttcttatgtgaatccctgattcccctgagatctcatctagagtttaggtttagaaatattatttcttagtctatcaaagaatcagtaaatttgttccacattgaagttatcagtagagcacaatagaatgaaaatgaacttaaaatggaatgttatagaatgttccagttgccgaagaccagggacctgcagacttagtggtttttcacaggaatgagaggttgccagggagagtgcctcaataaaaatacggatgtcactgacattagcgcttctgcttagggagtcaacccatatatcctggctgtcttaggtagagaaatgcagcttctagatgtgctcactttcctcctgctcagtaattttggcagaaagtagagttgagctcggcacggtaatggctttatggtacataaacaccaggtgccaaattccatcttctgtgactcccacatataaagctgttcttattctaagcccgattgtttcaccaggaggaatgtagacagataggaagctgtggccttaaagtgagacctggttttcagggcgtgtaactgggttcagaggagccacgcttgcccgagctcatctttgtggggtggagccaggttacttgggcacaccatgggatgggtgcgtcttagctctgccgtctattgtttttttcagcccaatcatgattttttaggtgtgtgggtcaatgcaaagccagtttatttttctgtgtgttaggttgatggatgattttttacccttctgacttaatttttcttgtataaattttctctaatgaacatgtgtattatggatatactggtgataaaataaaaataacctaagtttgatgaacacataattgtactgggtattttctgatcacctatccaagcccattctgtccctttttgactctgttcttgccctgaaagcctggcccgtacacacaatcttaatgagcacctttaactggtgttttcctgtttagtttgggcatatggctatggaggcatcactgcaggttccaggaaggaagcagggagacactgggcatctattctcctagctccttcagttggctgctttctttgaccaggagccacagctctggccacgtgccctctccccacatggttctctcttcttccctggtcttactgacttctccccagcttcctctctcctgagtcctggtaacttcttccttctcttactcttgtaggcctagggatactaacagctccctgctgaaactggccccagggctttcctacaatctgttcccacctttgcaaaaagtctctttattaaatgctcctcacattacccagtttgaaggtactagctgtttcctactgggatcccagatgttaaagtagtcaaactctctaattgaaattgtgcttttatatgcagtcttctcagactaaagcatcaccttctttctgtttgagtgcaattttaacaatactgagaaacagtggaatctcacggtacaatgaagtgaaatgaaattttaaaaattaaggaatatgatagcttcagaaggcaggggattatatacgaaaatgaattcatgacttttaaagaagtattttaaagacatgagatcccagagaaagaaatcataaaagagatccttgatggttaagaaaaaaatagaaccattaggttttctgtgtgtgtgttttttttaattcttatttgaagaataaggatcagaaatgatctggtgcttttggaccagaataagtgagggaggatgtcatgaatgggaaaggatagattaaataagggtgaaattggtttcaaggaggcagagctgtaatttctgatcaagtggtcaggcctcatatgtgagcctcattggaaggtaacatttaaggaaacacttggaagagatgagggaaggaactggggatatgtgggaagaagccttccagtttaggggaatagctggtgccaaggctcctgtgtgctcacagaatatcaaggaggtccttgtgagtctgcaacaacagagtgatggggtagagtagcaggaaatgaaatcacagtggtaataggttatagcatgcaggtttctggagcaccttacgggaactgtgaaaatgaaaactacctcagtgactcctattgcaccagggacccctaaggatccagagaacccaagttgtgctaggagaaattgatgaagtttgctttcaatattcagacaggatttctggaagtttctttgggcactgtcatgcccagttgtggccagtgtattatcccctgtgctacataacaaatgctgttttgtttgctgtgatcaagagaaaaatgttatctctttaaattcagatgtcataaaataagacagactaagcctctcactgagtttctctgttgcattgcttagtttggtttttgctttaagaaaaaagaaatactgttaatgacgactaagtttggttggaagtaatggtggttcaaaggtacttattccccagtaaaacacccacttcccagggtagaaataggctgctgaattaacactgatcattagaacagcacagcagtaacttacatttgcaagtactagacaatttacaatgcaaggccattcatgaagagctacctgacaggttccaccagaagtgaaatgaagcagcaagcatctcttttctctattgttttggaagaggaagtctaacttgtagcacattttcctttccactgaagatagcatttctgttttatgttgagagtataatttgccaactattccagaatgcaggtgcccaaccaatgctccaggcaagggagttttcaagcaatttcaacttagccagccctaccctccagctcttttggccaggagagaacaggagctgagaaaggggggcttgggcaagggaaaggcaaaggcaagtctcttctcagttctgtaatatatcattagcagctttccagagagtgctacatttatatttctggtcattaagtaggtatgcattggagtctctttgaaatgctgaagaaatagacccttcagcatccttgtggtacttttatacgtgtccttatttttagtaacttggccaatttctggtaaggaagggagagacatttgtttagtaattctagaataggccatttgcctcttgcaccgccagactagatttgcagtgtgcaaatgctcagcatttctctgcatgtgctgcgcccctttcgtgattttaaataccctttcgtctcccacactacacaggtgtgagagcttggcaaggtcattgttgccatctgtttatctgccccacacctgcctcaggactcctttcctcacttgtttctagtcactttgctttggtttttcctgtcggtttcccagtcacttggaagggccctcacttccatcagtggctctggttgaccagacacatggcaaattgaggagactgttaagctgcttgctggcctctgcgtgttgatatgacttaggataactcaaatcagcatataggttttttgtttgtttgtttgtttgttttttgagacggagtctggctgtcacccaggctggagtgcagtggcatgatctcagctcactgcaacctctgcctcccaggtttaagcgattctcctgcctcagcctcctgagtagcggggattacaggcatgtgccaccacacccagctaattttttgtattttagtagagacgggatttcaccatgttgcccaggctggttgcaaactcctgagctcaggcaatccgcccgcctcagcctcccaaaaagctgggattacaggcgtgagccaccacgcccagccaatgttatctttttagattaggatcataggcttaagatgaccacgtgcctgacttagacaagaggaaattgtctatcagttgctgtttagtcacatttcaacgcctcaaaaatcacagttcatttatctatccaaccaatggtaatttatatagttctgtgccaggcactgagctaggtgctagcgatagaagagaaaacaagaggctgtgttcctttcttcctggaattgattgtacagtgaactggaaatagtagtaataacaatcgcacattgtgaaacatgctataggtgaaaggactggggtgctgagtagaagataacaggtggaatacctttagttagggaggtgacgtttaagatgaacctgaaaaggggagaggaagctaatcattctaagaataagaggatgtcagagcagagaagagcagggctgtaagataatatgtatgttactaaagctcttttcaaaccattgctttatctttactttgtaggtcaaaggaagcaaaggtacatgatcctcattttgtacttgagaaaatgtcattgattgatcaatcaacagatttattgcttagaggacaggatttagctaggcagagagaaggagaggaaattctaggcctggggcatgtacaggcaaaggtatgaaggtgaaaatttgaagtcactagttgcgtaatgaatagaccagtgtggctggagtttagggtttgcacaggggatagtggtaggagatgaggctggaaatatagggtcttgaaggcaaggctaagtgtgggcttttactgatggtaatggggagctatagcaggtttcagagctggagagtagcattaggaaagtgctgaattacatcaattaattggagaacagggtctggagtgttctgggagggactaaaaggattggaagccaggaaccaggctcctatatcagtaggaagcaattgtatgatcaggacaggaggtgacagacctctaaagctagtgggatggtcaagaagaggcaaggcagatgtgggaaccatgaagacaaaatcgacagactggagaagttcagcaggatcatgtgtttagtggtggagtttggatgaaaacacagacctgctgaccagccctttgcccttcagaacatggtataattggctctcggtgacacatctttctctgcttccacagtgtgtgtgcgcgtgtgtgtgtgtgcgcgcgcgcgcgtgtgtgtgtgcgcgtgtgtgtgtgcgtgtgcctgcgtgcgcgtgcgtgcgtgcgtgtgtgtgcgtgcgcgcgtgcgtgtgcgtgtgtgcgcgtgcgtgtgtgcgtgcgtgtgtgtgcgtgtgtgtgcgtgtgtgtgtgcgtgtgtgcgtgcgtgtgtgtgcctgcgtgtgcgtgtgtgtgtgcgtgtgtgcgtgtgtgtgtgtgtgtgtgaaggtatttttcagattcatgtgtttttcatcccttctcttccctacttttcatattccttctaagctggaggctaactgtagtaaggagagtgctgactttttattttctcttgttccacagcactcattgtactgttctatatattcactcagcaaacatctatgtggtgggcattgtattaggccctgaggacaatggtaggaaatcagaccctgtccccatcatcaaagtgttcagagctagaaggaagactgacttgaaacatagtatatataccagtgtgttctaagggctttgaaagaagtgtgtgtgggataaggtggaggaccaaggagtagttagctgatactatctggtgttagcattgatagtaatgatgatgagaatagtgataattagaataatggctgctaacgtttattggacagttaattatccaacactgcattaaatgctatgcttgtattacctgatttaatctttacaaaaaccttatcagatagggttgtctctatttaacaattgagaaaactgaagtacagagaagctataagcttgctgaagatcagacatcattcatttacttgcagaataattgaatccattgctatctaccaagcacacagcatggaggcaggcactggttattttcaggtgaacacatcatgttttctgctgcaagaacagtgaacagttatgtcatttttatttttcgagatggagtctcactgtgttgcccaggctggagtgcagtggtgcaatctcagctcattgcaacttctgcctccctggttcaagcatttatccctgcctcagcctcccaagtagctgggattacaggcacccaccaccatgcccagctaatttttgtattttttagtagtgatgggttttcgccatgttggccaggctggtcttgaagtcctaacttcaggtgatccgactgccttggcctcccaaagtgctgggattacaggcgtgagccaccagccctgccaattacatcatttttaatggcacgagactagtttctaatgtccaagattttggtggatacgtcaatcacagaaatttgctcaatcttgattccagtaacccgaataaagtagagctatttctctccttttaacccatatgattatatttagcaaagacaaccaagacagtaatgtgggagatgagaacagaaacatggacaattcaaggcattaagaaactgaccaggaaggggcagaatctttctttgagagacacttggaaactgtttctcacagtcaagggtggcacctgagaagatatttattgtcttgagtattcgactacaagattaaatgaatagctataaaatgctcacagggatggttcagagctccattgcctcaaacccagtattagaaagaatgacagagttctggggattggaggggagcctcagcaacctgggcagatcttgctgctcaggagctgacagcctcaagtctagaacctcacttatgggggccgtctgcttctggcaatgggtgagggggctaaggccactgatgattatatcagtgtgcaagctgcctctctacctactgtgatgtcttccctcaagtcaaaggggagctgcctatgcatgcagcatgacttttagataagggacactaatcagacattttgaaatgaattcatggtgtatatccaagtttttccagctgtaaaagtggtgatgatgacattgatccaaattagtggtatgccagatatactgttgtatatttctcagaccacataccaatattaattaatcacttatttatagtgcccatttgtaagaataacaggcataccttattttctaccaagtcactttctacaaaaaatatttgtaccacaagacttagaagcagcagggcttagtggtgatgagcctggttaagacgtctgaagccaaactgcctagagctgagcttttccacttattggctgtgtgattttgaacaagtcacttaacctctctttgcctcaatgtcctcaactgtatagtaaccatatatctaccttctagactgatgataagagttaaatgagttttctgacatacagtaatgctgtatcagtgttagccattattaatattactaatattaatatcagtcatggggagcagccaccagactgtacattttgtctctgagcctcatgttctggactttactgaaaggaaagaagtacatttttgttttcagacgctgtgctgggacatccgtcatctcacatgattctgatgctaatcctgtcctttcgatgattatctccattttaaagatgagaaaggtatggctcagagaacttaaattttgtgccccagacatgatggagctgatgcaaacttgatcctaggtctggcccatcctagtgcttatgtttttcttttatactatggtacctcttggaatttgtcagagttaagtagcaaactgaaaaagcaaaatgaatgaatgaattaactgcgagacagggtctcactctgtcacccaggctggagtgcagtggtgcaatcacggctcactgcagccccaacctcctgggctcaagtgatcctcctgcctcagtctctcaagtagctgggaccacaggtgtgtgccaccatgcctagctaattttcttagtgaaaaagcagaatttaaatatgtgtatcaaggctagagttttcatagcccccctgtgctctcctctcctttctgaagaggtgacttgagatggtttcttaccttgtgtgtgtttcttacctgccctgtgttacagtgctgcggagaatgctaggagggagaggtggcctgcatggtccctggtgccctcctctactccatgtgtcctctgatacctcactacccccttggtcatggggcagcctgtcctcttagcaagatccaaaaaatacctgtcctgatagatagctcctgagagcaccaaatggaggaatcagggctctttaacatcttttctatacctccagaaagcctagtagcttccagagggttagaacctttgttattctgtgaatgtcttgcatatcttttggatgcagttcagggatgtttacatctgggaacttctgaaagtcttcataactgcccaggcatcattaagatgcagacaactctaagattgcacaactcgtaaatgcgagttaagatgaccctggctctttatggaaaatcccataaagtctctacacagtggcagttggatggaatatagatttgcagataacattttgagaccttacaggaatcaacatcattttgcctatatgctccaaccttcactttcaattgtggtccattcccttcatccttcattaccacaccctgaaattatagttatttttaaaaacacggatgtatgtttatgtgcatcagattgtttttttgcattttgtattccaagcccatgcatgcagaaagacaattaccactctacctcaagctcaggagtatgcaatcaagactcattattctcctgcttctcatttcattcacaccctttatgtctcagaacaataatgaatggagagcaaagcatcccaagatacttgaggaaaggaagaagtcaaaggacatgctgagaaatgtgaatcaaagagggagaaatttcggtgaagatcgtttgtttaaagtggagctttcatctttggtggttgggagattgtactttttgttagatctgtttcttgaatcatgatcccttggggtttggcagaaagctataatttttgggaggctcacttctacaaaagcttatggttatgaagaaaaatcaacgtttgtaggtccatgaatcagagtctaaaaagtctgtttggatatttagtgtctcataaaatataacataggaagagacttgtggagtgtcacagctggaaaagatcatgaagaccatgtggtccagccccctcctttaatgatgagactactgagcccagcgaggttgaatgattcatctaggttacatggctacaaggaagggtagacaaactggactagaatagacctcttaactcccaagcctgtatattttcaacactattacacattactaatcatttggaaacatttgagccaaagcaggaaccatgtatcataaatgagagaatcttagcaatagaagagaccttggaggtcatctggtgccatctcccttctgaggcaggaatccttttggtgacgtagctgacaaatggccactcatcctggcttaactctagtgccaggaagctcagtatgttacaggcagcttgttgtgtctttggaaatctctacatattggtaaatttgttcggacagaaggtcatatctgtaccttgaaagtatcaccccattaggagtgagggtgaccagaggtgagtggcatggtattggtgatggtgagaagttttactctttttctcatcttaaaataaggatagtaatgcctacctctaaggatcattgggaagactagagatgtggtttataaagcatctaccatcgtgcctgcttcaacgtaggtattcaaattgtaattattattgacttttatcatcatgattacatttttgaaattatgccctctggctgggtgccgtggttcatgcctgtagtcccagcactttgggaagtgggtggatcaaaaggtcaggagttcaagaccagcttggccaacatagtgaaaccccatctctactaaaaatacaaaaattagccaggtgtggtggcacgtgcctgtagtcccagctactcagggggctgaggcaggagaatcgcttgaacccaggagacagagattgcagtgaaccgagactgcgtcattgtactccagcctgggtgacagagcgagactctgtctgaaaataaaaaacaaaagaaattatgccatctggagcaacacagactatgtctaatcttgcaaatattttaaagcagttagcatgaccctttaaatctcctcttcagactaaatattctctgattcttctgctcttcctgtgatatattttggatgcctttattcacacttatttgtcaattttccccctaaaatgtggtggccaaatgtggccaatccaatgcactctacaatggaataattacttctctagatccggatgtttcacttctcctaaagcaacctagatttatgttagcatttttggaggccagatcatacagttggctcaagtaaaacctgattctcctatccagaacattagctatgcctcccaactttgtgtcaactgcagatttgacaagcatgatttttacatcttcatccaaactgttgataaaaaatgttgaagaagaaaaggccaaaagcagctttgaggaacacctctggtctttccctgcatattgacatccatccatccactagtttggtgacattgtttcaccagcttcacatctacccctctgtactatcagaaataactcagcaagatagagtcactctttgtgtttttgaaattggagacttaatttatctagaggtaaaacgctatttctttatcaatgaagacaggttttgaacccataattgggacaatgtgaactcaggaagtaatttcatgtttgagttactatgtaaagcttaaagaaaaaaaaatcgccttctcttaatgtgaagtgataatgcttttgctgggttgtttatttttccaaaatgttttgaaattactctctgggttttggagaagactggagaatttgcagattttgtgtgttgggtagagaagagattacaggagagttagaatatgtctttcaggagctttttccatttctggtagagatcacagagatgaagagatgcctttaaagtgttgatgaaggagagtgttggatatattcctagatagtgattagtattctttttggtgattctcagagaagattcttaaacttttgggggagaggggattacttctttctcttatttaacatgctttactctgaagaaattaaacctattctttgtgccgcagcataagtcagttttctttgtctttttccatggtggatgtaaacaatggtggttgtcatcatttgagccaaagtgctcaaagattggaagctcaactctcagcatcttccttcattggcccctgtaacattttaaaaaaggttttactttttactatatattcaaggcttgtggctttcttcttaatcctgatcctctctttttcctcagcccataactgaaccgtaatttaacaataccttaatatctaaaactgcattattgcatacttgcagattgcaagatgaacagacaggacattagcactctcgaaaattgaccagggaacaaaaaggtaatgtttcatcatatggaatattctaggaatgttatagttcacccattcactcaatagttattgagcactctgatatatcaggcactaagctaggcaatggagacataatggggagtaaaatcagatttagtttcttctctcactgggcttaccgtctaggggagaaacagctattaatcaaataatcaagaagaattgtaaaccactgtactgtaaaggaaaaggagatggtgcccatcacttcggtgagtgtgggcaggaaaggtttgcctacatgatgattgattctgaggtctgaaggtggaggcagggcaagggcattggcgttagaaagcagcatacaaggcccgatgctggaatgcagcatggttagtacgagggtaggaaatatctagaatgtggaatgaatcacatagagcaagagtggaggtggtgtgagttgagctgggaggtaggaagggtcccacacggacttcagaggccatacaaggagtgctgacagtgtcttccaaaccgatggcttagggtgtgtgttctggggagtgggtgggaggggaacctcacaaatgctgtgtgtaatgtgatcacttttgcattttgagatcacagtggctatagtatgggaaaaaggaggaaaagaagccagagtgcatgaaggagaacattgtctagacaaggatagaagatgatggcagttggttataggttggtggaaggatggacggaaagattggaagagatgagggacacttagttaaatttgtaggacttggaaactgcctaagagggtgatggaaaagaggcatccaggataattcaaggagagtcatatgtcttatatttttctttgcgaatttaaagattgtgatcttaaaaattaaattgtacagcatcaataattctaaaaggagagtcaaaaatggttctgtgccttggatctattattgatagagtaggtgactatgaacaagatgaaaaatgttaagtgtctttgaacttaaacaatggactaaatggtacctatagtttctgacctcctcaagacccagggaaataagtttgtcaaggttcagtttcaaaagaaataacacaaatcatttttagtccaattctctaaatctctagatcctataaaaaaacgaaagtgtgttcctgcactgccaccaatgcacattgccatttcctttcatcctactttacccaatcatagtgttttcccacatcagaaaaattttccagtgtataagagaagcctttggactgtgagtatatataagcctgttcctgcctttggggtcccacaacgacacagtaggctcacagtctaagccaggtgcccagtttccatctggactcctgacaaactgtgtggtcaggatttagaaatcagaaacctgggaaaggtgcaatgtgatggacacagccaccccaaataccgtatatgttatcaccatcgtttaacacgtagtgcaggaaatccttttctttgccaaagaacttcaaaggaccacttctagttctcttgggtaacatttattttttctttgctaacaccaaagcgcagacagatacatattttttctttagtaaattgctagtggcactccatttttttccctcccatcttcaacccattgtccaatagacctcttaaatttccccacccttctaggctgaagagctgtatcttgccacttataaagacttacttattgcccttacctattactttgtttggccaagcactttctctttcttttcttttctttttttttttcttttttagagacagagtctcactctgtccctctgtctgtaatgtggagtgtagaggtgtaatcctggcttactgcagcctcaaactcctgggctcaagtgatcctcctgcctcagcctcccaaagtgctgacattacaggcataagcactacaccgctttctctttctttattgggttctaaatttctttctcacctttcggtcccaatgtgttgatcagccttctctgctcagtgtgaattttctctgggtgtctgagtaactttcttttctatgaagacctatctcgcatattttacttacttttgaattttaaacatataagccttcatttgaaggcatcagaaataaatacatgatattaggtcctataagtgactcagacatctcatgttctttcactggtttattcatgctattaatatacatctgtggaatgcctactatggtccaagcaccacgggatagagttgtgaatacaaacatcctatgttccagaggaaaagacatggaacaagtaactagacgcttgattattgttctgtgtttccattactccatgcattgtgagagatggattttatgaaaatacagcagaaagcggcaactcttattctgatcgttggatcccatatgtcttgtcatgtattccaatcacgcatcctcattccacaggttgttgagcttgtgtcctcagtcctgagattatgatttggaaaggtagtcgttttcttaaaaaatgtatatatatggttgggcactcttataggactaaaaatgaaagggaaaaagccagtgtgcttgtcatgcaaagcaggatgcagagtgactattcactaaatcacagtattatgcacttaccacaaaaatcattttcaaatctgatattcatccttcaagtcagagaaggcaggcactaaatatctctgatgcaaacctcacatcaggatggcagcagagtggtaaggaaactttaaggcattttctcacatgctttactctaagggtgagtagttatttttcatctcctcgtagctgtatgttataacaagatgaatgggcctatggcttgccggaagccataactctctatgtagttgacatgactagattcccagttttggcctttgagagcttgagagtagaataaaaacattgactcctcctgacctttcccctgtgtcttctctgggcagaatatctcgatgcataatgcagttggtggggccatgacggggcccggaactcaccagcttagcagcgctcggctgcccaaccatgacaccaacgttgtgattcagcaagccatgccgtcgcctcagtccagctctgtcatcactcaggcaccttccaccaaccgccagatcgggtaaggagccctccttggctgcccctgggtcctggctggaactcaggaaatgtcctggacttcctcctggtttctggtgctcagattggttggtttttctggctgtcatgatattgcctagagctcagagtgatgcttttgatgggagaagggaggagtctctgcttggtagaagctgttttgatcttggactttgggtggtaggggtagggtggggagcaagtcattctgtgtcatcatttcttcagacaagatttatgaactttaagatgactgtgggaaaacccatggttgttatggagaccagagtatagtgcgcagaacaaacatggtggagggaagttctaccagctcagccttgtctccaacagagtgtgcccttcccttcctgggagctgccacactcatcacctcatcttctgtgtacagcaatccctccctgtccgtgagagataaattccaagctgcccaatggatacctgaaagtgcagatagtaccaaaccctgtgtgtgatatgtgttttccatctgataactgagatagctattaagtgactactgggtggggcgtgtccacaatgtggacacggtggacaggagggatgattcacatcctggggggcatagcttgggacagcatgaagtttcatcatgctactcagaatggtgagcagtttaaaacttgtgaattgtttatttctggaattttccttttaatatttttggaccacgattaactgaaactgtagaaagcaaaaccacggataagggggaccaccatatttccacagtcgtcccgccctctgcttattcttccctgcttctccttcttgtaactgcctccttactagccctctccttcctgttactgcctccttattagccctctccttcctctacattggtccatgctgatttctggagtagacaaagcaaagaaagcaggcccctctctctcatttatgcaaatggtcaatactgaggcattgaggaaaaattggtagaaagatcctgtcattgaacaccagatactccatgtcatgtgatggaaagagctttcccttctgggtatcctgtgttagctctagcccctcgcaatgtgccaagtgtggtctgaggatccgcagcgtgggcatttccagggagcttctcagaaacgcagaatctctggcccagcttccttatccccagaatgaggatggtgtctgctctttccagcctcatgagagtaaagatgaaataaaagatttaagagcacatgggttcttaggaagaaaaggtaataactttaagccaaagagctgtgatacagttctgttgctggtcgctgagaactggctgctctatgcttccagaattctgtttaaaatgagaaggggcgcttgctgtgtttggtatgtgcatcaacattctgtttgaattttcagtcaaatattggaagtgataattaaaaacttagaaactgctccacaatttgtcagtaggtcttttccctcttgtttttcggtgttataagaattccagacctgcagggaacactggcttattcctccctaggatattccagaaggggcaccttgtctcacattttcaacttaccaggaatggctgtgatacgttaagacccaccttaagaaatgagagtaatgggtaatgggtaatgaccattttgtgagtttgctgtgggtgcgtttggttttctattcaagaaacagaacattaacctggcccttcgaatgctcggctttgttgaaaggagtcaatgctaggttggtaagtgtctctgctaaagatttcttttcttctcaaatgaccatgagagcaaatgttgctgctatctaaatcaagaacccatagagtgctaagagggtggagtagattcattaaagacagcatctaaatctccagggacttctctcaagtggcttggctttcagcagacaattcacagttatgccagctaattataattattttatttttctttcaaggggaaaaaacataaaatgtgctagagtttactagcagttttacagcattccttcccccctggagttctcctgcctccctctccctgccaccccccaccaactacccttttggaggcccttagtattcagccattgttagcacaaagctggtctttatgaaacagtcttttgagggctagcaataaagtttaagatgagtgctgactctgttgataatttacccagctggcccaggactgtacatttgggtgacatttgtaggctgtgtcaccatgcctggatggaggcgggtgtttctgtggtatggacgccttttggacacactccatcttcccatttattctccagcctggggtgttgtgtgtcgctcctggtgtgttctaggagataattgtcacttttaggactctgtctcattgccaagcccgagggaggctatttcttttattcagattcctccctggtgtgtttgccatgttgattcaaacccacacatcttgtcgtttccatttttctccatccaaaaccttgcccggatgatcctggagactcagcaagaaataacccaacccatctcaccagtggattcagtatgaaactctaggtggtaacatttggggacggttgactcttttatttctctcaggaaagaggaaatgagtacttatttgaaaacacgagttccctctggagactgtgtctttaaatgagcatttgaaattgcagatagctttttttttactttattttttttgaggctgcacagaaccatattgtagtaatattctgatttttatcacaacctcaaatatttaagtgtcaaaatctggccaagccacctgcaaatgtttgccatggctactggccaagaaaaacagcaaacagcaatgaaagtcttcattcaggctcagtgcttaagctgcatccagccagaaaggctgggacccacctgtgcccacgcatagtgctcttgtgctgcggccagcgggtgtgttcatggctgagactttgtgggagaaggggccacctggctcctgctcccccctcttcccttcccttctatcagtgcttggctgctgcaggcaaccccaagttttcgctcttctctgtctccctcttttcacagtacaaaatttaagcttggaggcttgaatgtattgagagagctatcaacataaaggacttgaaaatgggagtagtgccagttatcagggaggactttggggacaaagggtaggcatcctcataagcatttgattttcatgctttttgaacaggcactgagccaaaccagaccaaaatgagtgcaaatgcaaaaatccaaagaagtaatgttaaaaggaagtagacaaacaacacgtgcaacttccattccataccacagcaatccataccatgccctgcgctcaattctgtgaaagtagtgccattacctcaatagaaaccagaggtaaatataaatatctcaaattgctcttgtgtggttgggcagactagaaaaacacacagctatggagagtgtgggaggcatccccaaactagtgactacttgtgcttagtcaaactggcagacgctctgccgggaagagtgtctttggctgattgatggtagcgttttcagagataagtttcccagatggaaaaaaagagtgagccatgggctgtggggaagacaagtgagacagaaaacaagcatgtattaaatagagataaaatcgatccagccttgaaccaaatatgtggcagaatccaaacagtatctctcctccagtcatttttattagctatcatgtaacaggctcattaattcaggatcaagtcagcaaagcctgggaaaatggcagaagggtaggtagcactactggaagttaacacactctctctgtctctttgtttcttatcatctaagacatttttgtaggagtcaataatccgttgagtagatggctataatcttaatagatcccagctttcttaactaagttgattcttctttatggataagtgatagtatataatttacactcagtaattcttcaggagagcaatgaagataatatggaatttggagttctacaagaatggatatcagtacagagctctgacgggttatgggagacgcttccaaaatattctacatatttttttcttaccttttacttctttgtagggcactggccaaatatatctaacattagaatatacaaatgtggagtattctggttaagagaatgaattggccagctgcatcaggaaactcagaaatatgttcaacagaatgcatatatgaagacatttacgtaaaaaaaccctccctgattttacaccaattttaatcctggaacatatatttccacatgatgcgtaacttaggcatttggttataaaccctatttgcatggggctgtagctagacaacagagacataaaacttagccagaaatttatataaaatatcatagaagaaaatcttgttttatgtaaagatgaaaaggtgccaagacttataaattgtacctcctcttaccttttctgtgcctctttatcccttttctctttgcaatcccagatgctatgtgtcatgcagaatattagatgtagttcaatggacatggctgaggaaaacaaacaagcaaacaaagaaaaataataataaaaagaaaagctgattacatctcaaaatttgttggtggcagaagcaatgctacgagtcatgtggctttgctgtgtgagttcacgttcctgcccagtgttccctcaagatgggaatgttaatacatttgagggttttgtgtcattgttgctgggggtggggaaagaacagtagagaagtgggtaaatgatgccatcactgaaggtcatggcttaaagaagacctaaatgacaaagcagcttacaggttaagaatgtgtttgccctgtcaatgcatatgcgtatgaatctatttttaagagcttcctaaagctcctcaaaccaaagtgagcatgagtaagactgtcgctatctaccacaggctaatgctggggatattcaggccagcctccttcctgctggagacagcggggcagcaggtcccggcttgtcactggtcctcagcccttagccaggacaacttgaagcccctttgagtaatgcagaccagaagtcattatttcctgctttgtgttttgctgaatatcacggctatgaacatagctttattgttggaaagttgctgtatctttcacagccccgagaacatttacgagggcccttctgggggatgctttctgggagggttgacagacttaaccatatggctcccgttaaatcccatgcagagccttgagaaattacctctgacaagggggccggcagccttccactcacggggttttatgtgtggaacgaaacataaagtactgatacttgaggaaatataatgtttcttaacattcaaaagttgtaacaccacatggtattgtggtcagatgaagggggtagagccagaacatgggagcaaatggctgggtattctgagaggcagaaaaataccccagctctcgtcttcgaatctggtccttgcctctgattcttcaggcaagcattgtgtcttagtgtcatctcagcttcccacctggaacacagcaagcctgctctactcgggagagaaaatcagaggtaactccccaatggctcaagcccttcgttagaaagggccttgatactgacactgaagaagagaaaggaagctaatatttattcaggatctactacgtgtcaggcattgagctagctttgcatgttatttcctgtaattcttcaatagctcagagaggtagctgttatttaccccaatattattgctccaagaagaaaagtaacttgtccaaagtcacccagccagggagataaacagagttttgaatatgggtctattggactcaaaagcacatgtttccccatgctcctgaccgtggcaataccagtgccgtggaagacccatgactgtgcctgagactggcagaatcatctacaggagttagctaatgctcagtctatctgtttacagtgtcaaacacttcatcccctcatgtgtaagaaaactatagcatcacagagaagtgatggccctgtctccaacatttggttgctctatatttggcttcttagcttgcaggaagaccactattccctgcccaaatgcaattcaacttccagatttgttccatttcctgaggggacagttggctttgcctgtgagcttttcttggaggaagacttcatttctggaacttctacacagaacctggccctcagagttcctgaagcttccatgtaagtgtctcagtgtgcatttcctccctcctatttttggaaaagataggcacaaatgagggactacttctacagcaaccagcctggaatcattctttctgtgcttacagtaaatctagacatttgttcttttgtgcagcatattgaaaagatatgcctggaatacaagagcttgcttggagcaaaaccatggcaagtcagaggggagtcaaggaaaagcattgtcatgggttcagagttcatggattttagacattcaggctctgccatttaaaacatttgccaccttggctaagcgctcagcttccccaggcctggtttcctttacctacatataaaggggttagccaattaattgagtcagtctcagctccagaattctcattcactgcctcttttctgtctcaaatttattctctcttttggttgttttcttccaggagccaagtttggcagaagctctagattatctgacctcctagatatgttcacatagcccagagagtgagaacagaatagggtttgggaagagaagcccacggcagtaaaagggaggggtcctaacatatgaagtcagagacacttgacttctaggctcaactcctaggtgaataacagcaacctcttctctttgtcaggtgctgtttacaaggcacatctctactagtttggcatgcatgattctgttacccaggaattaatacacccattttgcagttgagtaaagtaaggttcagagattaagtgacttgccccaggtcatagtgataatggccagagccagaactcgaatccagaccacctactccatgcactatcccacagttcccaagaaacttaactttcccaggtttaagttttttcacctttaaaattggggggtggggtaccactagaaaattcttgaagttcttttcagcactaaaatgttaattattttcataatgaatttaattttgtaaactacttggtaaggtaacttctctggggactcagtgctgcgtgtgtgactaggtatagcttcctctcttgaagtaatcttatcaggaaattgttcttttattctcactctgctaacagtggcttattttcggagctttaactagaaaaacaactaaaatagtaaacatgtaaaacaagtccaacgcaagagatctggatgatggttttgccagagacagttctatgggaaaatgcagtccactgtcttgtattctagaattattattatttggggaattattttgtggaagatctgaaacacagctttagctcatatcactggttagtgtcttcctctgtgtaagccttggataaggtgccatgtgagtgaatatttgggaatgagagtatgtagtctcccataacgcaaactgaaaaaattagctgttcttttctgtacttgtcatagttcctacatcaagattggctcagtatttcctgtttacaaatccagaagcaagaatgaaaacctagcaggttcacatggcttgtggtgtttagagagagtcccatgactgaatataaccatttattgaagaatatcaaaaagagaattaacatgggaaaatgattagtatgtgcagtgccctgtgtgaactgaacatgttaggagaaatttgaattgaacctggttattcagagctggtcctttggaactggaagtacactttgcttttttgaagattgaacacgtccaagtaatagggcggtgtccctgcgggcatttcagatatttggagcttttatattctataatactatatgtctcctaaaatgtaaataactcttgtctgaactgtttgatagattctgaattaaaaaagaagcattaatctagaaatttggagatagcctatgatgccctttgcatgtatgatatattcatgtaatcagatactttgagattcaaaagatagctcattcaacagcttctttactatctatttttcatttatgtttcaccaaataaattttctctacaatcatcttttatatcctttctaatgaagatttaaagattacataaacaccattagcattttacctttgattgaatcagaataacacataaacatccaatttgatctcaaattttgaatgtaaagggaatccttgatattaagattctggtatatacagatggaatcctatttcaatgaggcagtgcaacatcattgctctagggatagaaagccaaggctggtgactctgactgtaccatgcatgagctctagactttgaacaggcttctttaccttgctgggggcctgacttttccatcttgtaaaaagaaagaatgaaactaggttgtctaataaatgctttctcgtagctcaaattcccaggaattctgaaacaagctcttaggaacaagtgtgtttccttatcatggctcacaccctacaacaacactacttggctgacatagactgctgaagaagaattctacaaaacgcattcattcacatttagcaggtagtctagtaatccatttgccaggtatgttgtgcttttggcaaatatcaactaaaagttcctgtagtgtaataaacattcttaatggtaccagacacatttcaaggaatttggagttttatagttttcccccctttggcaaagtgcattttggctgatgattaggccagtaaagtctgtaaaatgataggacccttgtgagcattgggtagcgacatgatggaatgtgcttggtttgcttttgcagggtcacagaactttgcagagaacagatggccccaaacatctttgaaatgctagaaatgacttcctgaataaccacatgcccatcatatcttggtccagcgatggtaattcacaagccaaacacacagcactttacagctgacctccaatgtattatttttagtctatggaatgcatgaacattttctacatgaataatcataatgataactggaacctggaagagcaaatacccatccccgaatcactgagccattgaacacttgtcagatgagcaatgacattcttagaatctataggggcaggaggctaagcatttgaccgactctcagggatctctgcttagcaagtcacttcatctcatttttctcaagagtcttgctcaaattgcatatttaaagagataagcagtaaggtactagattaaagagaaggtaaatgaggtagtagctgattccattccagtattgtttgggttgtgggagggaagcctactggatgaatctgcaaactcagtgaaaccagtctacttctaaagtccttccaaagccccatgttgagtcagtgtatatttaaatgccaaaactaaacaaaaggcaacctatagatgcctactccaaatcatagactttctaaaacattgaaagaattaatttaaaataattcaactaagcttcatgctgttagaggtgactgatgaattttacagaccaggtacacccaaataaaaatctgatgaaataaaagtctggaattggagaaagttgaagacttttaactaaaaggaaaatgaggggtgtctgtgtgtgtggggggggcatgtggtgtcaactgctagatttgtcccaatccccccccaccacacacacacacacacacacacacacacacacaatagatagctgctacttatttaacgcagctctgtagtcaggcactttgcagagaaccagaggagtgagtttgtcgaaatctcatttggcaaattggtgtgtgtgtgtgtgtgtgtgtgtgtgtgtgtgtgagagagagatagacagatttttataaaaagagtgtgtgaaactttggctaccccacctgaagccacagacaaacagccttatattggggccactgcattccataattattattgccattaggaataattattatttgcttggttgagttggcagtttggagcctgcctgagacagaggcttctcaaaggagccacagaacacaaaggcccgaccaatcacccacaagtgcttcaacatgtttggacgatgtccttctcttggttcatttcattgggtttcatacccattgagcttcaaattgaatgaaaactgcatcagatacaaaaccagcatgaatgagtgctggtactcaggaagcttttttgattggaggtctgaattcttggcttttctcaagtctggagatgaaagttaatttttttcatgacactgtgttcctctaattaaaaatagaaaaatgaataacaagatgggtcttcagttagaggctaggttcgaaacagtctgagagacaaagtgcagaagagtgaggaaacccccagccaaaaagcagcaaggctgtttaggaggcagaacagtgacaacttgaactttactttttcccaatgtgtttaaccttcttgcacacaaactccagattccagattttgtattatttcttctttcctttgctgtatcattttgaaataactgtgcccgaatattcctccagccttctttagggatctcagagaaagtgtggccaggggattttttaaccagcggagtgttcacaacagaagctgcgcctggtgaaaaggctcaccaagccattaaagagaaaagagtatgacaagacattcttccagacgttatttttcccgtagacttggttggttccttgccaaggcctgtaccacagtcacaggcagaggcctgcgggtgcttaaagagaatcacaaacgccctcaagtatgggtgtctctctcctcccctttacctcttcctcccatagtggttgtttgtagctcaagtggttgaatcagaccctcaagagcttcctaagaaaggctgaatcagaagaaaacacccaacagcctccagttattgtatcaggcccactacagtacagtgaaagttagctttgtctccacaggcacccaaacaatctgtcaagcatcgcaaagccaactgtgatttttagacagggcagggaagacccgggtgacctcactagaagcaagggaggcgccatgtctgggtaatcaatgccctgtctgcctgtcaagaatgcaggtgacttggtgcacaccttctcacagatgtagtgccagggtggggtgagaaagaagaacctcctctcccattctaggcattggaaagatacttcttttgctattaccctttgcacaaaaggttctttgggtgaatgcccctgtacgaataagaagtaaatgaaagttgcactgtagtgatttccggggatttgtggtcctggatatttatatagaaaaactgtttagtgggaaaatattgcaaaggggcattcctgtctgggtttttataaaaggtgacaaaatagtgctgtaaagaaacagaaatcccacactttctcagtagtattaaagcctgtccttaggtaaaatttcatgggagtatagagttgctgctttttcgtttttcatttgttcttggaatttaggggtagagaaaggccaagggaaatggccttcatcagcaaggagtttaataaagacagaactttaatttgttcattctcaatggtaaccttcacggggaaccacatttttactaagtcacagtagtgtattgtttgtatcagttcttaatgagttccattgttaacttttacgtcaaagaccctgttgcatcaacttctttttagtcttatgataggaagcttgttttcaaggtgtttccatgaaaagcatttgatccttcatatttccgtggtggatttctctggaaagttgggagttttccaaagtctaactgttatatcagtttttatggtgatgggtctcatttttcttgtagtatacattatcttctctactaattgacttaattttcagtccttatctccagtcaagaaatgaaaagaacttacaaattttgttaattgtactgaaattagacgtgtggtgagttttagaggagcgtccaaacagaactggattccatcagagccttgaggaaagttagacggcagaccccaagggagaagagggcagaacacaggctgacatatgacaattcttgggaaactgtttaaatttcttgggaaaaacaagataactgatggtttttttaaaattaaataagtaaatagcaggcagatcccagaacattgtaatgtgaaatctaggtgccataatataaagatgaattattaaaatatgggcacctcgaatccactaacttgggcccaacagagcctgcccaggggctgccaagcatgaggggtgtggagattggccaggtgggcagggctccccatttcccaggtatgtcttcaaccacagcagcttcacatatgtgaacttagttgggtttccacataagcatttctttgaacaaagggctcttcagcaagagcatagtttgaaaactacaaaattggaagatgcttttttctctatgtaccacaaacaagaggaaaagtgaattattgggtatgataaagcaagtaccatcttaaagatcaatttccgggagaaccagtgatgccatcatcatcatggaaagtggatgagattggacaggcaagctgtggcttctgaggtgataggtgattgaggggagaataaaacatgaaataacttctagtatttggatgcgagggaagaaaatcatcagaagggaaacatagagacttgatggggatctgtccatttcaatctctcaggaaagggtagaacaacaataacaaaggaagttgtatcatttcagtctacccttttaggcagggtacacttacacatgattgcaagaaggtgcccacagcactgagcttcaagaggagcagagaggcagcattcatgggcagagccgcctgtgcttcagcctccaccttcatttttatttttatttttatttttgagatggagtttcgctcttgttgcccaggctggagtgcaatggcatgatctcagctcaatgcaacctccacctcctaggttcaagcgattctcctgcctcagcctccagagtagccgggtttacaggcatgatcccccacgcccggctaattttgtatttttagtagagacagggtttccccatgctggtcaggctggtctcgaactcccaacctcagctgatctgcccgcctcagcctcccgaagtgctgggattacaggagtgagccaccgcgctgggcacagcctccaccttcaacctgcacacttccactccactttttagtttagtctgccaggatttcactgttatcttttcctctctcttcacaatttcacctctaccacagtcaagcccgaactctgccggtgggaatacctcacggaacgcaatgatgacttcctgaggcctccttctcagtgcccagcccctgggacagtcctttacttcttcctccttcacaggctcagagtgtcctcatctcccaggcgaggccctgtggttttcctctttaattattgcatgtatgttgtcatgatctgaattgtgtcccctcaaaaatatgtgttgaagtcctaacccctggcccctgcggatgggacctgatttggaaatagggtctgtaatcaggttaagatgacattgtggaggatttgggtgagtcctaaatccaatgagtggtgtccttataagaaggccatgtggagacacggggactcagagacacacagggagagtgccatgtgtctgcagaggcgtatattggagggacagagctgtaagccaaggaacgccagggattgccagccaccaccagaatccaggagctgggcatggggcaactttccttcagagccctgagaaagaacccctgctgctgacaccttgatttcagacttctaacctccagaactgtgaaaaaatacatttctgtggcttttaaaccacccagtttgtggtaatttgtgactgcagccctagaaaacgaatacatgtgtctccatgtaattatggatctatctgctttgccaacggaatcgtggttaaaaaaaaaaaaaactatcactccattctcattttattgaactgtaacagatgtgggggataaatacattaagagaaaaagccaactaaaaataaaaacaagactactttctggagaacagctatcttgctgttgggacctgtttggtgagatgcccccagttctttgttctccatttgtacagaaagggaacgaagaggcctgctctagatcaaacagatccacagtgactatcttctatgaaagatcttagtagagatgcattttacctgggctgcaaacctacactgccataaacatccactttgaggcaaacaagggagttttttctttagcctcgaatgttctgctcagtagtagttgcgggattctgaagcacacacttcttgttgattaagctgtctgccctataatttgcaaagaatggaagatcagcattgtagagaggtatgggggcttttcaactcagccttctaagatgttcttagcagctaataacattccagcagccctgaaccaacttcctgtgtggacacagaaggaaaggacaccagggacttacctggggaaggagagcccagggtgggccttgtttttccgtgtgtgtgtttgtgtgtttctgcagacactgagcttaatcactgagaaatttcttttaggtggtgcctaatgcatctcagcccctcagccggagggctagggctcattttcgtgaccgatcagagttttaactgctgtgctcctaatacatgtttttgaaaaaggaagtagcttatgtgacaggactgttcttttgatctgttaacttttcctaattctttttgaagcgtcctctgccttattccctggctctgagtgatttaaaggcaacgtccttgagtttatatgctcccagaaacctaatgctccgagaaatccaataaagccccaccaccagaattgttctggggcatgagggggcaagagatgaccacccagagtgagcccgcatgggagggtgttaaaagcaactagacatattcattgtctgaggctctcattgagtcaggatgggtgcaggctgcagacacctgtgcggtcggaactaggttaacgattacttgaacatttgaaaatttaatactttcagtcagggaagtgtatttacctttgagcataacagataataaagggcccctttggctgcataacctccctatttgtttgaattctcctatctttagaactttgcatctttttttggatggagtgatcctgggttttctgtttctcaagggctcatcaaatcactatgtcatcttgattcccttactatttttaataagccagaaaatggaagcaattctcccagtcagaccactgagttggtttgaagggacacctccaaaagcccatgctccttgtggtcctcactgtcacgggccagaaatctgtgtgggcatcttccaaacccatgtttctctagagccctgatgaaagacccctcagtgagtgtggtggctgccacgacaggaggagaaggggaggaggcagcgagttcccccaaagaagctcagagctctgggaggggcccagggtgttcttttaatctttctaaaataggaattagcaaaatgataataattgtaaagaaacttcccacagttctaccccagtaaaagcaatagggtacctgtccctgccaggcctctggacagcccccttccctctccagctgaagtctgacctcgggctctttgcatggcttattctattcttttggagctttctcacatccataaagagtagagaattataagggcgaagaaaagagatcagagtaaacttaatcacattcaccagcaagcattttcctgtggtgtgatagagagaagtggggaagcaacatgaattccagacctcgaaatcattaaaaaattccaaactaaatacaaaacaagttctaatttaataagccttctaaaagtggtttgtaagcaaactccagtaataatcacattctgtctggcagcaacaagtgagaaagaatgggacgtcccagcgtggcctcagggcatgtttgtccatcccacaaaaccaccctttggtttggcatcacttttcccacctggcaaatgcctggctcagaagggctgcggaccagagtgtcctggcagcatcccacagggcatttctgatggcaaaaatccagacccaaggtggaaagagtggtccagccgttgcttctggaagtctcttgctatgtgaccaaccaagataacatcagaacaactcaaatgtcattacaaaaggtggattgttacatttatgggattctaaatcattcatgtatttatctatacttggcttcattccaagaaaaggatttgaggagactcagagaaagtacagtacaacaagattaaaagcaagacaaaacaatctacagaagaaaggaaagtagtattagagaattctgagactgaaagacactgaaatggtttgctgctaatgacatttgtcatgattgctggcaccttttatgtaaaatcagcattgaaatccaccgatgcagggatcacacagtggagcttgtctctggtactgcagtgggatttttctgggtacatgctcagcctcacctcaccattgatgctgtgagtcatcagtgcgctgtttgggaacatgtgttaatgagcactgaaagagcaggccaaaggtagcaggattcttcgggagttaaaaaaaatacattttgtaaaactaagcagaccattgtggaggtggactgggctgggggtgggggtgggggaggagagactcatattaaaatcctgatataaagttctaagcaatgaataagaggcttaaatacataaagagcaaggctaaatttggaccaatttcctgtgaaatctcttgtgtaatattttcaatttgtgcttgtttaatgtggtttattttcctaaggttcacggtataggttttaaattcagccttgactacacacatgtgttgagaggttataaaacgagagccagctcagaccagtctccaactggatgccctttagtggaaaacattacctccttttcaatacctaaaatgtctccatgggcacagattttgccctttccccatcccatttcctgactgcttttctaccacctggttttaccagtacttgtctagttacattagtgtacccaagtatgctatggggagctcttcactgcagatcaggggtccagggctgtttggggccaactctctgtgcaatatcatgttcttgacacaaagggataattcaaccatttgggttaaaatagaggaaagatctcaggctctccaggagactctgatctgcagtacagcattctaattttggtctcttggtatcctggatcacacaatcttttggagggggccatttcctatacgtagcggtactgtttctggtgacttgaatacagtatgtaggacctatattgtaaagtcagatcttaacaaaacaatataaggcctctgctgttcatggtacttactacatcagatcccatgtattatagttacatggggtttgtttccacataggttttaagtctgtaaagcagaaattgtgctttattcatttctgaatctcctaaacgcccagcatgttatctagtacggaggaactatattggtgtaagtatgcatacacatatgggcacaaagggttgaaagagacatcacatatgtgcagcttcttaatttaaacagcaagagatcaataggtaagataagtagttgcaaaactgtttttatcttcttcagtacctttcaacaaaatacgcatccttcattcagcaaatatttaccaaggacctgtttttctctggggatacacaagccttagagccttccaagtctaggttccaaaaccatgcaaaactgtacacagttctagctttcatttgcagctctgcctatgacacaatgtgcggcgatgttgaaatctggcatcttctccttgcccctgctgtattttcttacctatttttggcttctgttttctctcggcatgagaatttttttgagattgtgaatctggattagaagtggtcaagcagttgttctccaagcctgttttccctggaagggacaacattattattggccagtgctggctttcttcccagcaacgtagctcctctcttcccacctgcccagctttctaaataagtgtggagtcagaaaacgagcagcttagaaatgtaagactcactctatggtcacttttccttgacattctactttgaaacatttcaaacacatagaaaagcatgaagaattgtatattcgccacctaacattctacaatggctctttgctatacttgctttatcatatagctgtacatctatccatccatcagtcttattttttgatgcatttctaagtaagttgcagacatcagtaactttactcctaaccacttcagcatatgtatcattaatagagttgatatttgggctgggcgcagtggctcacgcatgtaatctcagcactttgggagaccgaggtgggtggatcacaaggtcaggagatcgagaccatcctgactaacacagtgaaaccccatctctactaaaaatataaaaaattagctgagtgtggtggcaggtgcctgtagtcccagctactcgggaggctgaggcaggagaatggtgtgaacccaggaggcggagcttgcagtgagccaagatcacgccactgcactccaggctgggcgacagagcgacactctgtctcaaaaacaaaaacaaaaagaaaaagaaaacagagttgatatttctttgtggttctttttgttgctgtttacaaatagcgaaatgcataaatcttgagtatatttctgccacttttcatataggatgtgattttcctttctagagtctcttattattgaaaggtaatcatgaagatgaaaaaagattctgtaatatccacggtttgtatatttaggtagtgagtattccatttttttctctgcattaggagtatttattcaagtgaggaaggagcaggagagaaaagggctgtgtgaagcttccatgttaagggcctcactcttgcagataaactatgtcagctcctctactccctctgtatcatctcctttgtcttaagtcttttgttgctgtgacaataggaaagacattatatctggtggtatgggactcagctttgtcatcataaaacccaaactgaaaaagtcaggaaacaacaggtgctggagaggatgtggagaaataggaacacttttacactgttggtgggactgtaaactagttcaaccattgtggaagacagtgtggcgattcctcagggatctagaactagaaataccatttgacccagccatcccattactgggtatatacccaaaggactataaatcatgctgctataaagacacatgcacatgtatgtttattgcagcactattcacaacagcaaagacttggaaccaacccaaatgtccaacaatcatagactggattaagaaaatgtggcacatatacaccatggaatactatgcagccataaaaaatgatgagttcatgtcctttgtagggacatggatgaagctggaaaccatcattctcagcaaactatagcaaggacaaaaaaccaaacaccacatgttctcactcataggtgggaattgaacaatgagaacacttggacacaggaaggggaacatcacacaccagggcctgttgtggggtggggggaggggggagggatagcattaggagatatacctaatgtaaatgacgagttaatgggtgcagcacacgaacatgccacatgtatacatgtgtaacaaacctgcacgttgtgcgcatgtaccctggaacttaaagtataataataataataataataataataataataataaaaacccaaactgaaatccaagttactctgactttggaaaagttatagttaatcactcagtgcctctgtttctcttccctaatgtgttaaaatgaagatattgccctccaagcctgtggtgatgatgccataagaacagataaaaatatctggcatatagcaaaagtcctcaatgacattatcatcatcgttatcactaactacctgctcaatgtgtggttaggagtaagtgtatttttgtgtatagttaatttagaaagactttgatgtctttcagattgccaaagttaattttttgcaagatcaatgaacttttgaggaaatactgaaaatgtccctgttccccactgttttaataaacatgagcactgtttagtctcacataaaatgtctacttttactccaaacaggatgaccaactgattttcctcaccatgtctctatcttgtgtccctggagtcttagcaagggaagagcaatggccaaagggcatcatgtttcctctacacagcttctgggtcttcctttgtagcttgaagtcacagagtgatttatttttcacccaagcataacgccattccttcaagcagtcgggctgagaggagtcctctctagcttctcatgtccattgccctccatattaaatcagccacaggttcaattgatttttttccccctctgtccttcccaggcctcgtgttttatggtggtttgcttagtaccgtgcttgtaatactcagaaaacctttgtagatttgctatgtcctgagactatttcttagaaacctacacggaggaagttcagctcttcctgagaactaagccacagttaattgctgcttccacctgccttcagaaacaataaggggagtccagtttaggactggatgttagaagctacagaagctcttccagaaggtggacaggggctaagggagactggttgttagtgctatcagaagaccaaaaaagggacaatctgagcccaaagctttcttttgtattatgtcaggaagggaagactatatggcctatctgattgtggggtgtaggaagtggaggtaagtgccaaatctgactatatgcaatgctaatatagtactggtaatactattatattagtaatttcccagcactttgtgcttgggactcataggctctctgtgtgtgccagacacttgctagaacagcaagtgaagaagccctgagggggtattctgagatttccaattgaattgaatttggatagtcataaattggatgaagctgtaatgcagaacccatggtcattggttctgaaattagagctgaagcaattctgattcctcagaccctttaagttagtcttatcagatcaggccatcacagagcagatagacaggtaagtctcagagacctctgaacccaattaaagttataccacaaagaaatcaaactcatgtggtttgcatttcagagagctacatttggtgggctgttcctgttttaattcggtaacctaatgcaggccatgtgaacatttgaaacgcttttaacagttaaaccagctcaaataacacaaaaccagagcagcaataaagaatgaattaaagctgattgcaactgtggccaacataatttttgtcttgcaaagaactttgagggaatagaatgcagaaagagagaccggtatctccattttcaacttggagtaaagcagcaggcgcttttactttttttatttcttaagcaaatgtttgaaacagattaacttagaaggtgtatttaaatcttgaagggattttggatgagggagcaagggggggttgacatccttttgaactgagaatatggtagttagtggctctacatcacccccacgcagctgggatggttagctcagtgggcagaggcgcagcactaagtttgcagaggtcaagagttcaaacatgcatggatcagttagtctcatatggaggaggtggagaagcaaaacctgttcaagtgccgtggcctgttcttcccaaatgtctacaaaagggtcaccaagaagtgagaggctgagataacaatagtgatcagttgatgtgttctatgtgccaggccctgtattaggtgcagtcagtgccagcacataataacctacttaccaaatccctctgtgtctccgttttcttatttgtaaaatagggatactattatgattcctatttcacagatgaggagacttcggcacagagaggttaagttacttgcccaaggtcatgtaaatcataaatggcaagaccagcattcaaacccaagtagtggggtgtgcatggcacaaccacagcatatcgctctagcaggtcaaaccactcaaagataaatccagttgcagataatgagggcacatggcataagcctcaacctgagttattggtcccatgccaagaaagaattaaccatgatgataaccacactcacacatatcacagcatgaggtgtgtgtaccaccatagctactcaatttgtgtcggttgaatcaagtttttttattttattgattttttaaaagatttttattttattttatttttgagacacagtcttgctctgttgctcaggacggagttcagtggcatgatctcggctcactataacctccacctcctgggttcaagcggttctcctgcctcagcctcctgagtaggtaggattacaagcatgcgccaccacgcctggctaatttttgtatttttagtggagatggggttttaccatgttagcgaggctggcctctaactcctggcctcaagtgatctgcccacctcagcctccaaaagcactgggattacaggtgtgagccactgtgcctggcctgaattgaattttatacacacatagaagatgcctccagaagaatggttggtgtgctccatccataagtggagacatttctatgaatataatctaaagaaatggtgaatgagctttgcatttatttccacatgatcctagtcactggatgggagagcagtaggtgtgatgagaataccttgggcccagcccctcaagatgtgccataggtgataactaactgcctgccacattccccagaatgtgctgacttagccagagatccaagggaggaagggagagaggacccattaattttggatccgttagtgacataaagcctgccaagtgggaaagagtaaaactataggaagaaactttatttgcaaacttttgggaggttatccccagcagcagggagccaagtaaccactggtgggtgaagaggctctgctgagcccctgactttgggttccttccggagcagcgggaagctgccttgtcaatcacttctgcaggcaaagccaagttcatctccctgactttagcaaatactccctcaggccccctgcccccacctcccagtggaggagaaatctgcctcctttctccttacaaatgaaaactggtgttgatgctacccgctagactctcttagcaaaacttagaattgtgaaccatatgtaaaaagggaaagcttatcactggtttctttcttaacctcataggtgaagtatcttagaataggtaactgttttcacagcttctgttctgttattgagagggaggagtggattcaaacactagatgaatatggtgtctgttcaacttaaaggtaaggtaaatctagttaccgccctccacaactctggtttcaaggattacagcccacttaactctctttaaggcctggataaatataggctgcctagtctttcaaacattcctggggttattggtctagttagagtgagctttctagaaaagttttaagccctcctgattcccccaggctgactctggctcattctgcagcatgcctgtgtgactttaacatgtcaatcactcaactagacggtggacacatcgtgtgcttggagatcaatagacaataagttaataattattgaagagtaaatggggaatggagcaaggcaaaatagaatgctgattaaattaaagataaaaatccattttctctctaatgaatagttttcatattagactctgtagtagcatctgctttcagagaaccccactagagacagggcccttcatacatgtgaggcccagctaaccaaaccccttgacttcaaaggagtttttagttaattcttcctcctccttctgttttctacaggccacttccactatacaaggtcacatgtttctctgaatttcacctggttcaggaacatctgttgccatagatccccttataccctgcttcagaccctgaacatcctttgggtatttctaactttagtcattcattgaatatttgttgagccctcccactccctgagcccccacagtgcaatgtctgtgttttcctctatgcctgctacatagtaatacaagaccttcacttcttaaagctagggtgagcttaatgtggtatggtgattttcctcaacttgcaatatttctcagaaaaatcttccctagccttcctaacaaagtcatgccctgctactagatagtctcatagcagcatggatttgttctttggtgggttgtggttttataagtatgcgtgtaaatattcagttaatgcccatcaccctcactatgccagatgttccatcagctcagggattgtgtctggtttttttccctccatcgtttttatagagctccgcatagtgcctgacatatagtaggttcttcatatataaatgatgaatgatcagtcaatgatcgaatttgaaatgaagttttaaatagctcaacatttctttctgcctctatctcaagtcccatggtgcacccctttctctggtggattccatttctatctcacagttgatatagcaagtaccccactgtgcaactaaacaggtcttttaggggtaaatcacttttaattttagccaaagtctgaaagaaaagaggccccttctttttacttctcaacgcttctcaccagcgtggtcttaatttcaaagctgatgatgaagacagagcatggaaatgggtctggcttatggctcttctggcagcagcaactttgggaataattgagagatcatatttcagacccattttgcacaccatcaaagcaaagtggataggaactgaggcttttgaaatcagaggggccaggccagttttcatgctaccccagttgaagttctctggtatcttaacctcggcagacagatatcatatgcctccctctggtgtggtgttttggatttctggagaaatatgatatttggtctcactttcatcgtgcttaccatagcactctaggccgagacctcctaaatcacagtatcatgcaatcccctctagctggtgaaacctaaatgttgggatttcattgtcttctccccaagaggccacctttttgaccaggtgactctcctcagtgatgatatggtgcaatttttatgagattttgggatgtgaagcagctctgtagaatgagataagtgagcagtcccctaaatcaattatgacgagtactctcccaaatcacttttactaaatatttgagcagtccggtcagcatcaaagtcagagaagctctaactcaaacaaactgaaattttactctttccaaaagacaaaagaaaggagccaactaccctggatatctcagaactgaatttcttgcattgcattgcattgcatatattagaacaaaagtatgatctacactgcaacttatttccataacagcactctgggatccagaaggagtgagtcacagatgctgagaagcatctcaattgctcatttgaacagttcatattaaattattgaaaggagaatgcactagaattgtctcttcctgttttcctatccaaatgaaacaagttccttttgctataagtgaagtcttttgaaccagttaaaagcgtgaacctgtagccagctagacctgggtccaagcctgggccctgctagttaactgctatgtgaccttggacttgtttactttcttcctgcttcagttacatcatccctaaaatgtggataagcaaccaactcacatagatgtcatcagaaataaatgagataatacatatgtaaattagttagccttgtgttcattataaagatgccaaagtgttagctattattattattgctattattattagcacataatagtgattttcaatagtgggaaggatcccagtttgtttaatgtcatgtgaaccttagggccaagataataccataggatgctagtcccatcacactcagtgcttcatttgcactgggaccaagcccatgatttggaatgaaacctgacatgtgtgacgttctagcctgagctcaagagtgtggttaatggatagttaaacctttctgaggcaaactcagaaattactagtcctgttatatattggttccattatctccttggcaggataagcagtgcagttcttttcttttccctgctacaaaatgcaggttgacagaacaatcctggaacccaagagttggataaaaatgtgagttgcataaggccttgcatttgatcctctgttattgctctctgatgaggcatagccatttagccaccaggagcagccatcctctcaggagcgacacaagagaagagcacacctctttgcaaatggaaagctgatctcctggtcttggtctcacttattctgccacagttgttttcagctgtccactggggaccctgaaaaagatgtcatttccagtgcactctccaccaataaaacgtgctaacagtgcccttggggaatgtttggagggacttgattccagatcaggaaagataaacagtgatctggagggtctggtttagatgcaagtcatatttcatgcaaataatcctgggaggagtccaaggtcagtatggatgtttcttttaatttggtgttggaccagattgaggtggaattaatgattgatcctctttgtctcatcctagaatgacatcaacctctctctcaactctagagcctccccagtctcctgactttgggcccctgatgagccacagcttagctgaatctttctgggttcacttggagaggattccctctcgaagtggggaccaggatggtctccaaagcatgggagaacaaaacaggagtagaggaacatttgtcatcagaccttttcctgccacagggaaaagagacaatacatggtcactacatttgaattctgagaaggtagaaaatggacctagaaatatatatgtatatatttggcaagctaatgttgatttccctcaaaaggaaaaggcaaggaagagagctagaactaggatgtatttatgaacttggcacatgtaagagaagacatgtgatatggtttggctgtgtccctgcccaaatctcaacttgaattgtttctcccagaattcccacatgttgtgggagggacccaggaggaagtaattgaatcatgggagctggtctttcctgtgctattctcgtgatagtgaataagtctcacgagatctgatgggtttgtcaggggtttccgcttttgcttcttcctcatttttctcttgctgccaccatgcaagaagtgctttttcaccttccgccatgatccccagccaggtggaactgtaagtccaattaaacctctttttcttcccagtcttgagtatgtctttatcagcagcatgaaaatggactactacaatgtgtgaaagggatgagcaaccattccgagggctgggagggtcttttgtgtgtggtggggtgtttttaaagctgccatcaagcatctttggacacttggcctgtggattatttctatgatcgttagacttgcttgaagaattatagcagcttttcatgatgcattgggtcattccttgtgtcccaggttaattagcactggtgagtccattaagctattgtaatatcactcaccccaacctagaactagtgactgaacatcttgtgtgccaaactccatctttgcctcactctatccatcattattttatccctctgttgagttggcctggctcaatttacattctgtgaggtgacctgatgttaagaagagcggcataggtagagctggtaacttttccctacagagtttagggggatggacgcgggggagtctatgtttaaagtaaggcagaattacttctgtgctgtggtgtattttaaaaagctttcatttttaaacaagggacaccttgctttttctttgctgtcttaagtgacttgcaacaggcaaaatgaaactcattgctttcccaactcagtatgttctgatacagaacttcagctctcatcctgttttgctggctgacagatttcagcaaaaaaatgttctgtaagaaaaagatgtttgcctttgtatagtaaattacatgagattaaaaacactcccttttcttccaatcgtgttggtaatttgatctgtaggatgtgattgaagttccagctttgaactaaattattatagcttaagcctctcaaagtttaagttgatttgacatatatacaggatatatatattatatatctataacatatataaatgtgaaagagagagagagcaagagattgtaatgaacatgttgtattgccagattttatttgggattttcttcctgaaataatgctaattataaaagatgggaaaataagcccataaatacatatacttggattttatccttacccacagattaaacttccatccatgagagtgtctggaaatacctaatagtttcataagatagttgcaggcactttggtctaatagtaaagtgggactgtatgggggtggaggtgggaaacactgtatacagaaggtcctttgcagacacttcatctgggcaagacagatgccccatttcacagcatagctccggaaaccatgcgcccctatgtgtataataaagacacgcatagctctgcactgctgcaaattagtaaaattccaacacctatttctatctgatgaatgagtaactttagtcctgaaagttccagggagacccaggtgttttgttttgttttgttttgttttgttttgtttttttattgtattagttagaaccgcatcctctcatcatcacgttgtccttttacacaatctaagaagtcagggacaggcaggatatgagaattgttacacagtgatctttaggatactattgtccacccttttgtgatgtgacctgcatctatggcagtgtcacctatggcttaatttctgcttcttataaagaccacaggggatcaataattgagttattaaaagcaatcatggtgacgttgagagggtgaagaactctgggtgtaggagtgggagtgtggtgagggtggacagcagcacttagattgtggggattcctgcttccccaccgcctttcttcccaccttcaattcagtacccccaccctttacatacctgtgtccctggatcttcctttctccatggtcctcacagcctctcttcttttacacttacctctccttgagctccctgatgtgccttggtggattgaagggaaaatgctatttgaatggaggaattgctgagtaggaaatggagaatgggtgcaaaaaccatcgactgtcctgacatctcctcccgtgtccagctaaactcgcaggcgcaagacctaaatttaatcagagcagaccagcctcacgaagctcagtgaacctgatgagcaattcttacatgcagagtctttttagcatggctttcctgaggatcctttttgggagaaaactcgctgtagcaggcaaatgctaatatttgtttaatttaattatgtgaaaactgaggatggtagggaggggatgatgaggaggaggggctggctaatgcgctattcatggaagaggtaaaaattatgcaggccagacagacttctgaagattttcgtttgcagcaagatttggagtgaggcaaaagcaacattttcagtttatttatattctattacaaataaaagttaaaatgtgaaataattgtacccctagcactatccacattgtgtcaaagccaaagatatgagggagcagggactggagctatgaaaaagtaagtttaacatttaaatacatatcctagggtctttaaatatgtgtttattcctagaggagttgtgggactcagtcactattcagggaaataaatagctaaccccagatgaacactttcagccaagagttgtgacagcctctttggcttccctgcccccctaagattttcgtaaaggatcatgtcaaccaatatgagtttcatgtatttttcttttttttctctgtccactttctagttgggggcattcaattaaaaaatgagagagcaaaaggaccaaaggaaaggagtatgtaaaattctcaagaatggattatctctctccaaatcatcaccatgttggtcttcatcttgggagaaagttggaccttccttcatttcccttattattattatttttttttttggaaaggggggctccacatagttagcctcagtagaatctattttagtgtggggtggtggtggaaaaggggatttgttctacagacatggaagataacgagaagcaaaaatccataaaggcaagagtatttggggacaaagaagggaggaataagttggaaatgaaaaaggcatttgcagggatggattttttgtagttggcaaggtagaggtcgtgcagtgttaagggcatgagctctagaagcagcccctcaggtttgaatcccgaacacaccatctgctggatgtaggcatgaccagagaaaaggtacctcaacccctatgggcctcagtttcctcatctgtgaaatggaaataataatagaggcaatttcaaaagatatttgtaatgtgtagaggagttaacccacaattattgggcacatggcaagggctcgtcatttatttgcttttatgtatggtgtcttaaaagcttaaaataacagaagaggaaagacagaattttacacttgaaacttctggttgcactggaaacatttcagcatataaagtggctgaaaaagtaagcaaggcagatcaaaaccactcagcagtcttggagattgttaattcagttcttctatctggaaaaaatagatacattttaaaattctggattctgtggaagccattgaagcattactatagttaggttactgaataaaaatctaggacaaaaaaagtatgtttggacagaaagcttttgctagaggtttttctaagtacaataagattaagacatattcttaggaacttcacatgaaagacataaagtgaatgtatatttttatacaattaatttctgaatacattatggtgtggtatattttcctgcataagggcaatctttttaaatatatactactaatttaatctgtgtcagaattcacaaatttgggctattttatttatttatttatttatttttgaaatggtctcactctgtcgcccaggctggagtgcactggtgcgatctcggctcactgcaacctctgcctcttgctttcaagtgattctcctgcctcagcttcccaagtagctgggattacaggtgtacaccaccacacccggctaatttttgtacttatagtagagccagggtttcgccatgttggccaggctggtctcaaactcctgacctcaggtgatctgtccacctcggcctcccaaagtgctgggattacagtggactattttaaaataaaggtgtttgcaaatgtccttcagtgggtgaatggttaaccaaagtgtggtacattcatatttaaccaaactgtggtatattcatgtcatggaatattattcagcaatgaaaagtaacaaacaattgatatatatgataacttgtatggacctcagaggaattatacttaatggaaaaagccaatctcaaaagattatatgctatatgatttcatttatataacattcttgaaatgacaagattatagagatggagagcagattagtggttatcaggaattaggtttgggtagagaggctggagttgaatctatggggtatcatgaggaatccttgtggtgatggaacagttttgtgtcttgatttggtcatggctacacaaatttacacctgtgataaaatttcacagaactaaatatacacactcacaaaactgcatgtaaaatcggtgaaatctgaataaactctgtggatggtaccactgtcaattttctggttttgatcttgtactctaattatgcaagatgttaccattggaggaaactgggtgaggggaacacccaacctccttgtacacttttttgcagcctcctgtaaatctataattttctccaaataaaaagttacaagaattaaggatttgtttatttctaatttgagttttaacttggttgatttccacaatcctaccatgacaaaataaggtaattcccttacaggcactcatgataatcactcaaaagatggcctaattggctgactgctctttgaatgtgagcatccaaaggtcagcaactgcatcctatccccaaatttataaattcagtatactccactgctaccagatgagtattcaacggtagaaaactttatgtataattgaatgaaatctaaaaaaacatgcagaatcatttttcccacagcctttgagaacttagccaacatgatctggtatgtttgttttgatcacggcctatttgttgaggccttttgatcacattgaaagtaaaattgggcagtcactcatctgaatctttgttccatgtcgtaccagctccccatcactattcctgtaaccttcctatctcaaccagatgcagaacaaagaggtgaatacatttagcaggctgtgcacaacttggacatcccaaccaggtggaagttgtctcaaaggaggtctttgttgacagtggctgctaatgagcaatgagtacaatctgaatgtgtcatacacattgtccacattttggatttgaatttattttcctcattgtggttcaaaacctggtaagctttatacccctacgctttagttcgttacttagtccgttagttggttggtaagttatagccagtggtgcttttagtttagaaaacagtgtggaagttttgctgtggatttaggagtctttaggtaacataaaagtattcacagaggtgtaaccattgctgatgtgaggagaaatgtgtcctcaagggatctgtggctgagagctgggttgtttcacaagtttaagggcagtgcttatgtaagaatacatgtagcatatagtatttagcaggatggggtgcgtaaaaggacaccatcctccgcatctgtgtgacacttgaaagttttcaaaccagttcatgtgcatcttctagttttttcaaaatccaggtaagacaggatttcttttaacaaataaagggaaaaaaagaaaattagaaggatcatgacttattcaaggtcaccaccacaggaaatgaggaatcaagaactatttgtgaagtattggctttggtgcccttttgactagatctcaccacctctgcacacttgatactaaaaaaatgtgataaattccatttctttttcatattggatatagatatctgagggaatctatgcttatggtgagatttgggtttattttctgccatcatatacttctgtggatgaaagattaataataaccattttcttatagagctagataataagaggcaacactgcctactaaatagtgcttggtgcaaacatttcattcagaagaatcaaaactttcttcttctaaataaccacttatattccagtggttggattaacctactccttgcttctttcattggtcagataatgtatccaattgaggaacttctctacctagggcaagaacccaatagataatttctcagtaaataataaaataataaatattaaataataaaataaaataataagataataaaagtcatgagcacagccctctctgtatttcttcttgatgtatatcatgttgattgttttctgtttcttgtccaagattttttttgtccattatgatactatagatcaaaatagccctatcattggggccaaaattattttaattgatgtagaaaggtttttaatgacaaacattactcttaaataaagtgtttttaaactaagtttttcctttgttttatttttaaaaagatgtaaatgatttagtatttgcatcctaccccagggacctgggagaattaatatattctcttccagtcactatgtgacagcagcttgatggaaactagaacccagaacttgatggtttatataagggcgtaggatacagaaaaatttatgccctttctcattaaaaaaaagagataacattgcacaggaaggtattgaaggacatgaaggaacaagagcctaaaaattttgataatttgggttcttgtaacactgaaatgacttacgtagagaagaccatgtctataaagaactggatacctttgcctggttctgacaagaaaaagaaagtattcatatttggtggacgtggtggtaggtaaactactaatttgtaaacattggaaatttttactttaagtgagagcaatgttgatagattcaaaaacagctcgtaattgctttctacttttgtattttgcctgaatccatctagatattgtgagaagacccaccttctcctctgattccatcaccaagcatttatctctcatttgttttgtcaaagacatgacacttcaggactgtgtggaaaagagtatccagtcttcctatttttctatttttggccttcatgcatggaattcccttatttcaaaaatatctttttggggaaacccaaacaatgcgctaaaattaatactccaggaggaaatgaactggagctgaccttcactgcttcctgctccttgtttcctgctattttaacaactttctcaaaaatggcactcgtccatctctggtcttgttatcagagttgaagttgatttcctgcccatgagacaaagaagtgaggggcacagtgctttgaacaaaatgaggggtttcacaaaattgagatcagacaagccagacacaagagtgcttcggtccttgattccactgacatgaaaccctagaacaggcaaaatgttttctagtgacagaggcagatcagttgagcctgggaagggggactggctgccaaaaggcaggagagaattttttgaggtgacaaaaatgtcttatatttttatcatgctggtggtttcatgggcgtatacgtttgctaaaactcaacgactgaacacttgacgtggataaatttcactatatgcaattttatctcaataaagttgattttttaaaaattgcaattagaataagattgggaaagcattactaccagctctctaattgtcctttgatcttgccctcaatacagagaaaatggttgtggtaacattttgatagcaaccaccacttttcacatttcataagattaaaatgtccatgaaataccactgaaaaacaacttgtctcaccaagaaagatttttcctacttaactagagttgtttgcattctgttcttcaagatatattcatgcttgtgggtagaattattaattttttactttacaaaaatttatttacaattttacaattttattgctgtcctacttattaaaaagtgtgaataattacctgatgagttacccccacatcctcttgattcaaatcacaccttcatatgagcctcctggcagatatttctggtgtgtttgtccagcctttgtgtgagaacagtcatccatccctgggaatagggccctcagcagtcagaagtggctcatgcccatcttccctctgcctctcagttataaaaggctcttatcagaactgattcctacttagcccctgcaaattctgttgcagcatggcttttttatctatatgccccttttcctcttttctttttaattggctcagggagaccatcttatgttactcatacaagattgtcagaaacagatataagtttatctggtgacaaaatgagtgatccttttgaaaagctaggttatgatttctctagttaggcttctgagacaaatatgaaagttgtggtcatattttgaaatttaatttttaattgacatgtaattttacatattcatagggtacatagtgatgtttgaatatatataaggtgtagtgatcggagaggggaattagcatattcatcatctcaaatatttatcatttctttgtgttgggaacattcaatatcctccttccagctatttgaaactatattttattgctaactctcatcatcttacactggtatagaacactagaacctattcctcctatctggctgtaaatttgtatccttcaacaaatctctccctatccttcccttctccctgcccttcccagactcagtatcctctcttctacttcttacttctatgagatcaactaaaagttgtaattttctgctcatctttttagacctattttacagagagtgtagctgattggcaaccttttaattaatattcaagaaatctgagcttgtggataaaactaaccgagaaatgtgtacaatgtgaggccccaagactgaatgcaaggagaaataggaagaggaaagctgttgcacagagtatcccttgagtgggcgtgaatgagtgtttgcatacactcactgggggcggaatgaggccttccaggcactggaacgtgcaaatacatctggagcgtgctcattgacaggaggatccaatccataataacaagctgggttcactttgctgccataggagaaaggtgtgtgtttcaccatttgccttatggatttgaaaaacattaaaccaggtagtatttcagagtttaaatgaagtacacaatgctcagtggttccagcaccaaactctggaagtgtagtgcattggaaggaaagtggtttaatgtcgttttatctgttgaaccacaaaatgataaagaacattgactcttacccaaaataagaccagtgcccacagggctgtgtgtgtgtgtgtgtgtgtgtgtgtgtgtgtgtgtgtgtgtgtgtgtgtgtgtgtgttttaccatgtgcatacttggaaagatagtattctaacaaagccagccttgggagttggcttgcttttaaggctcacagtagaagagttaaacagaatttctcttcctccctctggctttctctgttttcctccagactttgcccttcgaaacaaacactgaacagcgccgtacatggtgtttcctgggtaatgtcattggctgtgagcttggtttattaatcgtggcatcagggcactgagagatcttatatgacttccccttataccatacagatttcacacccatgcctctctctctgtctctctctctctctctctcacacacactcacacacacacacacacacacacacacacacactctcaaactttctttgcccttcattttggtttgtgtctttccttactcctaaaggagaaggcaggaccaagactttttccccctgatatgtatccacaggtttcatattttcccatgttcttttcacttttcttttggttgtgagtttttgataggggtaggggtgaggggtgtaataggtaaataaaggacttcagcagtaaaataccagaaagatccttttgggaattctgttttgttttgtttttaaacagatgggagaaaattgagttgttaaaggggaaacagtacgtagttgaaactgttaatgagcctgtggtcagagccagcagaatttggttgttaaggatgatgctctgaaacttcatattattcagtcccagtctccctgcctccctggctcccacccttccaccctcctcccaatctccctccccaccagcacagcacattgaacaggctaaagtccaaggcataaggacttacatcagtaactttaaaactattttaaaaatcagacttcatcatttactccttcagaaatcattaccatacaaaaccaggacactgaagttcctcagacatggccaacttgatggttgacatgtgttgatatatgaataatccttaggccaataaaggctaatgatagggactgttggttttgtgtaaggctaagtattgtctggctcaaataagagaagaagaggatcatgacatttcttcttaaattatcttaatttaacagggagattttgcaattgttggcataaatattaaccagtagcgattagtcatcagtgttcattcgtgatctatgacctgcttgtatatcacggtatatctgtagttgtaataagaaagtcaaagaactcctcttggagcttaccatctaaggcaggatgacagaagtacagctttaaatagccttgcagatacatttttctaaaaatgcagacctgaggtaggtatgtagtcactattagtggtaagcaacaataatttgaattaatatgtagatcttgaatagtaagttgtatgttaaattactttttgagaaacgtgtgcttctctgacatgcattttagacatggcttagtttctttggggtcctatgtctgtggggcagtctgtccattgctttggacagtgctgggctgcctaagttctttgtcttgttgaatttctgagccctgaccttacctgcttccgggcttactggggccctagtactaatgttacatttaacaaatgcctgttaagaataatatttgttaagtgaatgtcatccctggaatggatagaaaatattttgctatcccttagcctgatgataaaaggtagttttaaaatagaacaatcctcttgcatgtatttttattttgatttgattttgtcttcagcttaaagacaactgtatgaaaaaattttctttttctgtcttcctgcatttctgttcaatgagctggcttttccttttggttcaaatctgacaggacccaagtctaccttgttgagtttgatgcaccaggtgcatggaggtagtttggtctcttgcagggaagagtggatactgagctgcaaaggtcgtgtacttgtctgctgggagcccacagctgttgagcacactcgcctgtggttgacaggactctggcacaagtgccgtggaggatgatgttagagaggtggacacatggggtcagaagaggaaggagaaaaggttagctagcaggccacagattgtgtgagttactattgtgaggaggactttgaggggcctggaatctgtgccctgagtgccagacaacattggttcaaatggctaaatgtcagcatggttctcaaccaagaattggaagccttccagggcctcttaaggcagactttgtagcttttcttttctgaagagcttctccttccctggcttctcaagcattgtaactcatgctgttaggtcttccgttctgtccttctgggccctggggtacagcttttatggtatatgttcagagctacagggatgtctcctgttcatcttggggttctttctgcatccccctctgccagctgggtgaacagtggggagctggaagcaaggggaggggccagagggaaggcggtgaaaggtgtgctcagaggtatctgagctttgggtttttacagaagttgatagcattgggcttagtgaccacaattcaattataagcaccacacaaccatcctgagtgactatatacttgccaaatactgctgtgtaaaggcagctacatttttgtcagcctggcctgatggatttttaagtatattcaccgcatacattcacgcaaaggggaaaatttactgcctaaacagagggacctaaatcccccaggctaaataaacccaatgaaaacacaagaactgcattgacaggcttcccgaagataagaattcaacctttaaaaaggtttcttcaaatgaaaaatggatggctgagctgctaatggcccagtaacctaaaaatttaactcttccctaatgctcagggacctcaggtaaggttcactttcttggaatggaggattttcatcactgatctctgcacagttctgggcctggaaggtccaggaagtggccttggaaagttaatgaccaccatagagaatccatagagaatagattgtcttggcaatttttgtgttgcttctttttgttttgttttgttttttgttctttggtttgcgtgtgtgtgcgtgtgtgtgtgtgtgtgtgtgagagagagagggagtcgtttatgtatggctgtctgtgggaggagaggcatgggccaaggtaggggggtgtgtgtgtgagtccccagcttttccctattggaatttggttgaggtgagacatttaagagaactgtctttcccttatacttagagaggaaatatgtcttcctcttaaacttacaggaagagttaggaagttaagaatttacctgtgcaatttctcctgcatgtttctctgtggaaacaggtcatacattgggacaaaagtgaggcaacaggtctcccctgatatgtcctcaatcttctggtagtattgaaggtcccagagctcatcaccagtaaatcgcacccctgtattaaggataagttacaaagatgttcatgaatcaacctgcagaggaatctgtgcctctcttgtaagtcacctaaatattatttaaagatacatatgccaggtagaggccgggcacagtggctcacacctgtaatcccagcactttgggaggccaaggcaggaggatcacttgaggccaggagtttgagaccagcctggccaacatggtgaaaccccatctctactaaaaaaaaaaaaaaaaaaaaaaaaaaattagctgggtgtggtggtgtgcccctgtaattcctgtaattccagctgctcaggaagctgaggtatgagaatcgcttgaacacaggaggccagaggttgcagtaagctgagattgcgccactgcactctagcctgtgcgacagagactctgtctcctaaataaataaataaataaataaataaataaataaataaataaaatatatatgtgcgaggtagggagtggggtgaagaaggggttaactacaaatggggaaagggaatgaggtgatgaaactgttctatatcatggttgcagtggttgttacatggctgtatgcatttgccaaatctcatagaactgtatgttgcaagggtgaattttactatatgtaaattataacttgacaaacttgacctccctaaagcaacaaagaaaagaaaagaaggaaaagtaagtaatactttctcatgtccccttgctactttgccagccagcaagccatctggatgatgcgaaggaaggacaccacgtagtcagctccaacctatgagctcatgatgccaggaaagctgttctagaaaaagcagagatggtgtgtgtttccttctgggggagatgacttagctctccaggtagcaatgaccttgtatggttaacacaggtagggaaatacctagcttcatgctgactcaccaggtaaaaaatcatttctctgaatgagtcagaatcacaaatatgttctgaatagtctcctatgtcctgcatggggaagggcctgaagcaccaatcagaatgtctgtttgcaggtctcagtggtcctatatgggcaacacctacaagccgtgggtctctcatttcccagaatgatagtggtaaattcaagccctctagctcacttaatcacatactcaattaggtacaggagacactttaaaaaaatgtatgctgtgctgatgatgttgtttattcagttataggtaaatccaataatggtgaaataaaatccttcaatattaagtgtattcctggccatttagagaaggggtgtgtgtgtgtgtgtgtgtgtgtgtgtgtgtgtgtgtgtgtgtgtaaggatacagttaaagcagacttgggtaatgtaaaataccacagaaagtaggggtttccaaggaaaacatgggggaaactctgtatgagaatctaatgtatgctatagcttttaaaaggaaacattaatagtgaaacatgccctcaaagggcaagccagtaataaatttcgtgtcagaaattacctgtcagtaggattatgttaaataatgttgaattgttattagtcgaaggggaaagagaagagtgactttctaaaaaatgttcaaagagtataatgtttcacatacaaatcccattattgtttaatggcatttttgtacttatcccttctcaaagatgtattgaaaattttggccactttaattcatccctcaaatgtagtcgttatgggaaaagaagccaaacttcatgcaggaatttggagttacccaggggactagtgtatctgattggacgtccactgtagtatgtcctaatcgataaacgtgtgtgtgcctgcttactgggactacagaggaaagcagtttcacctctatacctcagcaaaccattcgtgaagtagcaggggcccctctatttcaacattttgagcacttttgcttgttttggccaaacaactaaaaatatatttttccccttgaaaagtattcgcattgcaaatgtgtgaccgtctaagaatttttaaggttcattgcaatatattgggtctgaaactgatggcacttgctgaggcagggcccagatcctgccccaggtgcagtgaaggcagaagcctgagtgggaacagactgtgaaacaactgaggcttaaattgtgacctaacacattgccacccggcttgagcctatcctctttacgacttatgactcataggtgtcaaatcatcaagtgattacacccagaatgaaagagtatttcgacttcatgtgaattgaatgaagaatgattgcgaccttagatttgggtttctgaaggacaaagttagagataagctctgggactactccttctgctttgatttcattcaccgattactggtcattaactgccctgtgtctcgtttgaaaattgctgtatttgatatttcatgatatttggaccagatctcgccaacaaactcagtaggcatttgtggaaatcttgatttctttgggtcatcaaatctcaattttagtaaatggcctccgcggtaattcacaaatgggttcagggtggcttagagtcagagttcaaagtgcaagaaagtggatcctttcaggggcaacctgcagtccagagaggcttcttccagttggaacatttagatcagcttcaggaatgttatgtcttagatgttatttgaatgacatttcagtctttacttatttattaatttttggttttttgacatagggtctcactctgtcacccaggctggagtgcagtgatgcaaccacagctcactgcggtctttgaactaccagcctcaagagatcctctcacctcagcctcctgagttgctgggactacaggcacacaaccccacacccagctaattttttgtatgtttataaagtggggtttcaccatgttgctcaggccagtctcaaacacttgggcccaagcgatctgtccttctcggccccctgaagtgttgggattacaggtgtgagccactgtacccaggcagaatattttaaagcttgttcagatggcagtcatttgtgctatatccatttgggatttgatcttttggttatgggatgatcttttaatgacattgcaaaatgtatgtttcagaatgtcctataaatagtttaaagatacagagccaaagctgccattgtcacttataacatggatgagaccaagactaagtgagactatgctctttccaaggagacatcaccttccccaccaataggttccatgttctgatctagtctggcttcagtcagactggaaactttttgagacactgcttatgcctcacccctaatgagagccccttgcacttccaaaaacctcttactttcgtgtgaaattctttcctagcttccagctttttgatttaatttaatttttaagaatttagaaaaacagccttttgttataattgtggacaaagtttcttaatttttttcttatggaaaatttaaaacatgttatgcaagcagaaaggttaggctaatgtccccatcccatgaactccatcacccaacctgaacaattatcagcttacaatcacgtttcatccatgtctctactcacttttagcctctctcaaggttatacgaagcacatcctagttatcacagcatttcattcatattttaacatggctatataaaagataagtagtctttaaagaaaagtaaccacaataccatttctccacctaaaatattacccatactatattaatgttctgaaaacacccttcgaatttccttgatgtctctttttttgtcctttattattttttgaattactttgctttatttttcatgtgtaaaaacaccatatggtggccacagtgggaagccaggtcctctgcactaagactttggtgtgagtctttaggagttggtcagtgaattcctgataagagactctgttaatgtggtctctttccagaggtgggttgggaggtaaaatagctcaatgtcttggagaccgcatcagaggtggctgtggtgaaattgccctaggtggcagtgtagcccctggccaacatgtagcattcatagatactggccttaagcagcagtttcttaggcacagggattgagatgatgccattgtctctgggagtcaggaggaggtgcgccagagccacggaggccagtcacctttcaagggaccacttagggctcacctatcttgttccccacagtgtcctcgagcagacaggtgatggagagctcaaccaggatgttggccttgcccatgacagcagctactcaggctgacatggctatgcagtctctgagtgtaacaaatgccttgaacctggtctgctggctggcacaggtctgcttttgcatgagcttaatccacaaaacttcatccttgagggacctccctgggaaaaagtcaatgattttagactcctcaatgggcaaggagaaatcatgactaacctccagggccttgatcttcattccttgggcaggcagtcccgcatggtgacccagaaccactccttggccttggccttgcctctgtggtctaggccaggttcgtgaccctggccctggacacagctgccaaagcctccacagagctgccatgacctctcattacagggccccggagtagcaactatgtcattgtcactggtattttctcagagaatcaagactgtaataaggttcatacttaaaattggttgacatgtcttctaaaactcttaaatcacagatctgagttctccatcatttttcctgacaatttatttgtgcaacagcctgtagagttttgtacaatctgagtattctgattgcatttccatagtgtcagtttaataagtttctctgtttcttgtatctcttgtaaactggtaattaggggcttttaggtttgatttagagtcaagttcaaatttttggcaggaatacttcccatgtggtatggcacatttctattaggaggcaccaatggttggcttgtttttctctttgggccattggcagtcactgacacggtctatatccattatttctttagggattatgaaatggtgaagtctgattctgtcattcattctttgtttattagctggagtacttctatgaagagaaccttctcctcatcaactctttggttaccctgaattccagttcaatacttcttcaagcgtgtgacccatttattctggtttcagagagatgccttttttttttaacctaatgggtacccagaaacaactataggaaataaaacctcacccataaagggaggtattgagcagcagaaaaactccagaacaggggtctccagggtcttgactcaacctctggcacctgtatgatgttggacaagctgtataatttctcagagttagtggactccaggcttctatctgcactccaaccagagaggcagttttttctatttgttttaaacaaataaagctacagccttaaaaaattgtgtacagtttattactaaggtatctttcagcttaaacagtttatgattttcatttatgatttaaaaaaacaagtccatgttaggaaacttagcaatctgatgaccaacagataccaagtgttatttctaaaaatgcattatttcatttattaattcaatagttcatttatttctccattctttaaacaagtgtttgtactatctaagtccctataaagcataaagcttaggcgtagacattgtaggcactaacattttggggatcacttggaggtaccattcttgaagcctcagcctgaaattcacagagttgaggaaaggatcctggaattcttggaagtctttctaaaaatcatccacaagaaggattccaggtacatgagagctaaacttggaattttccccatggaaagtctgtttgctatgcagagccagcttagggagtatttaacaacatccctgggagggaagagcaatttagaacatctggagactgctcattaattgtttatatgataatgttgatctgaaattgtagaaacgaaaacctgatctgtgatccctccttctcaacccatttcccatttcttttttacccgtgcaactgatgaatgcacacaggtcagaagtatgaggactggtttgaggacagtttcaggttccaaataggaattatggatcctactttctctttagtgcatcttatattccactgtgggtgtgttcattattaacagtggctaagactgaggggctgaacagggaaaggagagcagaaaacagaattccagaatccaccatttgaatcacactggtttgtgatggaggaagcacataaataacatctacagttctcacctctgaaactaagagcaatgggggcttcccttcttcacagtttcacccagttcttattcacagaaggtgctgttctcctagcacttaataattcaataatgagagttggaagctgtcccagcaggagatgttatgaaacaaccttaaagaataatagagggggaaaaagagcagcgctctatttttaaaaaatcagagcctttcttggaggccatgaaattctaggttcaagttaattatcaccaacaaatatttattcacatgatgaatatttattgaatgactcctttgagcagcagtataggtgtcatagtggtgtcatattggcacagagatgacaggaagccattccttataagctagtagggcagagacatttgacataactgattatgaaatgaggcaaactttgaaagcgctgcattaaaggtacacagagaaaagctttatgagaacgtgataggaagacatcgcttctaggtggagggttgcagggaagcttaatgaaggagatggcattgatgctgaatgtgaaaaattggatagaacttcagctaggggagctggaggggactatcagtcctgagggtacactgagccaggaaaggttgttggaaacaactgtcctgcttggcttccatttctttcttaaagaccattagaacttggtgtccctgtgtgtgccactgggtgagaccatgatacaacctgggacagagctagagaagaaggaggagatgctttaaaaatttccctcatttgcaccaactgcactcctcctgatcctttcagaaatgacatgttattcaaactctggaaaaatcagtttcatctatttttttttaatcctgagtcaacacatctgcttccttatcagatgctgctctgatttcaggcctggtattgccataggctcccctgagtagccacccacacagtaaacagttgtcccacttttcagggctccaggctgcctgttggctctgtctaggtaatcctgcgggaccagtagggctctctgattccagatctatacacagatacagtcacacgcagctgggacttgcctcccgtctcagcaggcatgatctctgtgatcctcccctgggaggtggaggcctactaggccttgggtgaacacccacccctggctagacaacacccccaaccccttgattcctggataacaagctaccaatggagtcaggctagcaatctgaatataaatgacttactttctcgatttaatgagaaagaataaattacttgcaataggaggttaggtatggttctgacattgcaatattctcttcaagttaacagcaggcatttgttacatgctcagagaattttatgatttataaagaactttccaaaacagaatataatttgattcttgttagaggctctatcattctcactttatagataaagaaattgaggaattcgttggttaagaaaataaaaatagccactctcattgggcacatggccaagtcctgttctaaacactttagatttaactcatttaagcctttaaatcatcttatgaggcagatatcatcattattgtccccattttgctgctgaagaaagcaggcatggagaagttatgaacttgctcaaaggcctgcagctagtaaacagtagaggtggggtttgaactcagccatcgtggctccaaggttacactagatggcctatagcttggatctggaagagaagatctttccaaatctgccattcatccaacaaagcagacacctggatctcacagggaatgttcctcactggcaaatgtttctgctggacaaatgtcttctcttttattggcctgttataactagagtggactttgagagcgctaaaaagagaacattgtttgctgcctgtttatttttccgtcattctacactgagacaggcaccatcctcttcagtgagaaaaccacacaaataaacccccttcttgagctaggcatggtggctcatgcctgtattcccagctacttcagagactggaggatcacttgaggccaggagtttgagaccagcttgggcaacatagcaagaccctcatctctaaaataaatgtgtcatgtacataaaactatcattcatgaaataaaataagcccacctctgttactccaggatgacgatgaaggaaaccctgagaatcaagagggcatttccaagtcttgtggggagcagaggctcataggaaatagcactgaacacagagccagacaacctggatgttggtcatgtgccaaaggtgagatcttaggttagttgtattttctgagcctcgggtgtattaaggaagaggcagagcctcttctgcccattttctgttataaaaaatatgtgaaaattatttgaaatactatacattacatgccatacttttaaaaatgaaatttgatgggtttctaagcctctgcagaatttgggcatcattttaataaaatagacttgatgaagtgaagcttctcaaaataataatttttaaaacggtacaattttaactggggatatatttaatctgtatagataagggaaacaatttttgcagtcgtctcatagattcttctagaaaaactcagaacaaaccaaactttttagaatttatttcactttgttcttgttttattattattatttttaaagaggcagggtctcactatgttacccaggctggtcctttaatttcttccatatggaagtccttttatttcttctataactaaatccatttggaagaggggggtgccactcatacctagtgtctcagtgaacagtgctaaaagggaattctgtgattaaagaatcatagagcttcttttccctgtgaaagcacaccctctaaggctgtgtctcagcatctccagatcttcacgctctggtgcctaataaaagatcatcgttatctctggagggaattctctcaggtagtgaaggtaggcagaaggtaagtttctagatacaaattatatttggcctcgtggagatactaggaactgtatatccaggaaatgcctattccctcctcttttccataactggcctcaggctcgccccattttaaccctctcattgacatccagagccgctacggtcaaagaggaggcggccacgaattgacctgaattcagtaataagcctatctagtcaaccacttcagagtcaggagttgtctatacagatagccaagtcttcctagaaatactgttaccaaagagagaatcaaatggaaaaaagacacagtctgtgatccagtcggtattaaagaataaaggaatacttgctggaattaacatttcgcaaacccaataagaagtccctaaaattaattttacctaaatcccagccccaaatttggaattgaatgctaatccaaaaagttatgttaaatctctacttccaaaataattttagaatgatgtggccatttccacaggcctaatatggcagcatctcccaagggccatcagaaccaagtggccttggaattgtgcagtgagacgaggacagccccttgagacatccagattagaatcagtcataaggtccaatctagtcttggctggccttggggattcggggttggggggtgggggtcacagggcatccacatctctggtagcataattcttgccaggtcaggtggtgtgtaaaaaattataggcatgcagggtcactggaaaatgttgagagccagaaagtttgggttatgatagttatgaacaagggaaagtatttacaataccccttttgccccaaaatagattttaaacactatacaagcacaatggaatgtgttcattcatttctaaccggattgtcttctactctcatgtttaggtcatagctatttctaggctttcatgtgacaagaccttcacagactaaattcagtggtgtcaccttctgaacaaagtggccacatgcgctgtggttttcccttgtttattttgtcttgttttgttttacacagccagtatcactagcctcctgatcaaggttagtagatagaattcaaccccgttcatttaaaagagtgataaatttatgccagcccatgatctcactcccctgagtagcagaatgtgtctgtggtgcgctgtgaagtcaaccttccggacacaagtgttctgtgtgaccctgaaactacacctgaaagacaggatgatgtcgtcataccaagcaagcattctgactgcaacttaaagtattaaggacaacatatatccagaggtgaaaagaaaatgaaaatggctgatttattgttttaattgaggaagagcctgtaatccaaataaactatgttgatggaaaagactcacccaaacgccaaggtgaaatttcctaatacttctgccaatttgttagcgaatagatgatgaggaagtctcaggtggattctacttgtacaaggccaaaaaagatcttattaccagggtggaggtcaatgattaacactgtgatatgaagtcatatttcttgtaaagcagctctttgcagtgtgccaggtttgagatagtgtgcacacaatgtgactactcaacaattaacgtgttttcctgtgagcgaaacttggtgaggagggtggcacatttctctttccgcaatgtgaattcttacacatatacacacattctctctctctctctctcacacacacacacacacacacacacacacacacactccccacacccttcaatcatatatccccttagagatgttcattacatcagccatgcagaaggagaaagaaaacccttacccacctgtagccaccagacatgccctctataaggcagctatttacaagactatgaagacatgctctagaaatgaagggacatgcaaaggcgtagaaagaacaaaaagaaaattacaccattctataactgccagggctgagaagaacagaatattagctgacatttcttaaaattgtgttctgtgtactgagtactttatatgctttatcttgtttaatccttacatcaacctcttgaggtacagattatatttattactgttttagagatgaagaaactgaggctcagagatgttcaatgacttatttatgggcacacaagccattctaaatcaccatggaatgcaagttaaaatattcccaccagctgggtgtggtggctcatgcctgtaatcctagaactttgggaggccgaggcaaaaggatcacttcagcccatggtttcaagaccagcctgggtaacatagtgagacccccatctctatttttgaaaataataataattttaaaaatactcccaccttcttctggtttttttctttttgagacagagtcttggagtgcactggtgcaatctcagctcactgcaacccccgtctcccgggttcaagggattcacctgcctcagcctccagagtagctgggattacaggcacccaccaccatgcccggctaatttttgtagttttagtagagacagggtttcaccatgttgaccaggctggtcttgaactcctgacctcaggtgatccagctgcctcagcctcccaaagtgctggaattacaggcatgagccactgcacctgtccccatctacttctttataggaggatgcatggaatggcaacttatcactgcgtccagcccataggaatacaggcatacctagaatacgttctgagcatgcacacatagatgtaccatgtacagtcaagctaatcttcctgttaccaaaagttttgtccttgtgattgcctctaggcatattctaatatttttagccagagtcatcataaaaaagagtctttatatgtcaaaatagctttatagatcaaactgcatgatctgaaatgccgcttctctgtttgcgagggttaaatggttgtctcaggccagagtttagttcatattctataaatggctcttactccttgatctgactcactgtatgtattacagcaaagtcacttacagatcaagatttatttttagaatcttaaagaaacagattctacagggagtgtttgtgtctgaccacagactaatttgagtgaaaacatatctcagtgaggaactttctttccatttgattcccctgcccgtggcttaatgataagtctcttcatgtcatgttaaatggttttgaattatttaacagcagaatgacagaattttatgccaacatcatacatagcagaggagttttgtggtatgcaagtaagagaatctttttgattttgaataaaataatgcatcagaaaactatgcagaatattaacgttcataaagatggggggagattgtatagtctactttgccactttgtaacagagattttctctaagatcaaaacccagggatatgataagaacaatgatgatggtgatgatgatggtggtgatgacaacttcctccattatcacctttagcagagattctggattcatcccttaaataaatatgacatgctgccctctacaggtattcaacctaaaccagatagtctgaagccgttacaaatagataaagcactctgaaatacacagaccaataagtaagtgcaaatgaaatattgaggccaattaaataaggaaatcctttagactctgcacgtctaatttgcgtgaattctaaagccaaagaagaatcaagcgtttactatttcattttaatgttctcttccaagtttttgagtgcgtatacttgagcctatctatgtcagaagcagggaagaacagttgggaatttgtgaactcattttctgtttactcttgaaaaagttaattgccctttggtttggctaagacctatttgataacagatgcttaatgaatgattaataagtaataatgcgtgtggaaatcccaagtttgtttgcaatttaaaaaagttgaatttcataccataggtagccaacatttttaaagattaacaggctgtgtacaaaaagagggtctatctggctccttctttaagcctccacttctgcctcaccccagtaaatcctcttgttactttggtgtctaagttgaacatttttctcaaattgtacttcgtttttccttgttccgccaacagacgtgaaaaaaaaaaaaaaaaacaatcttgaagaactgatttcttatgcctgcctcctaccctgagtttactcgctgaacttctgttaattgtaactcttccctataaaaggaaaggctggcccagatggtctgacagctcctagtgctcactttgtgatatgggtcagtgagtgcttggagcatcagcttcagagccaggcaatcctaggttcatgcccagtttcctacactgacgtgcctggatgactctgggccagttatataatatctctgagcctcagtttcccatcagcaaaattggtacagtagtatccaccatgttggattttttttttttttttttggtgaggatttaaaaatacagagtaagataaaagatttcataagcagcatttcatgtaattcccatggctacattataaggcagaaactattattaaccccgttctacagatgaggaaatgaggcttagggaagttaagcaactgaattcaagttacagggctagtacctgtggagttggattcaagccaggcccaggccctgcttttgacctctgtgccactccatcagacagctttatcctctacccacacatgctgataggacgaacaaaggatgtttcattctaccctttaagatggctctttcctccatcattctgatttcttgccagactttggtacctccaactacgggaagtgcaaaggacaagagagttgttctctcctatctgcattctcagtgcacaggagacatggaaggaactccaaaaaaaaggcattctaccccatgttctcagagttgacttatatagtcaaaaagaagagggtccttgttagtggctggagttaaaatcccaaagcacagtccgccaaaacctcatccagatgcaagtgtgtggtcactggtcatgcatttctgtttgctgaattccatacagccaaggcaactgcgttgccttgctgaagatccacaggggaaaaaagttatgtgtgctaggatgaaaaaacatgcaagcagagttctccctcattgtcaggaatgtttgatacagcaatgtttattccatggcctccatccatggaaaatgtgctatcagactttaagaggagtaaatcaacacaggtcttccttattggccactcattttgttaaaatgacataatatcatagaggatcatctatttcaataagaacaattttctgaaattataatagtacatgcattttagtgaaataactactgtaagagtcttttaaaaaggtatctaagttgtcattaggtaccatatgcttttcttcaactaatttcttacaccctctgggaaaagtttacgataatgatatcctaacagattgttgcctttcttcattggagtacattcatttatgaggtcattctatttgggtgtgtcattttatatttaacgtatgtattattcacattaaggtagtataattcattgttttctgtatcaagtagagatcactacataagtcatttatttctaccttaaaagattgcttcttgtcaaattctccactggctttaccattcctgtgatttgagttgtatgattgttaatataaaatatttagaatgattgaagtgtggaagagttcaaatttgaattgaaaatttcctggtagtctcttggaaaatagcactaatactcattgactgctggctatatgcccaggcttgttccaagttttatgtgtgttaacccacccatcctcacaacaatcccatgaggtgtgttattatgactatccccattttacaaacagaaaaaccaagacctgagaggttaagtaacctgcccgtagctaaggagctactaagtgctgtttctgggattcaaacccaggaagtctggcaccaggatctgctctcttaacccctcccctctgttgccacttcaaaccctggggtgatggaacagaatcgattttattgcttctaaagagcatttacttactcttttaaacgagtgcaaatagatcgtcctctttagccagggagagaaggaagagctattcaagaagggatctaaacaagaagcaagaacttgttctttctcatgctccatggaaaggcatggtgaacaaggcaaactatgtcttactccccctggtgttcagaaagggagcctaccgggggcccttcatcagatttggggaaaggggccccaggacggcttcaatttcttttctgttcctaggctggagaaataaaaagcagccaggatgtgatacaggggttttttttctcatctgtttttgctctcaatgcttgcaatgagttagaaacaagtcgacatccacttgcagcccttgacagacaaagttattaaaatttctaatttcctaaaatttctcctgtcctccaccccatccattctgctacgcccctggccttctgccagggtgtctggttttccataattaagatggtggttcatataatcttttttttccctgtcttctaccgtggctgctgggcatctgttccaaaatgtctatcacagttgccttggtattgtcagcttggagtttctgatagcccagcatttgatagagaaaaatttaagatcacctcgaattttcaaggcaacttgggaccttgattcctttcattagatacaataatacttgaaccgttcgtttgaaagagtggctcagccctggctacctgttgctctcacttgggagctttaaaacaaataccagtacttgggcccatccccagaaggtttgaatcatttcttctggggtggagcccaggcatcagtattttttttacatgaggtcacggttgcaaaacactgggctgaattaatcttctggcttaaatttgaataccaagaccctgaaaggccttggctcagaaataagtaaaattcatttaaatgaccagttgtagctcccatgacctgcctcttgaaatgcaaaaaagggttttcgccatgcagttatagtcattcacagattggtgggatagcatgaagttcttcacttcacactttctaagggccccctctaccccgcacccctggacctcctctggccatatcctcttcttttcagcttatcttcagccttagacaaacctcagggcattcattagaaattattttcatgacagtggctgttgtactgagtgttcagtaaataaaaatctgtatgtgacttagtccaataagcagaggctattgttatggtgtgaggctgcttctatttcttatctgtgaaatagaagcaatgatgcctgccttgccaaattgttcacagtttatataatttatatgaaatatcctgatctacccactatcacgcagcagtaatgcctctcttttccagttatttggaaacttcccagttcagtgaagggatttctcttattctcttattctaacaggcagccagttcctcttcttactacggtattgcccaacaggatcagctcagcttttcagggatgtcagagaggaatggctctcatatctctcgtcagtctttagggtctcgagaccctaaagactgacagcaatccaggacttttgtggtctacatttgtagcacaaatgataagactgagcaggtttcctgaacttacctctgtttgtttactgaaacctcttaccactggggcagctacagcaactgaccacgcctgcttattgtctgtctcctgtctggtcacctcttctagttctgatttgccccagaaggcttagcatctgtcagtctactttgccctcaaaaccttccagaagatgtttcagcacccaaggaaaataaacaggcttctctggagcccaggggacaagacataggaaatctgcatttcagtgggtaagagaaggaagagaccatggtagccagtggcagaagaaagtgtaaatttcaagaacattctactgtgtgagggtgggtggctgtcatggagatgaggggacatgctggccaaggggtgggctcttagggtccaacagcagcatccaaggtgctagagacaatatgctgcatgttattgattttcatgtaacatttatctggcttttctaggaaaatccttatagacatttcctctgctgtgaccaagtccctctcattggccagacactgtgctaatagttgagaagaagaaagaacagtcttggttcatgaactacagtctagctggggggagaaaagattattagataggcattgaacattgatagatttaactacattaaaaacaaacaaaaacccttaagccaaacttccaatgccccttctcccccacgtcccctcttcccgcttaatttaggatagtgattaagatcccagacttctaaaccaagttgtctgtttaaacggtgagtttacctcttgccacctgtgtcatcttggaccaaatggtgcctcggtttacttgcttaaacattgataaaaacactcacaggttgttgtagaaattaaataaaacaatacgtgcgaaatcctcagagatgagtttagcccatagcaagcactcaacaaaggttagattgctaacattaatccactggcatatgtttaaaaagagaagctgaggatggacacagcagcaggttctgcagggaagtccaaggggctaatttattacccagtcctccttccacctcctccctttccttggagagttgtcctggaatcagacgcccagcgtgcgggtcagccaagctgttcagctgctgttggtccctgaattcttctttctggcctctctaaacagagcagagaggatctggggcagccaacagacaactctgtattcactgttgagcaggcaggctggcaagcagggagtttctttgctttaaaagatagcagggacagtcaggggttgaacagttgtgttgctttcaggaaacacgttggccttctagggttaggaagggcccctttaaacacagagccacaacattctcctgggatgacctttgcttcatggcagtcatgagtcttgttctcaaagctctgaccatccatgattcatatgttcccaatggctgtctcagctttttataagggatggcatctattaaattgtaaaagttaatttttgtttgtcagagacatcataaacatgtgaaggctctttcctgtattgagtgtccaccctcaaagaagcttcagtattgattatgcttctgtaagtagaactgttggccagtgattgacaaaggagtatagatttgaaaggataggcttctatggcacattcagaaaacatggactctcaatgttggaaggaaccttggagacctcccaatccaaccttccaatccaatgtacaacttccaaacagccctgagaggtggctacccaccttctgccccagccattctgtgaaactgtggactcactgctcatgtgatggctacttggacagcctgaactgttcctgaatcgttagagggtactacttctatggagccagttacatttttctggtatttctacccataggacttagttctgctaatttgactaagcccatcaatctcttctcccaaatgatacctgtcttgtttctcttgaatttcctcttttcagacccaaatctcagttaggcaaagtttttgtcatttgtcatgattctgtagtaccacccaatttgtgaaagtaacaaactgctcacttccaatgccagctgattaattacctactcctaatagcaacttcaggaacaatgggaaatgtacatctcagtctagtctgtttgaaaatcttatcctcaaatctgtgctttttggaaacccatgaatacttgagaccgagtgctgaaaaaaacatatgtttttcattttcacctgacatattgcatcttaaggcatcctgctgggtgtgcagcagctgaaaaagttcgaaaaaatgtggctgctcaaaactatagcaacagagggacacatgatgaagcaaaacaagcaatgcgtaaagcattttggtttatagctggggaattataatcattctgattaagtagatttccatataaaaagacaatagtgtggctaagagtctcagaaaaattccaagtatattttcaaccattttctactttgatcaccaccctacttgctaagagagtgactttttgcatgcagaagacatatgtttatagagtctttcaatatttagtcaacattaatttattgactacctcccttgtattccaggcagagtatgtatggtacagaacgctatgaggtacgtatgactcttgcccccgtgttagatatgaggaaaccaggcagaaacattaataacctatccagaattacacagcaagtaagtggttaggctggagtcagaatccagagctctgaccccagagcacatggctcaaccactacagggtaccaccagtgggactcagagacgtacggaaacttttcaataccgacccgctctgagtgtatcttggtcagggccattgattcttcttctctgtgacaaagatttcagggatgttgattcctaatcactgactgctttaatctgcctcccactgggatactggaataactgggatactctgtagcacccttcacagctgtttgtgagttgccttctgtgtggagtgtaatcaaaacagccttaaaaaccaagcatcagaaaccctgcgttaaagcctcagctctgccaaataccagctgtgtggccttgagaaaggcactcaatcctttgagattcagtttcttcatttgtaaaaatgaccacctcccagggttatggcatgaattattttgtttaaccaatattgagcatcttgtatgtgtcaaacacttggcaaagatttgagtacacactgcagatgaaagagatgccagtgctgcctttttcggagggggcggcagaggggatgaagtctccctctgttcctctatcacccaggctggagtgcagtggcagcgtgatctcggctcactgcaacctccgcctcccaggttcaagcgattctcctgcctcagcctctcataattctgccttgttgtggagcttgcagtcaagtaaggaagctagacaaaaagaaataagcaaatatatgaataatcacaagttgggataagggttgcaaaagaaatgaaagatcttggccttgggaaattgagtggagggaagcaccataaggcggcgccagggatggtgtctcggaagagaatgtgtttgaaagatgaggaggcacctgccaacagaagagtagagagaatgacaggcttaggcatggcgtcttcaaagcctctgtgctggagaaaaggagtcaatgaaaattcaccattttatgcatataagggcactttgtaactaaagtaggctaaacccatgtcagaaatttctcttgcaaatagaaaatagcactggccacttccaaagcacagcttggaccgtgttcttcccataagagtcaagactaacattccaacccagtgaagtttgttccatttccacaagataacagcctttatccccctacaccaaaattgtaggtgcctggactgaataaacataagcaccagtgtttcccctgatttctagcagctaccaaggaacagaacttcctccctctctcacttttccatttcctctacctcctgtccttgcagattgggcagcaatttcgaaaaatttcctgaagttgactgatgacaggacatggatgtctgaagtctgaactgcctggccaggactaggaagagatgtcaggaaaggagaagtgagggtccttctgtgattcttctctccctctctcctgttggtgccttcttttgggggtgatggtctgcagggacaagctccttcttttcttttcaaatgttttgttctttaaaagttttgttcaccatcattagaaatatctatggaatgtaaagaaaacatgtaatgctaaggcaggaaggacctattgtcctgggatcccgggaggacagagaacgctgctacttaacttatgcttagtgtttcttataggagatgtagttaaggtctcagctccagtgtcgccaagggaggattttctgtccctcggctcgaaggttagccagcccctgatctcagtcaccctccatgacatcacccttcattgttttcctcacagcatttatcattgtctaaaatgatattgtgtttttaattttttgtttatcatctacctcctccactaaaatagaaacaccgtaagttcaaggctggcatctatcctgttcaccctgagtcgctagtttgtataatagtgtattatatcatgggcactcgatggctgaaagatgaatgtttgaatagattgagtgataacaagagctaagacttccatagctcttatcctgttccaggtacttcttcaagcactttaaacatcaatttatttcacctttctgataaacacatgaggtaggcactaggatggttcttatttacagattagtaaactaaggcacagagaagcaaaacaatttgtctaaggtcacacagtaataaatgctagaatgacaattcaaacagactggttggctatataatatgtgcttttatccactctatgggatgcgtttttgttccaaaacaaatactggtgataccaaaacaaggctcttttacaacaaaattatttcctacaaatgagaagcttgatcagtttaaaccaaggattcaatcattcatgtgtgtgtgtgtgtgtgtgtgtctgtgtgtaatgaaatatagaaaatcaaacactgaatattctctcagctagaactcttgggttatcaagagttacctctgcttctgcctatatctcattcagagaaaaagcactctggagaatacctgaggaagtaaagaaggtgtttcttctatctacaaattccatttctaacctgtgcaaggtgctcacacagtggtcaggccaagctgagaatgatgagttgtggacttaccagccatccttttgattggctggttactttgtgtctgaacactctgaagctaccagccatgacagtagtgggggtggggttcatggtagagttgagaaggaggattataaatgtgtgaactccaagagcatctccaaagacataaagacagaggtagtggtcctacatctgtctttgagtccccttggtcatacatcttcaaacctaaaggataatgatctagcctgtctccagttattgggcagcacagaattcatgctgcctataaagtgagaccaaatctctaaatcactgttgtctgtagccaggagtctgcctcttaaagaagagagtgaaaagaaaatcaatgtgtctgaaactttagcctgtcttcttggctatctgatcagttaagattcccagaataaaaagtaaaacggagataattgataaccattttcagcctcctctgtttctcagaagttgacagtgtttcctaagtgtgatcttggtctttcccattatacccttgtaaaatggcaggcaaatttccacacaaatttcatttgagctttaatctgcccatccagcctgtctgtaaacagcaactggcatgtcttgactccaaaagaagtttcttctttaaaaaaatattttcacccagagcttcaattatgtcacttccctttcagaccagttgaacagattaatgcatgctcatggattaaattgaactgatattttttaatgggaagggtaaatgatgtctatgcatgtctatcatgtgctttactcttaatgaaaaatattttaaaatgtatattgttacatcattttgaaattcttttttaaaaaattatgatgagctgcatatcatgaaactgttttcatcctgccattcattgctcaaaaaccttagatggccacaatttctcatgtgcctgacttctaagagccttacaagccctcccctgtgtatcatgccttattgcttgggttgtcaaaattgtaatcccagaaacatttagtctttactgaagctctagatgtgaggcattgaagagaaccattttctcttttttccatgggctgcattcatacctacccatttttcaagttctgccttcttcccttactttctagctctggtccatctcactttctgaactcttagaagaatttagtctgtatctctgatggcttcttttaattgtatgttttcatgtatttttatgttttatacagattactattgtcttttcaaggagacagaaacagcttcagggtagagcactgtatcagttaggaatgcatttgcctgcaagtaacgaaaaaatcccaacaacacacaaaagacatttattattctcatattacaagaaatttggaggcaggtagtccagggctgctaacccaagggtattgtcgaggaatttacttggggctgtttattccagggacttttttatgtgtttcttttgatagaattatgtcccataccacttctagttagtagagaagctaggaggccaaaggcttcacctttcagctactatagtacatgaaggcaaggaggaggcttggaatgactgtcgagtgagcctgctgagggtaactaccacagggccactgatattgctcatattttatcctgcaggtgtaatacacatttggctgataggttttcaatttggcacattatttctctgctatatcttaccctcatttattccactctttagcacttcttctccatttaaaagatgaatacacagttctagaggaggtggtagtggtaatgatcctggaaataactaatacttgttggccacttactatgccaggcaagattaagcacttaatatgtgcttaaattagtagaccagtcttaaccatctttcagtcttttcgatcatcatgagaaggtttactagaatgtctgcctcagctgacaagctgcggaatcaaaagatgctagtcattttgaatccataaactcaccaattcagtcaacactattctttcttcatatttcttgtgtacttctttctgcctatcaccatcatctatctatgttaattttggtttagggttttattattgtacccacctgtttcggttcccctaggtctttgttgaccttttcattcatttactcattcattcattcattcatattgttttctgggcccagccacatttcagattggcatatgccagttgatatggtgtctcccaaactcctggcagcctacctgacaattcagaattgctcctgagccaggccattgttgcatgtagctcagacctgtgagcccagctttctgaagagattagcaaagcatatccagcaacttctcagttgagcatgccagaagaataaaataaaaccaataaatagttattgagccacaaaatcaaaggattatagcactggatgaaaccttagagatcatctcttccaatttcctcttcgagttctttttttaagttgagtgtgctgttctttttatattttcatattcttttctaataatatattcacacaatacccttcacttgatgaaagagaaacacgaagggcaggatcacacagctatggccagaagccagagtgtgctgcttgcccatgcccttttttgagggaccatgtctaaggctctccactggggggtgggagggaggagggatatggaggaagaggagtgtggaatgtgtttagagtgttccaatatgggattatcatcacacatgaaaagattggcagggattatcaacaccatggtactgatgactttatcatcttcctccttctccaaatctacccctactgcatcccctgcctccctccttgagggcaaacaccatatactgctcacttctttcctgtgtggcacttacttctgctatgaaaaatcattcctttatataattctttgtttaatgttccctttcctacactgtaaactccatgatgattgatagatactacgcctgcctatgacatccccaattatttgttggattaataaattatcatagtcatcctagacttttccctttcaatcataacctacaacttgaaagtttgtgttctatatgctatttatctacttggaaaatctcatgtttgtctttttgtcttcatccttaccatacctgccttagtttagggcctcatcaccctttctgtggttttctaaatggtctcttttatccagcctcctcactcctgcagctagagctgtttttctcaaatgaaaatttcactgagtgcagtggctcatgcctgtacccagcaatttgggaggttgaggtgtgcaggttgcttgagcccaggagtctgagatgagtctgggcaacatagtgaaaccctgactctacaaaaagtacaaaaattagccaggtatggtagtgtgtgcctgtggtcccagctacttgggaggctgaggtggtaggatcacttgagcccaggaggatgaggctgcagtgagccatgatcgtgccactgtactccagcctgggtaacagaatgaaaccctgtcttaaaaaacaaaacaaaaaaagaaagaaaagaaaggaaaagaaaagaaaatttgaccacctgaattatgtttcataattcatattataattcaaattatgtctagcttcagtagtgaagatagtgaatttctattcaatcattcatttattcattcactcaagagatagctttgagaggccatagtttgctggactctcttttgggggctttttatgtagaagtcaacataaaagtttgctctcaaaatgctcacagattagtgagaatggctgataaaaaacaagatacaattctaaaatatggacttacactttgtgatgactgtcaatgtgaaagaaacaagtaagatgctaaaatggagtttgaatagaggggcagaaggggagggagagatggtttagatagattaggtaggaaaagcttttctggaaagtgacgtttcagatgagaccccaaggatcagaaagagctgtttgtgtgaagatgcagagggcaaactatttgcacagaagaaacaacaggacgaaggcactttggtggggaagaacttgcactgcttagtctgtgaattgagggtgttcataaagatatctgagtccttcaacttctacaagtcaaccaattaagaacttatgtttaaacataaaatattggtttaaacaatgcatttatagttgttattttttattttttactgtgtttttccaacaatacttggttaatagtttggccaaggaatattagactaggtatggaaatgaaaaggaattcagacagctcagtgcttcagactgtgtgggcttatcaaattgtagcttgacatcgtttttggtgacttaatatgcatctttgggaatctttatcattagcctcgttagctacagagactctttcctgagtgtaaatattgatttatgatttttaattaatggtctctcctggatttttccaatgtttatcaaattttggggcttgttttgtatgccaaatgaggtttatcagcaaagatacggactaagaatttttaatatggaacaatcactgcagtgttggttaagaaaatcttgatccctgccttcattcaaattgctatcttaaagaaagaaactagacacacacacacacacacacacacacacacgaacacacacacacacagtgagggctggttgctaggaaggtttgcatattcttttttcttttttttttggaaacagaatctcactctgttgcctaggctggagtgcagtggcacaatcacagctcactccaacctcaacctctccggactcaagcaattctcccacctcagcctcctaagtagctgagaccataggcacctaccaccacacctggcttattttggattttttggcagagacagggttttgtcattttgcccaggttgatcttgaattcctgggctcaagacatccaccagcctcagcctcccaaagtactaggactgcaggtgtgtgccaccacgcccggtcacattctgtttcttgatcttaaacaagagagaatgcaccaatacaattgatattattataacttctgcagttaataataatacactccacataatgtttagaaattagttcattttatatatgaaaaacctgacaatctgcaaatgatctttttcacatcccatagcaaatcagagaacaaaacttggaaatattgctcctccaaaagagtggtcagatcataagtagagagtactttgtatacttcttcccaaatcccagagaggtgaaatgtctatattcatttcttaccctgcttatttattgtatgagaggaaaattaacagatctgcttattttaaatatttggctacaatttaaaaaagtctttttaatgaaatatattgagctgggaacatgtagtgtgcatacctggcccagttgttccacgccacacttcatgaatgctttgtagtattagttcctctagactatttgaataattatgagtcagactaatgatttcagcctctcctaatatttaactagggtatgtgataaatttcttggctttaatcttatctctgtttggccttcagcattttctagaataagtccaatattctgatgcaaacgtgggtctcctcttaaaacagaacacaacaaaacaaaattccttaaaacaaataggctgtagtaaaataccaacagacattccttagctctagaaaagggattaggcattttgggaggcttaaattttgtgtcctaagagctaagaaatagaaacaggaatatggatttttgttggtatttattatattctgccttagctgcacattttttcctcaaaaatgagcattgaacaatatatttaaatttaataaaaggaatccatgttttaatttttcataatacaagtgtgagttggaatcaagacctccatcatttcttggtactttggcttctcactggaacttgagtagtgcaggccgggcactaatcatggacccaaagacctcacaaggacttacctgacagtcatcaagaacagacctcaaggagccctgaaatcatgtcttatctgctatgtaggagaacccagttctccagtaaatttgaattgggacaggcaagagtttgttatcaacgaggttcctttgatacttaaaagcatgtcaacttgagaccagcagcagtgttgtagagtgaaaatcaatgccacaaatcctgcctgaaattcacaactggctatgtttgtggttttctatgaacctactcctgcaaaaaatgacggcacacacaagtatgagatcagctagatgtaaaagacaagtactcccttagtgtatgaggaatataatcccactgtcattcccatgcctcttcactctggcctcacagactataggatgtgcaggaggaatttggttgaaactgttaaccttagttacctgctccagagcagtgtaggtgggtgtgcctcctctcccttctcagatactctgcactctcagctcagccctaaatggtgaaactctagataataaagcaagagcctcagccacagagcgtaactctccatccagactgctcacaccataaaaatgtcgtgatggagcaacctttactgccctgcattgcctacaggttttccatgtttaccatgtgaactcagtgacaacatttctgtggtattttgattttgatcacacatgaagtaacaaatgcccaaaacactatgatattggtgaaaagcttaccaaacatctttcaaaaaccaacaacgcaaaaataagaatttcagcaacaactaacaaaagtatagctatttggatgttcattttaccatttggaaaaaatgcctcttttatatcatttctatcacatgactgcttgcgacaaaattagattaagaaaaattacatagaaagtgtttctatattttatggcgatcacaagaaagaactatgaaagttgcctttgtatggtaagttccacaattaggatatagtacaaaatatgggctggccacatgctggaagaaaatgagcctgggaattgggagtgttgccaggacagcattttaaaattacacacctcctgcaaatgtacgatgctcattcctctccttcttcaaactgatgattcctacctagttccccagatcgagacccgcttccctagagtactgagggaaaatgatttcctcaccttcagttcatcggtcattgcagcagcatgcccctgagaaggagttttaatatccagtttgttttccctgagagccagtgctttaaaattgagttctattgtcaagcacatttaacttcttgtctctaaatctttggtgcagctggggccccttttagaaggttggttttccccaaatgattgagtgtcatcctgaacgacatcacccacaatgaccccttcatctctgcatcaagtcaggggcctacattccattatccttgttcaagagtcaagaatccctagtggaaatgcagtgttcctgggagctgggttaatgttagctaatgccccagagaggatgatttggcccaggtgattctcccagaactcaggagctgctgcttaataagtttgaaggggaccatccagaagctgggtatgcagggtcatgacaaggaccacccccccatcgggtgatggctgaagggactgtctttgggttagggaagatggggctaaaatttcaaaggggaaagcgtggaaccaagaaaagctggacccaggcagtccccttgcaaaatccattgctcagacaaagaaacttggacccccaaggaatttagtgacttgccaacacccacatagcaactttgtggtgagctaaacgtagcacaaggttctcctgacttccagggtatacttgttccactctgccgaagcgtaccctccttcgggcatggcagatgtggaggcctgcaggcggtgtttgcttcagggaaaaaacaaaactaaactaaacacccaaaatgtgctttgggtccttcacatttctagctacatcattttctctgccagaaaggaaatggtgagttagactacaatttgaaatgattttatagatccagctccatgagaagagttgtcacctccgcaatcttattccagataaaataccctaaatcctccaggatttgtctttcattccttaccttctgctcctctgacctgcagtcgccatcccattcgtttttatggatggatcatggaaaccagaaatacacacacagcaaacacatctgtcttttgggtcaaaagaaaaggcacgtgtgtgcacgtgtgtgtatgtgctcctgtgtgtgcacgtgttcctgggtgtgcatgtcacaatgcgaagcaagttatgggaggaccaaaattaacaagatctcccacaaatacctgggtgtaagatggcctttatccaacccagcaattgtgctggaaccccgtattagagtctcattgttctttgttgcctttgttttaagttcagcatgaactggtttttttcttttttgctataaaaaaataaatctgaaaacaataagtcttgttcattgacataaacctgctgtcggttccttgtgggacctatgctgataaaaaccagggaaaaactattttatttgcaatgcaaagaatttttgcctgtggagatttttgtagttcaacagcagtaaaggtatggatagcaaccaaataagctgttaaaatctatatgccccgccctcacccttctcccagtcccaagagacataattaaaactccagaaagtgagaagctgttactaatacaaacgtaactatttagttcaacagaatcatgcatttaccaacttcgtttttacttcatttttaaaaatagttcaagctgaactttttttgctctttcacatacaaagggcttttctgcatgttaatgctttaatacgatttgccaatcagcctgttaatatctgtcaaggaataaacatgctgctcggcaatggggtaatactttttattagggcctctgtgtatacttcagatgtgagcttcactccttctgctgaaaatgttccaattgattgctcatgtattagtctcatctcagttctgttaacaaagttatttgcagtcctagctgactaaactgtccatcgtgaatttttgcatgcgatcagagtacagatgggagcagatgtaaatggcatatgtaatagctagcatatttttcaagacggatgaacacaagcatgctaaaccttggcccagagtgtatacagatctgtttaagatatgccacaaacagaccgaaaggagggtagatttacacacacacacacacacacacacacacacacacatacacacacacacacacacacacacacacacacacacacacacacactttgggcttgtctagccccaaacttctaaagaccctttgagaaagccagttcctcgagaataaattctcaattgtcgggtcctgagggtttgcagtggcacctgcattgaacttgtaggtgttaggaatttttttctctcgctcaatttgcgtaacaatgtgagtatatctaagaattcataaacagagtcatagatctgcccctggaaccagccttcctgggaaattccaaaaacacttgcaaattcccatagggaatcttccagctaagtttagggcatatttgtccaaggtcaccgacagggtgaattatatgggtcaaatttctaggtgtctgtatgtgtctggcactccacttccattccaaactggctagaaaagaatgtttcatttttccattcactttcagtgtctgccctgttcccatagtaacctttggctgtcaccctcccccaccttacacagatagatacacatcctttctgaattaaatggaactatgtgacctaggttatttaagtcctccctatcctgtgtttgctcatctgtaatagggtgataatagaaatacctacttcaacaggttgttatgagattaaatgaggtaaagaagcatcaggttttaccacaatcaccatcactactttgtgctagaggcaaatctccataagaaagttgtccctttaagtctcacgaatagttcacgggtttgggaggtgggggggggcggaagaaaaaaaaaaaacacacaaacctggagtcctggctgggtgtggtggctcatgcctggaattccagcactttggcagggccaaggcaggaggatcacttgagctcaggagttcaagaccagcatgggcaacatagggataccccatctccacaagagataataatctgctgggcatggtggtgtgtacctatagtccagctgctagggaggctgaggtgggagaattgtttgggcccaagaggtcaaggctacagtgagctaggatcccctcactgtactccagcctggacagcagaacaagattcagtgtcaaagaaagaaaaggaaggaagggagggaggggagaaagacagagagggagagaaagaaaaagaaaagaaaagaaaaagaaagaaagaaagagaaagaaagaaaaagggaaaggaagggaagggaagggaaggggagttcctgtaatgtagctgagtgtcttgggacaagcagacctggtgatgcctgtgtctcacactcagccttgggctgcctgatggcttatcatctttcttcaaaaggtagaaacccttttgtcattgcccttccctattccacagtagcaccagaggaagtgttttcagactaccagtgggaatttcagattattttgatgtaaacccattttggggggccagactttatgaataaaattgagtcccattatggtaaaaacacgactctatctagcgtaagaccttgtcgcgcccccaacgttccactccactgcaaactgggaacaaagaacattatctgtgaatgaacgtggagtggggtgaaggtcaaggaattaaaacattatgtttcaatttgaaattttgaatttcaatttgaaatgtttcaatttcaatttgaaatttcaatttgaaatattacagatgtttaaaaagaaagacaaataaaaaccagaaaggttctagtgcatcaatctgcatctagattttttctctattaaaattaaaagtgcttactgacctgcagcattaaggttttttattattattattttcaaagagctagttagttttgttgtcccaccaatgtcaatttctaccagtctttctagattgctcttccttgagaatgaggatgagttttatttagcacacaaaatccaatgagtgtttatgccaattagaggaaaggcatgtgaagaggctcacagatggaaactcttggccaacaacgcgtaccttggccaactctcttttcagacggaagatccccagtgccgttgtcaagataggaatgtccagatcaagttctgctctaccctgattgcagccccccaacccttgagtcttgtggctaggtttcggcccagccttcagctgagtaataaagaataagcctagaacaacttgaggcaatggaaagatgatggccagcattaagaataattttcttttcttaccctgcaatctgtgggtccctttatatgataattactatggtgataaaatcctaattacctttgaatcttcatgagggagaagatttcagactggaaatgtaatctctctggatactaacataaaactacagttgttctgtggatggtgattttacctcctttttgaaaaacctgacgaagtggctggtttgcttgtgggttttgaatagagctggttgttagcatcataggatactgtgcccaatagggtgattttgctgatcccagaatctgtgttgtgcatacacaggactcttgtaaatgcctgagctgatgttaattataaaatacagaaatgtgcagagagacagagaatatttaatcatatgttatgattggagatttttgtttttcttaatggtcagaggaagaactaaaatgccttatgatcagtgtttctatgatgctggtatgtactaggagataaatggatctgcaaatgaggcttctagtgtttggagaaaaacagctttgccagtgtattctttaattttacgtgtcaatttgactgggctgagggatgcccagatagctgataaagtattctttctgggtatatgagagtgttttcagtagaaattagcatttggatcagtagactgactaaagatcactctcaccaatccaggtgggccatcatccaatctgttgagggcctgtatggaatggaaagacaggggaaaggtgaatttgctctctgagctgaggcacccatcttctcctgccctcagacatctgcttctggttctcaggtcttggaacttgggctggaacttacaccactggctctgcttcagggttgaactagaactacaccaccagcattcctgggcctccagcttgcagacagtagatcataggacttctaagccctcattgtcatgtgaacctgtccctcataatagatctgtttatcactttattttctatcggttctgtttctctggagaaccctgaccaggagctagagagttaggaaaacctaaaatttcctcttcagtgagaaatcctcccactcttatttttccatgagcaatttttcagtctaaagatcccgagcaaacctagagaaatcattccaggtagtctagtggttagggggaaaaaaaacaaaaaacaatagaaagtggaagagagaaacatcagtcacatctttctctaaaggcctggtgctgccatctccttaaatattttgaaggaacaatttgaggtgatacctgctttatctttcaaagccattcctacttgcaccatctctgcactgactatgttaacagtgcaaaaggtcatcctctgagtgtctttggatcaggattatttcatgtgttttcaagagagatagtgccggttaccatgacagcattaaccaagggtaacagagaacaaagcttttaaacttagaagaaagaaatcgtccagaaaggaaagaatatttttgacatggaaacccaaagggcaggttggaaataccattacaaattggaatgtgttttttttaatgttcttacttatttgtttgtggactaaatccttttgcaaatgagatttttttaaaattgggctgccaccattatttattttgcaacaaagagtgattgtaaatttttttttaagtagctaccagtacaacaacaggagcaacaataacaacactctttgcatctgggcttatttcattggccgaaaactagactaacctgtaaaagatgtttatagaatgtgaaaataacataggggcaacactggtgatacatcagtggagatgtatcttggtaatgagaagaaaaagcttactcctattaagcagaaaaggggaatttattcaaagatatttggactccccgaattagccagagactggagggaatcaatcacaccaaagacgcagagatcagagtagctccagatgaccagcagtgatggtggccagtggccagacaccagggcttgccagcactggccactggccactatcactgctgaacagcatcgcaaacatgacactaaagggctcagtcttccctttcttgacctcacttgtcctggagtcacagactagggtggagcatccaattgaccaagcctgcattgtgtgctctgctaagaccttattcaacagaaattccccccaaaagaggaaagtagattagatgccggatacctccctaaaatggcatgtgtttaatatgggtggtatgattaaagatattttgctaatttctggtcctaaacatgggagatagaaggcttgcagtaaacaaacaaaaaatccagcctactattagaaggcattgctctctaatactaagacattattagtacttgtaattccggaaatctgcaacttctggagaaattaagagccaagttggccaggataattcttagctgatataaataaatcaagattgacagacataactgcattgtctttttatttctttaatgtaggtcagcattgtccagtagaactttcagcaataatggaaatgtggctggtgcaactgaggaacggaattttaaaatcttatttaattttacccaatttgggccaggcatagtggctcacacctataatcccagcactttgggaggttgagacaggaggatctcttgagcccgggagttcaagaccaaccagggcaacatagtgagacccccaactctacaaaaaataaaaataagagaaaatgaaaaagtacataatttaagctcaatttgaatttgacaataaccacatatggctagcagctactgtattggacacagcagatctagatgaaatcttataaaaattatagcatcatagcgcagagttggaagggatatttgagattcccatagcaagtttgaagttattttttaatgcaaagtatgttgaatgcaagataattaggtttatacctggtgagagggtctgggagggtatagagactgtcattctcaggggtaagataaatgataactggatcataaagaatttatgttgaaaaaggaccactgattagcaccaaagtgtgtgatttctcttgatagtcttttatttgaagaggagatataaagacaatgggatttagcctttaaaaaaagagtatccaactcaatttacaaacataaatatgggtgtaagacaatgaacaggctgtattgccctcgacgctgaacctcttgagatataaagaggaataggaagatgataactttggccgggtgctgtggctcacacctgtaatcccagcattttgggaggcttaggcaggaggattgcttgagctcaggagttcaagaccagcctgggaaacatagtgagacctcatctccactgcaaataaaaataaaaaaattagctgggcttgctggtgcatgcccgtagtctcagctgctcaagaggctgaggtgggaggattgtttgaacccaagagattgaagctgctgtgagctatgatcatgctactgcactccagcctgggtaacagagtgagaccctgtctaaagaaaaaaaaatgataataactttgaaaaggtgctattaaatttattactaaaatattactgagaatttccataatatacttaaagactcttttatttaaaaacaaaaccaaaccaaaggaagcctgtgcttttctgaagtctctcttcttttgctctctttccaattaaagctatgccttaaaagctttaatgtaccaataaaggttttgtgcttttggaatctaaatagagcttttctggatgacgagcaacattaggcagttacaccccaccagagaggaagggactggttttcgtaggtgtgcagaaagcccacagtggtttccctggaagacataaataaattataaaggtaacttcacatatgtggtcaaaggtgaactatatacgaagcaggcagttgaaatctctgtgattcctggccaccagcaagattttccaaagaaaggaagccaccaaaacgccttcaacctaggacaggaattggtaaaccatggcccatgggccaaattcagcctgccacctgttttgtatgtcccacaagctaagaatagtttctacatttgtaaatggttggaaagatagaaagaatggtatttcatgccatgtaaaactcaaatgaattcaaatgtcagtatccacaaataaagttttattggaacacagccccatccattcattgatgtattgtctatggcagctgagtggagcagttgcaatggagaacagatggcctgtgaagatgaaaatatttactatctggcactttacaaaaaaggtgtgccaacctctgaccttgcagatgacatatagtatgggtcatactccaagccaccagagagtattcaacccgcttggaatgtatttgattcagcatagaaaggatagtattgcctttcatttgagaccttttttcatcattctcccaataaatgctacttggttttaggaatggaccatatcttattatctcttatattctgtgtagtttttagaaatagagggtgaacaataatttttgatgaatgattaaatgcatggatgaatgaataaataaattatgtttggaatgacttaccttttcattattatctcatatgaaacatcaggattataatactttcatgaagtaatgagctaaatagtcagttgattactagaaaacacttaggacaatatcaagaacagtaaagtgtcacagaagaagctcttgcaattgaaagccaccctttgaaacatgcagactcatggccatgtcacaaggaatgtgcaaaaccggtagataacgttctccaattcccatttacatctgccatttacatctgttgaattgtgtacacaccaatagtccccagtatctgctaatcactgttatacttcatactgaaaacacataatctaatgaaacatttgaaaaattctgtgtccagaatagagaaatggaaagggtaatatttgttaaacaccttctttgtgtcaggtgctgacttgggcatttcacatacaccttgaaactcagattctctggaacaagattttctgtcttaagcattcttggtaaattgtatctacttgtagccatggagtgggactgtggcccagctgatctgcttggttttgttgttgttgttgttgttttgctgtcttcataaagcagtattgattgccttggtcaaatcaattgtgtggccatttccatttacacatcatttagctgcctgaactgattacttctgccaggacacagtcatgccatttcaatcacacagatccagatagtctaaaatccttcaagtggaaggctaaaacatcacaacaccaggctactaagaattagcctagtgcttccccccccaaccttccataggaaattaatgttcagattagaaggaaacaaatcatcataaggttattttgttcaatgatataaaataaagctgaaatttctgaactacatatttcttaatagcaaagaaaaagaatattaccaattattttccaaactaagtatgtactcatctgtagtggtagcagatggctctttagatctcaaatttaattatctttttttaaaaaaagagacaacaaatggtgattttagtcatctttgattattggacattggcatattggatgaaagttttctgatgtgtttacttggttcacataaagatggcaggggtctgtgccctagaaaagcccaagtactatgattagtggtaacagaacgccttttacaggttattttcaggaatggcagcaatccaacattggcagtggtagtaaaagggagaatgggaatataaagacagttcattgctagaggacaggattttgtttttactattttttttttcaattaataggaaaagtgggtttgcaccttctggcaaattaacctgtaaaaccaatatatctttgaacaaatatactttagcatatgccaggcaatttttattgaaaatcatagtaatgacttcaggccaatatagaagaatactactgttgctgtcctttcagaatgtgatggagatatgctaaaaataatacaaagggctgtaaatgcattcttgaggaaagggccaaatggagagaaagcatttcccaccaaatatgttcaaaaagtgacctagccaggagccttgttaatgtcatagcagcatatagaataagccttaaatgaacttgaaacacaggtttaagaaagacttctggagccaggcgtggtggctcatgcctgtaatctcagcactttgagaggccaaggtggcaggatcgcttgagcccaggagtttgagaccagcctgggcaacaaagtgagaccccatctctacaaaaaaattaaaataaagacttctgcacctttctatttctgtttcaacttttcctggtcctctttctttcgccgggcacttgataccaacatgtgtcagacgtaagcttttgctgaactttctttcctcctatccaaatgcacctatgttttcaaggtgctgttttgcattcttaactgtgcatattacattttgattttaattttaattttattcttttattggaagtgctacacctgtcttttgcactttcactatttcaagctttcgtaaactcatggttctaggtagcatggtagaggaagcaccgctaggtaggaatcatgagagctgaattccagttctggctctgtgactttctacctgtctgagcctcagcttcctcacttgtaaaacaggataaataatgtttgacctactggcttttggtggttaaaagtgaaagatattgacattattattattagaagtctaaacaaatgtgttaaaatagccaaattataaattttggcaatggagtaatctcttactcccaaaataattaataaaaaaattttattttaaggtaaactgatagccatatttcaatttttatatgaatttctcatatctaatagtttatattaatgactttttctactctcaatattagttattaaaattagaataacagggtagcatttcataatttataatgtcataatttcactcctactgtgaaagctcctattttcaaattgctttaaggtaataatggaagttttggtttcacactatggttttaaagatatttattctagtaacctaaacttttaatggttctgatttttaaagtgtcagaaacatgagtatttatagaaagccagcatagatgaaagaatatgattatgtggtctatttaagatagcactgtattgaaacaggtggtagagtggaaagaggctagccagagtgggtctgaattctgtctcctctactttctgtgtggtccctctactttctttgagccttagtttctccttctataaaatgggattaaatagtaacatcctgcagtaacgttgtgagagtttgagagattgcatgcaaaatgccttgtgcacagattagatgcacaataaactgttattacataactatcctcttacacatattcacctgggaataaactctcttaggctttggtgcctgttgctaatgggtggatcacagtggattcctatgatgctacccgaatgtgtaattttattgtaggctgtcttttaagtacaaggaaactctgattcaataaaagatgattagtgaccagttgcctttgcacacatgcccaaaggtgaaaaactttgtaatggatagtccaagttcattcttcttttttctgtctaggaaaaatctttagacttggtatggcattgagctctgtagccacagacatgagtgaaattaaactgaggaagagaataaaattaggaaagtgagtaacaagttgtgtgtgattcggcagagagttgaagagattaccttggaaaatttccatgtaaagcgtaacatcaaatataaactattccttttaatcgaaacatgtgagacaccaactcttattctggaagagccatccataaataaattatagctaccatttgaaaaatagaactaggtatattcactaaacatatataagattgtgctgtttttctccttgaggcactttggggtgatgggattttgaaatgcaggtgattttcttaggaacagaagtcattctgtaacttgtcagtgtgttgacatggcatgccctttcagatttccagcatgaaggcaagtagtgtttcattgagcctgactgagtgtgggtgaaaacattcattatacatttattttatccctttagaagtagctatttccatgctagccatttcccgtgttacactttgggaaaatgtgagtttactactcaaccaagagagcatgctggacatcacctcacattatttacctgtcaggtataataattttgcattcaactatctgagaatgaatccataggcattcaaaagactcttttcagaatccagtaaaaattaaagtccaaaatctaccacccaaagatgcacagaagcagtggtacgctggtaaaccagctccctgggggaagagctctgatttgtagtgtttgctgggttctgcagcataaattctcttattgtggtccatgtgaagctaccaacagtttatgaacctgcttgcaagattcctgactattaaccaattggctctggcaaagcaagtacaactgatcccaccacactactccctttagagtggattttagaacttcaagccctgacagtttgaatttcttttggatccagagacattttaatgaagctgacagctacctgtcacttgaggctgtatataggagcatgtggattttcccccatttacttgcctttactgcattttttaaagctgtttttcatttccagtagccaatatacattacacctgtgaagttccagatacaccagacctctaatgaaaacattgatttatacaaataagatgttgcctctttatccaaaccattaaaaatctaagatatactatagcacatactccctcagcaattagtaaaggcttgccactttcgggagtcgatacagctcgctccccctcttctagttctcagcttactgaggagttctgctgacaccactcgaacagctgggctcctaactgagctgcttctgcctgtcagtggctggcaaagtgatttgattcctttatgtgcgtaatacagtacagcactttgaggctcgcaaatggcactgtttaaatcaatacataatgatgtattacatattgtggagcacttataaatatattatgaagctctagagcatgccaacatcataggctagtagtaggcaagggtaggagccctctatactattttcttctgcattctgcaattgagatgtcctttgatcctggatcatccatttaccttttctgtactgcattttgtaagtttgcagaacagggtcgctagtgatgagattgcaaatggtttagaggtatgggtggtatatgggcaatattcattcaaactaaagaattattgtattttaatatcttccatataaacaagcagcaaaattgataccaatgaggcaccctgatgaaaaatgagaggttcaaatgtacacacacgcagtaaaagtctaaagccaggcataggaatgataattaataaattcaagacccccgtgacctttggagcagaggagaagggaacgactcagacctagtcggggtttacaggtgaaaattcaattcttttttttcagacagggtctgactccatcacccaggctggagtacagtggcacaatattggctcactgcagcctcgacctcctgagctcaggtgatcctcccacagcagccaccagaatagctgggggtgtgccactatgcttggctaatttttgtattatttgtagagatgaggtttcaccatgttgcccaggctggtcttgaactcctgagctcaagagatctgcctgtgtcagccccccaaagtgctgaggttacaggcatgagccactgtgtgaggcaccatcctgtttctggtgtttatttcttagctcgaatggtggcatgtaggtgtttgttgtattactctttaaacgtttttgcctgtctgaaaacatacactaaaaagcatttgaacaaaataaggctgggcatggtggctcatgcccataatcctagccctttgggaggcctaggtgggaggattgcttgaatccaggagttcaacaccagcttgggctgtgtggccatcctgcttgtctctacaaaataaatttaaaaattagccaggcattgtggcacatacctgtggtcctagctactcaggaagctgaggagagagagagaattgcttgagaccaggaggtcaaggctgctgtgagctgcgttcatgccactgcactccagcctgagtgacagagaccttgtttcaaaaacacaaattaattaagtaattaatttaataagattaaaagggtttctgttaaactgaactatgcatttaaaaatggttaagatgataaatttttatattatgtgcttttttatcacaaaaataaaaggtttctgttagtcgtgttatgtgtacatttagttttcataatggtaccatctttgcaaatgaacacattttggaatttttgtttatatctttgtttgttttacacattgatgcagattggggaaactctaaatgtctgccgtcaactgagctttgtgcagagactataacaggaataacaggatttaattaatccccatcaaggccaacagttagagctggacaaagaaaaggcagggaaaaaaagccaacagttcattaacaaattctaaaacatttaaaaaatgtagaacgttgagcatattgaatataatttttattgattaagagagaaaataaatggagatacgtttaggtacttgtctaaaattcagcccagctttacccctatgtggactggtcacataacaacatcataacatttactcataagcttaaccaaaaaggcacaatgaacaaaagctagaatctacttgaacacaaatttatcttttcaaagttatttcaactaaaaataaaaacaacaaagaaattatgaagatgaagacgagagaggttttttgagataattattaaacctaagaagattaaacataccatcttggacatagcattcctcattttcagagtcaatgtgataatgtgctgtttagcctgttgagtaatatcatggagtacaacattcttatgaacaacaaaaaagaaatcactctcatgtatttatacctaatcatttcctgctttgcaatatttctaagttaaaatcagattattatcatagcagcatcgtgtataaatgatccaaagcctgaatccaaagtataaaatagagaatagcaatgttccaacaaggctaattggccacagccttggatttgcactttcaacagttgtcagtccaagctcctgacctcctctctcaggaaaaggggctgaggagtgtgtgaacaggagggacctatttaagaaagtccatctctgctcagtcagcactttcatgcatctcgagagttgagagagatgtttagtccagggcactttatttgtaatgcatttctctttggttattacaaaccaattttttgaccttgtgcatttacatctaagaagatttttttttttctcttttgaggatcagttgtgacccactaggaaggttttagcccttctctcagtgtcctcttgttttagaaatatgtcaggacagccaactcacaggacaatacatgagacaattattgtgtatggaagaaaagtaaggaaaaagagggactttctgagagaatttcaagtgattaggtgcatgtaatacttttccatgcagccaggatcccaaacacacataatccctcctgaaaatacacctgtccatctgcaaggcaccaaccccattaccctcacctgccatactgacagagggccataagtacatggtggatgtagttgtaaaataattttttcatgccatgtgttggagaagtaggtgatagttacaagtttcaagggggtgtctctgaacaattggtttccaaatatataccctgtcaagacagaaggaattcagggaccaagccagagcctgctttgataattctcgccagtgatattagagcagggtcgatcctcagttccccttgctgttgcaattgtattctccaccacccccaccaccatatccccttggcctacacttcaagaataaaattgcagctggacattgtggctcatgcctgtaatcccagcactttgggaggccgaggcaggtggatcacaaggtcaggagttcgagaccagcctggccaatatagtgaaaccccgtctctactaacaatacaaaaattagccaggtgcctgcagacctggctacttgtgcagcggaggcaggagaatcacttgaacccaggaggcagaggttgcagtgagcggagatcgtgccactgcactccagcctgggtgacagagcaagactctctctcgaaaaaaaaaaaaaaaaaaaaagaataaaattgctccaaagcactattctagtcattatgtctcctttgtaaaagtagtggaaccaatcagctatccaagccagctgcttagatatatgttggcatggctcattagagtacagttataaactaattcatagaaatattctgaaggatgtttttatggctttatgtgtgtataaatctctttgtttgcacacagagaacactgattgaacaaaatgatgaactgctggttccatttctcgtctgctcactgagcaggcacattatagtctatcttaggctactctggtgtaaacaatatatttgtgaccatgagcatcgtttattccacacctttgtcctccttaatgcagaggatgcaataaaaataaatacactcataagggcggagcacggcttgcacatcagggataattatggctctagaaaaatgagagaaagagtttttaactgccttttggagccatttctctcatgcacgccccagacttgtttttcaaagaatcaggataaaatttctgaagtcaaagagtaaaattcattttatgacctaccctgtgattgtacgaactcagaaagaaacagaattgtggccaaaacaatagttcctatctacctctgcccatgaactgatttgagtgttcattttgctttaaaggctttgttgttagatcgactcttatttggagtttcacgcaggctggagatgcttaacagtggtgaaggaggcaagagtttctgttctgcacatgcagcaattatcttcattgcaagagaagccagtccctgcagctgcactggggagctcaggcatcccagaacaaagcacgtctgcactcatgcacacagaaacgtgagagacaccatcaaatagacagctcactgaggcctggccaagtggcccacaagcagctcatggtgttcccaggaggatgcagcctggctttcttagactctgagctgatcaaatcaaggggtgatgggaaggccatgttgagtcgccagttttgggaggaggataaggaaagggctgacagctgctgcacaactggtgaaaaccatgggtagcaatagcagcctcctgttgtaggggaaaaaacagcatagacatagactatttccaataaatgaatgctttctcagtggtccctctattgactcggtctctaatctttaaatcattgcactaaatattatatgtgtgtgtgtgtatatatatatatatatatatatatatgtatatataagtcataatttataataagttttcatgttgagggatttccaaaatgaaatgagaatgaatactttatttggtcctcttcctcagaacactggccaactgactcattcctttcacaaatgtggaagagaatcaatgttttaaacaacctacttaataaacatactaggtggatcggatttttcttatttattagggatgcctgagtaaagtctttgcaggcaattatttcgtatctggaaagtccctctcagcaactggaattggttcctgtggcacttcagaagatggaaatggtgttcagagtgaaatactttttaggatgttggatattttatgcaagagaagggcaaactgagctttaaaagaggcaacaaagcattttttccaattatgaggaagtttaaagtgtgagctacagaacactctaaactcaagaatcctttttattcttctctcagtatgctgtgacaaggtcctgtagccagctgtgttttgcgtgcagagagcacaaagccctaaaccaacattattgttaatcctcatggtatcctttggcagaaggagctggaaaacaagttatataaatatataactctttgtgacaacatattttacaattatttttagtttttaagctgcctcctaatttaaacatacaaaaaaactgatgcaatatggactagattaatttgaattaaatttcaatatgattttgatacttctaatgaatgatgagtttaaaatacaaaaattaaatacaaatacagtggttcaagatgacaaactgagtccatatgcctacctcctctcataacctcctcttgatataagaaataaaaataagaaatatatatattaaactataacagcactgggaaatgacagtggtatcattattggatcagacattttgaggattttctagaagacataataagaacagtagagaaaagttaaaggaaactgctgtcctaaacaccaggagcaagtgggtgcttccccaggtccctcagctacactccaaacttcaacaatattgaagagcagcagtggccttggagcaaaaatttattaaagaactgcattgaaatgagctgagatgattggcagttttgcttgcctgtaaatgatgccaaaaatgtgctgtgcatagtatagcattgctatgatagcttatagcttatctataaaaacaaagacaacattctataagtgttttttatgaaaaaaaagttgcagttaaaataacagaattcagaatggcctcaaatgtcttatcagcaccacgtgttcttagaaagcaaagaaccactgtcctcaaaagaactgagggaaattattttgaacctagctttctatacccagccaaactatcatctatgcattcaacagttttttttttttttttttttgagcatgtactatgagttaggcattctgttattctgaagagatacaacggtaagcaaaagcagagttacttcttgccctctcaaagctgataatctacttggggatgtggagaaaaataatcactcaaacaaatggaaaattacagacagggataaattgcaccatccagtactgtccacacaaacatgaaataaaacattatcttattaataactgagaagtcctatagtaaaaaaaagtctagagaactttgtttaacctaatgtttcctaaacttatttaaatatggaattatgcccccaccccttcaccttttcctccctttcttcttcttcccattcttattcttacattaatattctgtggagcttgtgttcctcacaactcattctgggaagtgctggaatccaaaggaaaaagccatcctccttggcactgcctgcagggtttttctcagtctgaccccagcttacattccccctccttgctcttcacaaacctctcccttagacactctctgttgtttgccaggccttgaaggttccaaccactttggcaatttcttgtcatcagtgctgttttctctatctgaataaatttcaacactcattcaccgagcactttttcagcttttatccctggaaatgttgggggagggtagggaatggggtggtgggaatgggggtgaggggagaagtagaaatgaaaacatggccctttcttcaaggatcttgttgtctcttgcttctggtatttttcttcctagcccccaaaccctaattcaaatgtaatgtcctcagtgaagccttcttcaattgcttccttcctccttaagccccattcctagttgtccttcccctggtacagcccactctgctgccatagcatttagtatgtcataattgtttatcacttgtatgtgtcactctttctggatgctcagtgagtgtctcttaaattcatataatgaatgagaataaagattttcccataaatattctctctctcatttctctacccaccctccccacccctctggctccctggagcccaggctctatgtacatgtcaaggggggaaactgcttctccctcattctgcacaaaatcaaaattttctcaatacatcatctatctttttctctgggctatgtgcatgtctgctagcataaattacttgctgcatttagagactaaacttcataaatataactccctatctttattgaaacagagtcacagagttcaggaaagctctgatattttctgacttttatttttctctcaagcaacagttgattggtttttcaggttcattctgactctaggtttacagcacactcatttattgtccatgtactagggatccctctcttgcgcttacagaaagtttgaaatctaatgtacattatttttaaggaggaagataatgaagatttaacatgaaagttgcaggcaaattgtaaacattataaatgacaactgcttttcctgtaacaatctgcaaacacaccagctgtgaaggaaactgacattctgtacttaggcagaaacatcatgtaatagggaacacagttctttgtttggatctgtttcctgtgagtgcatttcacattaggtctgtgcatgccaacccctggggacaaggtgcttgccccaaagtgaacagcagaaaaaagggctgctcttctagcggcctagacctgatcctccagagaactttgtaaaatcactacaagagtagacaaaaaaggagcagaagaaaagccaggtcattcctttgatgatctaatgggttgaaatggttccttatcactcagggtcagccaccagccttgatttaaaaggtgagaaaacacctaacatggtttggacaagacgttgaaggggcctgggcttttacgaggcagagaccttcaagtacctaaaaagatctaaggataagtgacttcaccaggtggcctcgccccagctcagcactgtatttcaagctactgagaggagttccaaacgcaatgtgggttaagtgcgctctcgtgcttgcctcggcaggaaatggcggtggttaaacttggcccgctcaaacccgtgcagtgcagggttgttgatttttgctccccacagtaagtcttcgggggccaaaccataaagctgacttgtcatctctctctgaaaagtttgatttaagcacttacctacagacgatgagctactcaacccccaattccagctccccccaacacacagccctaaagagatgacctgtgaatatgctgggaggcgctgaggaagttccgtctctgtttctctccccaggaaggataagaaagggcaaaaaagcttttggtaaatgagttagctactgtctgcccattttgcttcactgtcagctttactatttagtactcattgattgatgcagaggatggtatacataagggtgtcggtatagatgaaagatcaggctgggcgcagtggctcacacctgtaatcccagcactttgggaggcttaggtgggtggatcacgaggtcaggagttcgagatcagcttggccaagatggtgaaaccccatctctactaaaaatacaaaaattagccaggcgtggtgatgggtgcctgtaatcccagctactctggaggctgaggtaggagaatcgcttgaacctgggaggtggaggttgcagtgagccgagatcgcaccactgcactccagcctgggtgacagagcaagattccatctcaaaaaaaaaaagaaagatcgaaatgttcctcatactaaaatcttagaggaaaagctctcccttcattttatttttcttgagacagggtctcactctgtcacccaggctggagtgtagtggagtgatctcagctcactgtaatctctgcctcccaggctcaagcgattctcccatctcagcctcccaagtagctgggactacaggtgtgcaccagcaagccaggctaatttttgtgggttttgtagagatggggtttcaccatattgcccaggctggtctcaaactcttgggctcaagagatgcaccctgccttggcctcccaaagtgttgggattatgggtgtgagccaccgcactcggccagctgtccccttttgagtgaaggctgaaggatcctttaagtcaagaggggaccacaagtctctggtctaagattccgttttcatatttgccagttggaaccatctctggtttctacatggaagtatcagaaactgaaagcctgcttttacatggtgatctcttttctttacacatataatcctagtatttatttttcttctggaaatttaatgtttgtgatctgtaatagatagagagattctaatcatctctgtttacatttgtgtgtttgtgttaatttattctttccccttctctcatttgctcataataaacatgttcttctacaccttgacttctttcatgtgctttagtactgcaggtactgctgtttcattgaatgggggccttagtaattactatcccttcccaaagtgcaggctaaattcttctgtgggagagtgttataagtgcttctcaaacttagcatgcagaagaataactggaaaaccatacagattccaggaccccaccttcccaaagatctcaagtgaggtctaagaatttgcatttctagcaagtccttaggtgatgctgatgctgctggtcccaggacttcaattaggacctgtactttcctagaaacccatgatccaggacttttctgctcacttggcttctaacatctctctttctgagagctttcaacttcatcatgaaaaacaagttgaacagtgatcttgtccatagagatagaattaacattcttgtcttctagctatgtgtcacatcaaatccttggtttgattagcttgaagagccaattcagcccttcaagtaaaacttggtattttagattctaaatcttttccagtttcaatgccttgtaggactttaagaataatgcttgtctaagaaaagatgaaaaatacatttttttccttctttctctcctttccttcctctcttctttccttcctttctctctccaagtatgaaggtttgactaaaatgaaatttcccattttattcttctgacttctcttgtgcctaccgtttttccatcatagttcctgtgttcctagggaaagggtgaccattgaattggaagacatgatacctgtgtacttaacattttctcaaatgtgataatttgtgattttcctgaagtatgccacaggagactatttcagcatgccgtctgtttttttccaaagattcaccaagattcataaaagattaggaacagaactcttctagtctgcattaatgcattttggtaacaaaatggacagccctttcatgtggagaaggggaaattaataccccagaagagcaaaaagggaagaaaaagagagttttagacgtagtgtattctcccagaagtcacagaacaggtacaaataatgagggttgtaaaaggaagacagacctggctaagtgttgtgtcagggaagtctgtgatctcaggctattaaatattatccggctctttctggtcatcataattcaaaaccacaggacagtgtggcagttgtgagccaagtggttatcatgcctttgcccaaaaggctaagaaaaagacaaaagctgggaaagatcagagaacatattgggttgcgataaggaggttatctcatttctctatggaagcatcacaaaatacctagcttgacctctgctgctgggtaatgaatttccatgaaggaccatcagggagggccaaggaggtgtatggggaggatggggtaggggagagcggaaaccagtgatcaatgttgcctgcgtctcctacagcccagctaaaagggccaggcagagttgcattaaacctgattagaaaactctgcttaatacattaaagaaacaacttgcagaaacatctacctcccttccttcctcccccaaacagtaatgagtccaaattgctaataaaacataaaaactcaaagatgttgtacatgggccatttttctgagctggttattttttatgtcagttttcccacagctgtgagcatgctataactatcaacttaccaaatgccctagtttaaatgaaacttacaagaatgtatttaggaactttataagaaagtagggggaaaaacagacaagcaagattatccatttttttcttttggtaagaaagaggaatttggcaggatatagggggaacatggcttgaactgataattctcagaaaatagtggttgagagaatagaagatttatccatcttcttgcaaagccattattcaaagatcacatttagccttcagctgcttgggaggctgtggtgggaggattgcttgagcccagaagtttgagaccagtctgggcaccatactgtaggcatgatctaaattctgaggttaacttacgcaagtagaattaagaggcaagtctaaagcacaaggaagaacaaagagtgctgccgacacccttaaaaatatcccatgtaaaagtcattccacccatgatggattaaatggcctaaactttctaaagaaaaaacagtaagaaaaatctattttttgctgtcttttttcatttcatctctcaaaaaatagtaaacatttttatttggaaatctgtgaatgttgagttataaggagcgattgccaaaagtttggataataaatgagaaatacatgttgtgaagatgaaacttgcatgtcatacccaaaatcagaaattgagctctgtccctctgtgtgctcagcaacaccattcaagctacaaaacaccttagggatatttaatgttctgtgcccaccccttataaatgtatatgactcaatatccccaatgagtaatgtggccagcagccataccaccttcagctaagctctcataagctgaacagggttgggctagatccctgttcttatgagagacctccaaagaaaccctggaggtgtcagtgatgattcagtgggtagttccctgacttgagtcagtcccaaatcactttcctttcctgatgttaacggatcctttacatatgcaggtgcggcttttttgagaatcagtccaaaccctgtttacttttaaaatatatatattttttatttaaaataaacgccatggaccagatagcccaaagaaagggaagaggaaaagaaagggtacaacagaacaggagaaaatggatacattgcaagctaaatcccacttcaacaaactttgtcaaacttgggcatggtggttcacgcctgttattgcaactactcaggaggcccaggcagggggatcaggatcacctgagcctaggagttcaagaccaacctgggaaaataaaaaataaaaaaattagccaggagtgtgtcccagctacttggaggctgaggcgggaggatcaattgagctcacttgagttcaaagctgccgtgagctatcattatgccactgtactccagcctggacaaaagagagagaccctttcttaggaaaaaaaaaaaaaacctcaaaatgatttccctagttatttgattatagtggagcttgcttgtcacaaactttgcttggatcaaataggtcaccagcgacaagacttggggatctgcttttttgtgaagagtgaaacgaggactgatgctcttggaatcatgtagaaaattctgtctgaccgtgaacaagccactgtaaacaaatccgaaagatatacaccttcaaacagttctcagatgcatgctgtccctgggtggggctgttgaatcccactgtgggagctggaatgtcaatcagaattatcaaggatactatttattggcatgagtgtgttcttgtaagcacttacccttcctatctagttgctcgaaactgccagcaagttttgtttggggcaattaaaatgctatgtgaccccttagaaatttctgtcttgagggtgttcaaatttttaaagatacagaatattttgaggttttggaataaaaagcacttgttaatatataaaagaaactgtgggcatatttcctttcttccatgaaatacgcttagcctgcttatatcctttttaaaccaaggatatgaataaatctgcccaaatattttctttgggatgggaatcattctctaagtagatgatgttttaaaaaaataaaagagagaaaagaaaaaaaagatgaaaccgttaaaaaagaaaacttcttggtgttatataagaactcattctgtttatttgtaaactcacaaaatgtttctaagtttgcaaataaaaatttttctatacaaccatttttgaagccgaatccagcctgtctccttaaaatgacaaagccgaggaaacgaaaacaaatacctgtttaatggactcgaaattagtccacatttatacttttctttgagaaatatgttagactgaaaaatatggcaagtggttaatatttggttcttattaacaaagttttcaaacttttgctttgcctttaaaaaggagaatatttacattatgtgagacaatttaaaggtttaaaaaatgcacgtctgcctttcagtcacatgaagttaatcatacttcttcttgcataatttccccagccttgagtactacagagttgtatacaaaaatcacacattttcataaaccaatctatagttaggttgtaccacgtttaagtctcttataaactctacttgtttcaggactcattgttatgaggacacggaaagaaacttcatgaagtttcccttcccaggtctaatgcatgacctcactttatgctgttcagtttttattaaattctttgctagcttaatgctaaaagatatataagaaaactaataaaaagagtatagcatcttttaattgaaggaaaaaatgagtgctttgcattccaaaatgaagggtcatatattcttttccattgtctgggttttgtaaacatctctggacatgtcaaagtttatttctcattattttagtaattacttttattatatgtttgtaactatacagaatcctattttaattatgcaactgtgagtgtggttttatacgatgacaaaagaattgctatggccaatgaaatatatgttttcctgtaaagtttatgttacaacaaaaaatactgatttaatctttaatatagtaaggaagggagaaggaagtatgtacaaaaaccaaaacaaaatgagttcacaaagggttaggttttcttctaaacagatttggatgaaaataggttttattacattgaaagcaacggggagtattttaggtaggaactatctggttctttgatattatttctataatttcagtctgtattagaatcagatcatattgttaggcctcaagcgtgccatggcattcagttttaccggtgagtgagagtgtgaagtttcatgtcaaattcatcacaatgctctgtccacggcccgctgctaccctcctctttcagaggctggggccctcttgctgaccctcagttctagaccttgtcctttcactctgccctgctctgaggccccgtgtagtggtatccttcccagtatgcaacacgagaaaggcaccaatactgtgcatcagaaattcttagtcaagaaagaacacatctggcttgaggtaccaggaaccctttcttgcaatgaaaacatttgatatgggtctcatagaaactgcagaactatgagctgtgaaggatgtttcaagttgaaggatcagcattagcaaagttgtagatgtagggaagatcaagatgtattgagaaaaatcaaacatgtccagtttggttctagccaaaacttacagggtacgtgttggtaaatagtggcagatgatgctaaaatataggatgtgaccaaataactaggcaacgtttactttgatttgttagcaattgagagcttgtgttttgagcaagggaataaaatgattaaaacccctttatgtttgtgtcctggattggttcctggaaatgaaattagtgaaataaactaatccaaataaagcctgaagctaagttaatagtactgtaccagcgtcaatttctcagttctggtaaatgtaccggggttgtgtaagatgttaccatgaggggaagctggtggagggcatacaggaaggctctgctctaggcttacaacacttctgaaaatcggaagttatttcaaaataaaaagaaacagcaacaacaaaacaccactgtgggactctatcttcaacacaggaccatcacatcaagggcaacaggggacggcttggctgatttttataacagtggctacaagccaagctcatagaagtaaagcatttactgttttaccgtaagctctggaagtctgtttcctgtgtcaagaatctttgttgctgtaatttcacctgctcctaggatctgcgtcgtcctgtgccctgccataaggatgtaactctcagctcaaagccaagggctgctcaagggacagacacaccaggcacaacaaggggagcccccgctaccttgggcttctcttcttgctttctgtaccaattctcctgctgtcactatcccctttgaccgtgttctcatgttctctgccacatgcgagagaaagtaaaacgtttttgagaccagttggtacatggtctgaaaagtgcttgcaataattctccctgtctacaggggacacttttcaagacccccagtggatgcctgaacctgtgatcataccgaaccctctatatactgctttttcctatccgtgcatacctatgataaagtttaatttgtaaattaggcacaataagagactaacaacaatacctaataataaagtagaaccattatagcaatatactgtgataaaagctatgtgaaggtggtttctctttctctctcaaaatatctcattgtaccgtactcacctgttttctgactgcagttgactgcaggtaactgaaacggcagaaaaccaagctgtgaataaggcagggctactatatttgagctcattgccttttagtcggtgattttaaatgtatctctccgttaagaccatttacctgaatttgggctactgtgtttccatcattaggaatgttttctgtagtcattaatgcagactaagagaagctgacactttaccccaaaataatataaacatatttcatctatgactactttgatacagagtacggcataaggggatatgtagcttatatgaggaaattgtcttaagtttgtctttaattctacatatctcccatgtgccatctaaaaagcctggaactataaatcaatacaagtcaaaacaaagaagttcactaatatgaaaatatataggcatgtgcatgttggtacagtgtgtattctttccacaactctgtagtagcctgctttgttgaggaagttaccattacatttctttaaaacaatttgtaaagaaatccatttccctttctttttaaatagagacagggtctcactatgttgcctaggctggtctcgaactcctggcctcaggcaattgcacttggccacacactttttgataatggactgttgcagaaaatataactgtggcggagagtggtgacttcatgcctgtgctttgggaggctgaggcgggaggatcgcttgaggcaaggagttcgagactagcctgggaaacatagcaagaccctgtccctgcaaaaatttttaaaaatgagcaggacaggcctgtagtcccacctacgtgggaggctgaggtggggaggactgcttcagcctgggaggtcaaggccgcagtgagccgtgatctcaccactgcactccagcctgggtgacagagtgagaccctgtctcaaaaagaaaaaaaaaaaaaagtgtgtactaaattggttgagtttttttagtgacatttattgtcaagtgagttcagacatttcctatttaaaaatacgtttcctgctttctatgatctcttcccagaaaactgaggttctcttatcgcttgctttagcataagcataattttgggtaacttgggtgactcttagatgttgctagttcaactagaacacagcaatcctaatttttcagactggggagaagcaagagactttggcctttttccctgtctcaggtacctcatctaaaattctggtgggacttgggttgcttagtcgccagtcaacatgtgaaggttacaaccagacggagaaaccaagaaagacgaattgagcctttcagttcttatttgttttgtttagtggcctcaaagaaaaagcaacaaggtgtggtggattagagtatgaacacatcagtcaactgcctgagtgtgtgactggactctgccacgtgccagctgtgtgaccttgggcaagttacttcacctgtctgaatttttgtttcctcaactgtaaaagaaagataaaaatagccagatttacttttagaatgtgaagagaccttacagattagctcttagtacattgcttggcatttagcaaggactttctggttagctcttatttttattataataattattattacactttcttaatcttttttaccttcaaagtttcaaccatgcacttaatgcctgtgagctttacaccttaaaaagattaaaatggtaaattttgttgttacgtatattttactacaatgaattaaaaaacaagttgcaatcatcccaaacaattaaatacaaaaatcactttctaaaataaaacaacacacattcaggacaccagacaaggagatcagttgtattatggaaaaaaaaaaaaaacacacacacacacacacacacacacaaacactggactaggttttaaaagacctgggatctagttaataaatctgtgttcttgaccaagtcattacacctttctaatctcagctttctccttgggaaaagttttaagaagattaaaggagataacagattgctttgtaacacatataaattggtattattgtggctagagtccctattgctttttatctgcttctaagaacagatccaggatgttgtacagaactgcagaaaaaaaaaatgctcttttcataatgcatttatttggttacaaaaacatcatggcatttaataacgtactataaaataggctctgataaactctgattgacagagactggctgtcttgacctggttaacgggaaatgccctgggcctcagacccaaggctgacatattgttcagtttcacagcttccactccccagcccaaagccaacaacgaattcagggaaattactggatgagacctcccctacaatccagagataccagccctcccagtgctgtcatagaaacagctctgaattactcagaagggggtctggagtggttgagcaagcaagcagcttaacttctccctagttcagttttttcacctgcagaatgaggaaatttggactttaaaattttcatgctccaacactgtgtgagattgtattaacaaagtactttgaaaattttagggtattttcctgttctttttccataaatttgaagtaaccattatggcatttggcctcttagattaccttgagtcccctggaccccagaaaccacccgccccataccttacctctactgcccttttctaagtcagtgtaggccatcttctggggagggaaggattgatttagacccagtgccactactgttgagcaaaatttggatttacccagagtaatacaaggattttcagaaacatccacaatttagcgtttaaatcttaaaatgtattaattggtgtttgcaatctgggatattgaatttctcaaatcttccatttgtttgtatactcagggccttttgggtctaacacaatggctatcatcacacattctaaaaggacctccccattttaaaacctgtcccaggatacctgttttcacagatggagaaaaatccagaaagcatctgctcctattgtcccctggaaagcagctcttagaacccgctgggcagcccacattcccaaactgccctgggaccctctcaaagtgagaaatggcatagaagtcttaaaatcacatacattaataaggtgtattgctttaaaacatgctttatgattttctttttaatcttgctctctaaacttagaaactaaagaaggtctacatctcatgcccatgggcaattttagttttatcctttttgccaagtttcaaaagtggtaatgaataaagcagagcccgtgttgacatgaagtttctctctctctctttttttttttttttttttttttttttttggagacattcgagtctcgctctgccacccaggcgggagtgcagtggcgtgatctcagctcactgcaacctccacctacttaggctcaagtgatcctccctactcagcctcccaagtagctgagactacaggcgtacaccaccacactcaactaatttttgtattttttgtagagacggggtctcatcatgttggccaggctggtctcaaactcctggactcaagtaatctgcccacctcagcctcccaaagtgccagaattacaggtgtggctgccatgtccaaccaatttatctcttgcatatgaaaactacatatatttgtttaggtattagagcagtgttttaactcccccaagagcatccatggtaaaaggacagggtgcataggcagcagggtatttaaaagcttttggactcacgcagattttttttttaagttccttatcttttcttgcctgcaaataagatcttcaaattttctgcattacaagagtccctttcttgatgttttcaaccataggggaaagggatggagcgtttgcaggaaggtgttaggtagaaggaggactattctcccactcagctgagagtgagttgacttttaatctctttcctgagcagaacccagctgcaggagctactgaatagttgatgtctaacaaatgtgtactttggagtcatctgaagtgactgttgtactgacattggcttccaggactctttcctgtccacttcctggttttcctcccaggtcgctggctaatccttctctgcccacctcttactgtgagagtatcctgcatgactcatttctgagatttacactgcctatggccttaaagaaagtcaatcagaattgattcccattggatgtcttcagcgcagaccaacctgctgagctcagatgttcctgtccctctgttctcctgattcctctgcctgtatgtccaaaacaaaactctggacgttttcaaaccacatgtgatcacagtcgtcttcaccacagttggcacaagcctgtatcactactcatccagactattgcaaaatatcttacctgttgtccaatctcgaattctttccctctgacagtctgttctccacacagcaattaatgcaattttcttaaaataaaaatcagattatgctagtcccttctttagactttccagtggctttttctcaccaattaaaatagaaactctgtagtgacttgcaatactccacctacctctcccaggttaccgcttttccctctctttctccttccctccaaggtcttctttcttttcctgcatgaaacacaccaatttccttcctgccttagggcatttatctaggtggttctctctgtatacctcttccctgtagccatatgtggctccttctcactaatcaatcctcaggtaaaatgtcatctctttggaggggagttgcctaaatatttgatctaagagtcttcaccacatccaatgctccctctcatcaccatgttttattttctttgtagccattatcacgatctaaagtaagagtatttgctgtttacgtgttgattatctctttcgacccattagaatgctggttccctgaggtctggcatctcgtttgttttgtttccttctgtgtctctgaaatagagccaagaactcaacagcatccttgtacaaaacacagcccccagcatcttttgtcctggtgtttcagagcccaccttcagaacttatgactttggttttccctgcgttatcagtatatgaaataaggaaaatttgtcttcctcagctaaagtcttttgtgagatgacttgaaaccagtgaggattaagagggtatcaggaaatgcagagagaggtagtgaaaggggagacgagagagaaacaaaaggatctcaattgtgctgaggtttggccaggccaggagggatcaagtaacaccaaatagcctttgttaaaataacagaaactttgacaaattaagacggaactgcctcagactgagttatggggccttctagactcaaaaccacctacccttgcaaagtggtgcagtgtggatcctgtttcagcttgggataaggtgctcatatgggagatcctgtttcagcttgggataaggtgcattgctctggcaatgcagagttgagatgaggaagactctgggttcgcctataagaagtcaacaccaaggacatttttaccaaatggaaagggcgagttacaggcatttatagcttatttatttctgaaagtctctagaattttaaagaggattactgccccaaagctaattccttcagatatttgtgtcattcctaacaatcactatctcttcattctccatgtcttggagagtctcttctgtcaacacaaagctcctctgagtaagggggtataaaaatctccagcaagggtcaggatgaaataggcttggtggccctaggctagaagatagtacatgaccaaagaactagttaggaggcctctttgctttcatcataactatcattatttttcaggttcactgcctcttcctccaaatctacacacagattattgcattattactgttactattttcccagacattcggcacctatcaaggtttttcattttgtctattccctgggcttgtgtgtgtgctgtctgtctccgtggctgcttctgtggcgctatgacagtattaatatgacaaagagttggtcaaatagaaattatgtaaggagtctcattgtaattcagacacttaatttccacttagcaggagatgcagcccttgatgactcacaggtcgcgatcctcattctccttcctgggtcactcgtgtttttgggtctgtggatagactggccctttctcctctcaagtgctgtagctctttacaagcctacaaattcaagacttttgaaaaacattgataacatccttttgggagagtgatgggtgaagatccccagagaaggaaactctgtgcaatcattagtatccagaggccactgttgatgtgtaactaaagttcaagaaaataatcaaggtatgccagagtcgtggtagatgggtaccttgcaatagacttctccgttaccactggtatcccttcccccatcccagcgtaccctcctcatgattgtcactttaggagactaggaatattgcaaaataaacatctggaaatgttgatagtaaacatagaagagaaatgtcttgcaaaactagccacaggtcaggaaaccctaatcttatcatgggtcctggagaccataatgccatagactgttcagatgggtgttatgttactgtgaacacagatgttttctttccatccattgtgggcatcctgttttggaaaagtcactatagccaatgtctaaaggcttgatcactttaggacagattactaaatactttttatcttaaaatagaagaggggaaaggaaatcacagctcctttagagcatggacagcagagacatatgaatgtatttatatatttttttcatttacgttatcaacttaattaatttatttataaaatttccatgaccataggatgaccacgtagaagtgtggactatggatcactagcatcaaaatctctggggagttttgcttaaaaatacatattctgtcatagcaccacagaaataaggccccaccttgacctatataatctccaaggtaatacctggagacctacgttttaatctattccccagacattctcaggcacaccacatctgagaaccactgactgatgtttgctggttggagtgccaggccaagggtcagccttcaagggattgagattcatgtcttcgtgcctgcttttctttacctgtaaaagagcatagcttgaagtttaatacaaagtgagcatactttttctcttgggggtttttaacctggggtccatggttaaaaggaggagtcagagtgttcattagatttttcaaggaggattattgcccaagaaaagtatattctaacaccagcttaaatgcatgctttccagtttgggtgggtgctaaaagaaaggaattggccgagtgtggtggcacatacctgtactgtagttccagctacgtgggaggctgacgtgggaatataacttgagctcaggagtttgaggctacagagagctatgattgtgcctgtgaacagccacttcactccagcctgggcaatgcagtgagaccccatctctaaaaatgaaagaaagagagaaagagagagagaaagaaagggcactgggattggcccagacagtgcatgaatctcactttccttcccatttctattaataaaggaagaattttcaactttgtaagaaataagaaatttagaatctttttactcctaaatctatagaacaccttggacatcataatatctacttttcctcttgtaagaatggaaaagaggctgggtgcagtggctcacgcctgtaatcccagaactttgggaggccaaggcgggtggattacttgaggtcaggagttcaagaccagcctggcccacatggtgaaaccccgtccctactaagaatgcaaaaattagctgggtgtggtggtgtgcgcctgtagccccaggcacttgggaggctgaggtgggagaattgcttgaaccccggaggtggaggttgcagtgagccaagacggcaccactacactccagcctgggcgacagagtgagactctgctcaaaaaaaataaaaataaaaataaaaataaaaggaaaatacaagcctgcattatttataaatcatatagtactccatgtctagaaaaatcaaaacttataccaaagcatttaaaagagtcactatgatcattttattaaagtttagagatgaattttaccataaagcaggattaactgcacctttctctccaggattctggtgtaaatagagaaaccacagtcatgtatgggcctgagagggacagtagaatgtggaagtgggtttggaaaccaaaatattatgtcagcagttttctctttcatttattcacccttatcaaaaccaactttttaactcaggggcccagttaataaaaacatagataatttcatttggaagacccaagagcttcatgtttggggtttaaaaaaaattcttctcatcccctccgggcaaaagtgttggagggcgaattctccttgcagaaaccctcttaataaatcagtgctggtgaacttctctgctcagtgtaagagaaggtcagttattagatagacacagagctctacagctggaatccttgtggaaagaaatgaaaccacaaatacaattccttagtttaagcttgcctttttatttctaataccttcaaaacctcttcaaactcatttttacttttgtagttctttttttttttttttttcatttaagcatgttttaacaatgaaaacagccagcggagtatattttcagggttatcctgcagatacgtaagtaatccttttctgagggcctttatgtggaattgcaaagtgctgaggggagacagagggagaatattcagaaagcagatactgcagtgttttgaacttatcatgtgcaaagggacaacatttttccactgattatgaaagtccccatgaactgcttttccagataaaaattctcagcaaatgatggtcagcttctggcagccccaagttttcctctctgtgaaatggggagacccaccagggcagccttggaaaccagtggcttaggggttccaggaaagaggcaggcatttactttgcaagtttggctcagagtgtgggccctgatgagatttcagggtgtaaaagggaggggacgaagaccaggtgagcagtgtaaggccttcttaggacccgagggaagtggccttctacatttcttactttttgatgttatgccacaaaaatgctctgttcttctctgcctctactccaaccctcatcccttggaaaatcttcctggtcagaatcatgatgttcctaagatggttgtcttcccacattgcctctcctgattccagggccggtaacagtgcttgcttctggacacatggattaacccaggtcatgaggaacacctggattataaaaggtgttagtgtatcagtacaaaacagcgaatggtcgcattcccaactttggtatcagacaacttttagttcagctctcagctcacagtggctaattgagaagaaggaaaggctgatgaaagctgacactaaggaagagtctagtctgttgcaggcatcattctccatctccccaaagagccaggcaggcccagagcttcacctgatatttttctactaaccctacccatgctcatgagtacacagagtagaaaattatctccaaacgaggctgggactaaggggcacaaatgagccccctatggctcaacatttaagggggcaattattctcagggttggacaattgcagacctgcacctgagagtgagtacctccttaaattttgcaccctaggcacctcacttgcttcaacctggactggtccagtcaccacccttggtcaaaggggaaagtaggaatttggttgataatctcctttaaccaaggttccccacagagcctccaggaaaggcctctttcttggacatcatcagttgggttgtccacctctcccaagcataactgctctgagccagtcttgatcagctactatgccttgtcttggctccactcaacaccagaacatgaatcagtgtagttagtctgacaacatcattaggctccaatcccgtataaacttttacccacaaaagtttggacctccttggccgagcactatggctcacacctgtaatcccagcactttggaaggccaagctgggaagatcacttgggtccaagagttcaagaccagcccaggcaacatagggagactttgtctctacaaaatgtaaacaaaattagccaagcatggtggtgcacacctgtagttccagctactcagaaggccgaggtgggggaatcatttgagcccaggaggtcaaggctacagtgaactgaaatcatgccactgcactccagcctaggcaacagaacaagacactgtatcaacctatctcaaaaaaaaaaaaaaaaaattggacctcctgttcccccaccattatttgagttcttcctgtagtgcccactctagtcatagagattggttagaactgacatcacctttctttggacatgataaagtcctggtggcagtgtctccttttttagggcacctcaacaactgtgcaagaagtcccaacaggagaatatttagctgctctcacctcaagttccaatttccctgggtgcctcatgtaggaagctggtgacaatagtctaggatcagctgctctgacatccaccacagagtgctcattctgccatccctgctgtgggggtccaaaaaaagggagcaagaggaatctgaggccctccagggagaaaaggtatagtgtagggatggagaaggctgactagtagatttcctaggattttcttattataggttttctagatgcttcagatctttaggaagctgcataaaaagtgtgagcaataatacaaacaggaaaaagaactttcaggaggcaacatattcagggaagaccgagcagcctgtgttgccgctagttcaggctcagttacatttctttttctttaattaatttattactattattatcattatcattattagagacagaatcttgctctgtctcccagcctggagtgcagtggtgcgatcatgcctcactgtagtcttgaactcctgggctcaagtgatcctccacctcagccccagtagcaggactatagatgtatgccaccacgcccagtcccagtcacatttcttagggacctactatgtatgggccaggtgctaggtgctagggaaatgaagatgtatagcacagtctctgccctggagaagcaaatggctgctgaagaagacaagcatgaagagatcctctccatagctggcttattgctgggatacaatctgcttcaggacgccaaaggagcacagagtaatggccacccttatcccagtctggtagcccagcaaggagaccatggaaaagataatgcctgagctgaggattgtattcattcattcactcattcatttattcaacaaatattccaggagtgtcaacggtctttcagacattggtttaggtttaagtggtacaatgacttgcacattttaagaagttagagaaaaaacactataggaagcagaattgatgacaatattttagggctaatcaaatggctcttgtgacctcttaatatccacccccaaaggtttcctgatgcctccaccattataaattcattcctttgtttgagacacattcagcattgccacatccgtgaattacaaataggttttgacacaggaaaggccagtgaattgcctaagggtacttagtgccagggttggggtataggaggtgcagtagttacacgacaggagtcaccaagggcagatcactcccttgtcttctctctgggagcacctggagctgacttcagcagggctgacaatttaagccagtgaatcctgcctgcacatggttcaggatgcatgctgcaccaggtcacctaggcggcccctcatcctctgtccactgtgaaaacacgggacacccaggtcgaagggaatgctgaatgacaccatgtgggtgtgcagtggtctgtgaccagagggttcactggaagcaatttgcaaaggaggacttagaaaaccacctggatggttattgtaaattaaaaaaggaagagatgccacttttttctgaataatttttaatactaggtttatggctgggtacatgtgatagtcattacagcttatttaactctgaaattatctggcccctcaaactccaccgggactgtagaaatcttgggttaaattttaaaaacaacatttgaaagaagatgatatacttttccttgaggagaataaattcaaacctaaaagtggggggggggggaaaccccagctctctctaggaaggatctccattgtttctcatatttgctatgtttctcataacgtgtttgagctcagaaattcacccaggcacacaaaaggtctactctagttggctgttgagcccctccatccctgcaatccaagttgtgccttttctattgggttatttggaaagagtccaaaagcattctgaactctgagctcaaatctcaaaggtttccacttcttcggagccgaacatttcatcaggggctgggagtgtgtgagtgagttacaccgaacagctgcgcggtacccaccaccctctccccaaggatgacacgctctgcaaaggagggtgttgtaagcattcctgagcaagccagctaatctggagacctagcctgttggccgggggctacttctaagaagcctccctctggaattacagcatcttatgacttctatctacgaagccccccttcttcagaggagcagctaggacatggggtaggggagaaggccaaatgggtgaaaaaggaatctcttgagtcagaggggcatttctttttgggaacaggatcttgtctctctttagctgctcacaggaaggaaaatgggaaagtagggcttcttttcaagtggggaggcacccagcagccagtggaatgcctgatttggaaggggcaggagggaatagttatgtcccgaacaacaagtgcaaatgtaaatatgcagacctttgaactctgaaattgatttcaattcaggccagcactccaaagttgttttattgggatgtcgaagtgttctggcacgttggtggcttaacggcgtcatcatcagacccagacatttctgggtccttggcatttgtctgggttttagaaacactgtacccattggcgatgtcactccctgatcagaggcacactggccaccttcaaacctcttgttctcttactcctcctggcagaagcaatgatgctggcgggtctcatctgagatccgtgcccggcattggctgaagctatcatctcctttgttacttcccaagcaaggcacaggaaagccatctttacatcacctctatttaaagcacagggtcccttttgcctatgtcactgaaaaacagcagaagcctggtatctagtggattcaccccggccctctaatgtggtataaggaaaatcctacagagaacattttcccattgagcttacaaaaagatgtaaatttggaaaactctaccacatatccattttgcaccaaaaatagtaacataaataaaacatttaaataagaaaactaaagtggggaggggagatttggggggtagggaagggaaagtgaaagtccatagcttgatattaaccaagatggtcaatggctcatttaaaaaggaaaaagtagcttatgcaaaatcttgccaacctgccttgaagtgtaaaggcttgtagaagttattgaaaattttgttttatttattccccttagcagaagaaaaatcaatgtctgcttggcaagtcagacgtaaatgagttatacaggccactgacatggtggaccaaactttataacaaccacatttgccgctgtcaggccacaggcttcagtggcgccagctgtaattatggctgatcacctctaattcagagctgcctgccttgataaaggtgtcactcggagctactgtggcatcagcatcaattgaggatgtcaagccaaagggcagcttgctggagaaagcacttccccaccccaacccccagggtcctggagacccttgggcaaatattgctttttaactcttcaccctgagtacggcaacactccctgaagctgtgatttaaattccaggggattcagatgaatatccctgacctccatcagtggacgtctttaataagctgagagatttctccaaaaacacagtttagaagtcaagatcctctgtgctttgcaacgtgcagagacaatgtttgtcttatctacctgattcattggccacaaaaggcattaggggcaatagactgtagcacaagccatggtcatttttggaaaaggaaaaaaaaattgcagcttcatgcctttcttctgcttttgtggtatttaaaaaaaattctagcgaacttcccattttcatgttacttttttctttttgaaggaaacatgaagtgtggggagaaatagcaaaacggagagatgatggggttaaaaagccctgctaatagagtagtgtctggactgttgtcattgtcgtggtggagccctgagtggggaggtgtgaagtgaggggtagaattcagccattaaaaaggcttcactgtcatttgtgaaggatcatgcttgactgcccccacctccccaggctgtttttcctcactctgtaattaaaaaagagacacacatactgtctgttctcctctttaaagtcacagacggccccacccacaccagcaccccctccagcgagttgagttgtgggggcacagcctgtctttcattttaagggagaacttgtcttccttccctctcctttggaaggttcacctgagggtggagtgctaatctcagaaaggcaagttttgtgttttgtggctggggtctttttcctttagcacctgacagggtgacccataggggccaagggagaagtgactgtgatttcacagcccttggtggctccagacacgggcacgtgtttggaccagaagtggttttgccctcgctgacagggaggtcagatgcgagaagtctccggagggctggtggttggcattcagcaacagaaaatcccatccagctccaggaaaaaagggccctgggcgatggaaaccctgtcacctggttctgaaccaaagcccaagctgctaactgaggttagtttttcacactcagaccttccaacctgccatctttcactccctgcttccccatctctacacgtgtcttgatgttatttccctttctccaaacacagggcactcttttttttttttttttttaaccagtattttttttttgtttccagcagaaccagctgacccctgcctgcagaactccgggtccctcttggagctctctgatggcagctgtagggccatccccagcggcactgtttccccctttgtttacccgtttctaagggcaagtgcaccacgaaggctctccgagcctggaactcagcctggggctgttttggttacattgaagtttttgcttcagttctgccagatttaagtggtgacttcactagcactgagctaaaaaggagaagggggaggagggcgagaccaggagaaagagagcaagtgagcgagagcccagccggagggagagccagagctaggcgcaaaagaagggccagcacattacatcatcgcttggcctggaatcaaatgggaaggatatgactcactcaagctagttaagctttggctcaaattctacacacactcattccagagctctcatgttctgcacctcaggagggaattcagcctcagtgatgtccatgaggtttgtttttaattttattttcttttctcctgattttatagattttttttgcccctactgccttctgtttttgagccttcgtcctcctcctcctcctcttcattttctcccccttctccctttctgcccgtctttgtttctcctcttcttccttctcctctttccccagcccctccgctcctcttcttgcccgaagaggcatttcttttcacttcgatcagagtttttgttctagcacagagacctgaatgagttgaacagaggccgggttggaggaaaaaagaaaaaaaaaaaaaagcagagcaaaccaaagcaaccagagcaaaagggccacaaataaagagcgaagcgagaaagagcaaactcgggcgaagtttctttgctgcggtgtcgctcctaatcggaggagacagggagagagttaaaatgcaggaaccaatcgcttgaatggtgatgtaatgcaagaaccgaagggtagttaagtaatgtgagagcgagggggtcagggttgcaaagcatttacctgctctcaaggggttttcagtttattatcaattgcagtgactgtaaccggcttcagactgcaatctctaattattcacagacgctccttttttatcttttattattaaaagtaaaactatattatggtattttaaaataacacgatattatcacagctgtgtattattttctgccaggattctctctctctgttttttaaatggcttaaaactgttgtcttttcataaaaggtggaagtgatggtgtggtggttggttggggggttgggggggcgatttttgagtgtaactggtgaattgtaaatgactggaaaactgtgtgttgtatgaaaagtgaatgattgtgctgttccatttattattaagaatatactgcagcttttaaaagtaatagatgatgatcctcaaaagtagttatagcctttcccctattatttcagtgaaggttaacagcaattgtgcatttgcttgagcatgttgacattctgttgttccacgtgctaattaatccggtgctatctttaagacttttatgttcttgaattaattttttagatgatatgcttcagtagtgagggggcgatgatgaagacttcttgattgagttgtcttagaaacagttaatatttcagagtaagaaattaacaggaaatacagggagagggggcaaaggattgtgttcttaatgttttaaggatctcgtgtactcagagagagagactttgatgttttgaaaattattaccacatttctgtttcatagaatagatttcgtattgtgatatgctgcctgagttgggtgctttctgacaccatccggcattactagatagtaataaactgaaacccactaaaacaagagggcaaacactttctcattctgggaacttcaaaacttctcttgggcttatttagacgtgatcatcctacagctggatgcatattgaggcatgcggcacataccagaaaggtgtctatttatttaacgcatgttttggatatcattcattatgactttatggatcttctctctttcctccttttttgggcagaggtggaagtggggagcagaggggagaagtaatttttggaggaagtagcatgatgtgtgaggaggcctgagtgttgattctgatgcttgaccttgagcaaatcacttaaaccatctgggcactactctaaagagcaggaaagggcaaggtgggctagaagctcctccccgcatggggaaccaatcttagatgatctctggagtctctttccactcgaaagttctatgtttatatccatgttctatacaaaagtttgctacagagtatttagcatagcttttcagagaaaagtacatttgaaattcaggatgaattagtacttgaaatgaatgggggaggatggacaggagtatatctttccccactttgaagtttgatctttatttgtttacttcttgctttttggcaaaaaaacaaacatggtaaactttttagttttcaaatgctacctttgaggagacctcaatgagataaattacctaggtgagactgccaaaaagagtggcagagtagacaagggggagaattcacctgcccagaaacttttctaaaagatcccgcacatccttcagattcatgaaatggtgccaaaaatgcagcagacacagacccttgtgcttcagttgctcacatggagcagaacagtattttcaatgaatttattcccccaaagattgcatgactacttgataagtttctgtatttttaacataaactcaagtttttaaaggagatttaaggctacatttgaaaaccttcaaagatcatgaaaagcaaaaccgtatgtgcttgttagataattttccagacaatactcctattcttcaggcaaattccagggtagtagccttattataaagtatatatttatgtatccggggtagtagccttattgtaaagtatgtagttatgtacttatggcccagctcaattgcgcacagggaaggaccttaactatgcctatctgtgggaagaaattacccagagctaaaatgaaaccagtggtgaagattattagtcattgtgcatagtttgatgagtgccaagtgtatgcttgggactcttcaggaataaagagggcatgatttctttttttagagcattacaatttatgtcgacttggctccgaattgttcactcatattcagtaatgctctgcttgtgactgacagagacaaggccaggagcactagcctggctgtggcctctccatgccggctgtgataccaggttgcacttacatgatctcagctcattacacttacccacggtaacccagagggctaaaaattattaattccactgtttgacgactattttgttctgtttcatggtttttgttttgatttttggtttttaattaaaaatttttattcagataagtatacatttacatgcattcataagaaataatatggagagggccgagcgcagtggctcacgcctgtaatcccagcactttgggaggccgaggtgggtgggtcaggagatcgagaccatcctggctaaaatggtgaaaccccgtctctactaaaaatacaaaaaattagccaggagtgatggcggacacctgtagccccagctactcaggaggctgaggcaggagaatggtgtgaacctgggaggcggagcttgcagtaagccgagatcgagccactgtactccagcctgggcgacaaagcgagactctgtcttaataataataataataatatggagagattcccatgtattctttgcccagttaccctcaatggtaacatcttgcaaaactgttgtagtacattactacaatcaaaatatggacactgttacaatccattgatcctgttctgcgttcctgtatgaacaagcacatacagttttgcctttcatgatttctgaaggttttcaaatgcagccttaaatctcctttaaaaactcaagtttatgttaaaattatagaaacttatcaagtagtcatgcaatctttgggggaataaatttattaaaaatactgttctgctccttgcgagcaactgaagcacaaaagcctgtgtctgctgcatttttgacaccatttcatgaatctgaaggatgtgcaggatctcttagaaaagtttatgggctgtgaattctcccattttacttgtatttggtgtgtgtgtgtgtgtgtgtgtgtgtgtgtgtgtgtgttgtttttgtcaatgtaaaaactgagagtcaggcttacccaagtacatataagttctggcaattggagtccagttcactctaggtctagctcaccatcaccaacaaactttccatcaccatcctgacttggtaagggaaggggtctaatgcccttgcctgtcagtggaagtcatcaaatacccagttggggagtcttggtgacagtgactgtgttttaccttcccttggacatggcctgtccatgggctttgccttccacaggggtccctggggctgtgctccacaggtgagcaggtggaggaggagagatggctttgctaagcaacagaagaggcatcaatctcttccctctgcccaccagacacagagcagaacagtgccagctgtccatgcctaagcatcaccatagtcgatgctgaactcacattcttcctcctcgccctcacatgtttcccttggtgagcccttttacagcaggaaggatggggataatatcaagcaggcattgccagtcagagaagcagggtggggtctcctgaaaagagcatggcctttggggttataaagtcctggattcaatcactcttctacttactggctgtgtgactttgacaagccacttcacctcactgtgccacagttcctaccttctctgtgaattgtggataaccagactgacctcgaggagccattgcgaggggtggagataaggttttaaggcccctggcacatagtgggatggtggggaggaaatcttggtggtttctgttgttgaggattctgttggataggattctcctcgcagcagtccctgctgcaggtacggcctccctgactctaactgggcttcttgtcccagcatcacttagccttcttctttctctagcctttcttctgttatgccttttttttaaattcaggaaatcaagcaggtttgagatcacacaaggtcctagaaacagagaagtaaaaagaccattctgactaaagtgaggtgaggatactagcgattaaaatgccaaatttcccatgatctgggtggagggaaggacacaggacatcacagtttggaagaaaggatgcttactgccctgtggcactgtgaacaagaaaataaagtgagatggaggtgagtgaattcagttatgagaactgaattctattcctagcttgaataaaagaagtttgtaggccaggcgtggtgacttgtgcctgtaatcccagcactttgggaggccaaggcagatggatcacctgaggtcaggagttcaagagcagcctggccaacatggtgaaaccctgtctctactaaaactacaaaacttagccgggtgtggtggcgggtgcctgtaatctcagctactcgggaagctgaggctagagaattgcttgaacccaggaggcagaggttgcattgagtagagattgtgccattgcactccagcctgggtgacagagcaagactctgtctccaaaaaaaaaaaaaaaaaaaaagtttgtatttgcaatagcatatgtgtgttattcttatctttagttgggtgaagttaccatttaaacttgctgcctccctctcacatatattttctagtggttaaaaaaggatgttttgtagactggagagaaagggacttccaaggaggcaagtggaagggttaggatggcgggtagtggaattagacaacatctctggggtccaagaggcaccttgagagttccatgctgggatccccgaatctaagctgcaaaagggcatatggtgtctcaagctgcttgaaagaagtattgtctcagattttacttagtaagcattggtcaggaaggccaggtcaacattaagaagcagaaattagtgtagactgagaatgagccctgtcatgtgcctgacagaaaataggctgggccaatctggaactctacttaaaaaagaagcagctgtggctgggcgtggtggctcacacctgtaatcccagcactttgggaggccgaggcgagtggattgccagagctcaggagtttgaaactagcctaggcaacacggtgaaaccccctctctactaaaatacaaaaaaaaaaaaaaaacaacaaattagctgggcgtggtggcatgcgcacgtagtcccagctacttaggaggctgaggcaggagaattgcttgaacctgggaggcagaggttgcagtgagccaagatcctgccactgcactccagcctggatcacagagcgagactccgtctccaaaaaaaaaaaagcagcagctgtggaataaagcactggcttctcctttctgctccctttttgtttggttttttgggattctgaccttcaaaggggactccttttacattggattgcagctagaggtgtggccagaggtggtgacgcatgactgtaatcccagcattttgggaggccaaggcaggcagatcacttgaggtcgggagttcaagaccagcctggccaatgtggtgaaaccctgtctctactaaaaatacaggcatctactaatcagagaagcagggtggggtctcctgaaaagagcatggcctttgggatttaaaaggcctggattcaatcactcttctacttactggttgtgtgactttgacaaaccacttcacctctctgtgccacagtttctatcttctctgtaaattgaggataaccaggccaacctcgggcatggtggcacatgcctgtaattccagctactccagaagctgaggcatgagaatctcttgaacctgggaggcagaggttgcagtgagccgagatcgcaccactgcacaacagcttgggtgagagagcaactccatctcaaaaaaaacaacaaaaaagactgggtgctttaagaggcatgcatttcatgagtttgggttacaacaagagtaatttcttaaagacttacacacctttgaaaactgaaattgacttagcactccaaaatccactccatagtacgcaaacactttaacacaagtccatacatctttccttcctgtacctgcgctggcaagagaactcatttaatgattgatgaggcaatgctgtacccaagaagaattaatcaatagtttgcaattattatggagagtgggacagtagttagacaatagccaagacccatctagctagcaacaaagtctttctttctctctcttcacatggtaccaaaaaactgaattctgctttatggttttttttctattttccatctgaataactaaaatagaactggatgtgtccaaaaagcaaagcctagaaaaagcaatcatatggcccccagtgaatgtcaaggtatctattaatgcatagatttgattactcgtcttaacgggaaaatagggtcaggagactgcattgtgtgaactggaatggctaccatgaattactatgttttaggagtccatcaactttttattttgcaaatcaaagatcttgaattgaagtcacgttgggctgcacccatgtgctgacacggcagacagtccagctggccctcttgcagccttttgggcctgtctgcccacttggctctgcccctctgccctcaatggggcttgtatcactgcttaaaaaaaaaaaaagaaaaaaaatgtctgcaaaacaagcttttgtgcagagaggggaagcctaattactcgtaatcaatatggccagatgagattgggccctgtggattgttttggagtcagacagacctgggggcaaactctggctttgccatttgctaattatgtgatttttgacaatctattgaagctttctgagcctcggttacttcatttatgaaatggaattcataagagcataatacacttagcatagtaagtgctcagcaaatgttagttatttaataatggagccagttgacttctttggaagtctggataataatatattttgggcattaataatgtagagagaaatattgtcatgtaacagttccttccaagaaaggtaaaccaagtcacagaatgcaggtgaggtcatgagtgggtggagaggtgaagagagaatcatacttctggctgtacatgccattggtcagaaaacgaggtttcagctctcactttaatgtactgtagtttatttcaacatcaaaagagcagggtcttttttcaccgctttttgttaagtagtagatttcttttttagatggcatagagtaacttcttttgcatctgcctcttcttgaccttcttatttatctaacacttccgtcagctcagcaacactttgcaataaaggactgatcccatttaattcctctgaaattaatcataataacagcaattataataaacccatttagtgtaaatgtagttgtaaattgctcttgcgtagcattttcgcctttagttttgctctcaccagcatccaccctaatatggatcatgcagtggcctctctatagccagattatttttctgagttcagctcttgccctagttcagtacatggctgctttttgccatttccttcctctgagggcaagcaggaagctccctgtgacgtgtacaggtcacagggaacgtcatttgatttgaatttgctctcaccatccagaacttccttagtagtagaataatcatcttataattctttttttaaaatttttctttagcgacagggtctcgctttgtcacccagtgacacaatcacagctcactgcagcctcgaactcttggggtcaaatggtcttcctgcctcagcctcctgaagtagctggagctacaggtgcacaccactacacattggctatgtttttaatttttttgtggagactgggtatccctatgtagcccaggctagtctcagattcctggactctagcaatcctcccacctcagcctcctgagtagccagggttataggcgtgagctacttagcctgacccagtcttataattctaaatgcactgatgaagccagaacctaaagattgatgtttcaacccaacccgttcaccttacagattaagaaatcaaaggccaggcacaatggctaactcttgtaatcacagcatgcaattcgggaggccaagatgggagaatagcttgagcccgagagtttgaggctagtctgagcaatgtagggagaccccatctctacaaaaaaaattaaaaaattagccgggcatggtatcatgcacctgtggtcccagccacttgggagactgaagcaggaggatcacttgagcccggtagttccaggctgcagtgagtcatgatggcaccattgcactacagcctgggccacagagctagacaggagggagggagggaaactgaagccatccaaaaatgtgaagagagttattctatatcataaaaccattggtgtcagtgcccagaccaagctctaaggcggtgaggagcacatttctgccctgccaggccagtgagcttcctggtgccaggaattctgtcatattgcccaggctaatgctttgcagtccctttttgaattctgactcctggggatggtggggtgggagggagcaaccaacaggcaggcccttgagactctggaaatcattcaggcagctgtgcagagactcctccctctggtctggagagaggggtgcagaggccacaagatagcttgctttttgcctccagccatcagccccactggggtctagttagtgggccagaagttgtgggccctaatagcattggggtaaatgtcctggagtccagctctttgcttcccaccactctcttctctcctccctctccatgcctgagccctggctacactgagtgcatgtctgatgaggacagagcttggaagctgccccagaaccagcacccacccacctgcaggatgtgacctctgggctctgaacacactgcttcctccctcttcctccccacctagggaacagttttagaccacaattcccaaacagccccactttgcactttaatcccaaagagactccagcactttgtgaccacagaaaacttgtcacttcattatgattctgaaaaaaaagagagcaaagggtaattcatagttgttttaatgactttgcatcctttcccatggaggcagctttcagctgttaggcacaaaggacgctggccttctctgacatctgacagtgcagtggagcagcattttcacaagattcttcacagccagttaacccaattagtcttcccacagtcattacccaggtgccgtaccattcggctgcctgggagcctccaaagctctgttgtgtggagatgaactattgtgcctcccgaccttgaaaggatgtttctaactaattaatgattgttaagtgcttggaaaatgcactgtggaactatgctggggctcatatgtctgcatcttcagctgtgcggatgcactgaatgcaaatcagaaatccttcctgccatttgtaaagcataggaagatggatatgaccctttcttttctcaaagagttatctgtcctcctcctcctctttttcttcattcgtttcttctgagctgtgtatttaagctccctttgaaatgggccagtgttttgtaccatttcttctactgaagtgagaaggatcttatagggtttttccagccacgtgatctttaatgaggcaaattgaaaaccactattggctgaaccatccgggaagaaaatgtggttttctgtatagtagtttttaaatttttttgatatgagcaatagtgggaaatatattctgtatcacagcccagtatactcacacatatgcatatatatgtacacatatatatacacctacacatatatacatatgtacacatgtatacacatatacacacactacatacacacatatacatatatatacacatacgtatacgtatacgtatatatacacatacgtatacgtatacatacacatacgtatatatacacatacgtatatgtgtgtatgtaatgtgtaatgtatatacacacatactcacattacatacacacatatatgtgtatatatacttcacatatatgtgtgtatatgtgttatacacacatatatatatttgtgtgtatatatacccatggaaatatatacatgtgtatatatttatatacacacatatgtacattggattatgtgtataatatgcacacatacatatttatatatacacacacacaatttttatggaataatacttaatttttactgcgtataacattatttggatatctgatatattagatatgtatctattgttctaaaatgctgataatgtcagattaagctgatttcaccaatttctcatgaattggccccctaatgaagtgcagtcagcattggaaacacactggtatcatagaaaggccaccagaatgctgggcaaggatcaggggacctgggttgtatttcaagttttgtcccaactcctagattcctttccccaaactctgtgtcctcatataaaattaaggtattttgttttcaaactgagggtaccctcagactactttttaagaaatcctcttgtggaaaagcccattatggaaaacagatccctgactggtccatatctcctcccgtaagtcacccccaccccctcccagaggtccttgcaacaaaatccaaatcctactggattagaaatttcatgacatccatctagttctggccttcaatgattaatttatttcttaggtaatagattcatctaacaaaatgcaatctgatttatttccatggattctgagctaggaatcgcaattgggaatctccagaaccaatggggatttttgctgtaggaccatcgttcttttctgcctcagcgttgtcatttgttctttggccttaagagatagacttcttcagggaaggaatgagttagaaaggtcttcagttgatgtatgagcaggtggacacgtgtggatgtttatttatgtcattgtgtctgctgtttgcctcctaaattcagcaggttcttgatttttaacacagctcaaatcatttggcctacagctggtaaaatacaattttctgggttctcaaaaagaaaggcttttcagacttataaaaagagaagctcataagacttcttgaacatcaaatagctcttacaaaacaccattttgatgagttaagtgtaaatgaatcagaaacatacggattaaatttcccttgaaagacacatgggtttaagaattaaggggggaaagtgcttggcaagatggatttcaggtttgtgccaaacctcaaaatgtttgaaaaatggtttgagacatttttaccgaacgcaaaatgccattgagtttccctatccccagacataatagtgaatctttttgacaacaactgtatgacaagaaaaaaaggcctgcgggacttagccattttctcaattctttaatagtctctcttcctcatcccccaaaccccactccccaccaaaaaaaaaaaaaaaaacacactcacagggctaagagaacttcctgattaaagtttcgagtcaggcaattaccagaaaataaccccacgactcaaaaatacatgagtcccctcccaatactatccaattataccattttctaagtggaataatgcaccatgaggataggcagtatttgctatattttattcactggtgtccagagcagtgcatggttattctagacatttgtctgacattatagtgccagcttctttggggaaagaaaataagttcactaaaagcaaacagattggagagaactattcattggtttattaaaacagccacattgtggaaatgctatgttttatgaaggcaagacatgggatgaggctttcaagttgctgggaatggtcttggaaatgtgcattctgttatagcttctctgttgagtaagctgtgttataatttctccacacctcagaattcttcctggcatgaggaacatcaggagcaacatagtaaggatcccgggactaattatcttatgaacggtgcacatcgtctgtattcaatgccctccaattattttttactagctatgccttttacaggctgacccttttacagcctcatttttcatatgcaaaagcacagaagtgggttttgagcgagatactcacaataagggagggagagggactgggtgggaagccatgggctgggccatttgctctgtgaggctgccttgtctcatactcttgtttcattttcatatttaagccaggatgaccaaggtttgcttccttccttccttccttcctttcttcctttcttcttctttttttttttttcatttgaaagaaagggcgtattcagtgactgccaatatcggtttagaaactagagtattaactttgctgccctgtgaaagtgaaaaaaagaaaagaaagaaactaggagataacaatgtattttttcaaaagatttcaattcatcgtagaccaagaaaaagctatctttaaatctatatgttttaattctatgctggaagtcatggacaaatctatttattatcttgttaggggagcatctcacacagcactttgaggtaggagtgtgctctctgggaaccaaaattaatttgttgcaaaagcagtacctaaaagggagaggaaatgtcacattaaactcagaaaaccactttcagtacttccagggaagatagtgcataacagtgattgttaaaatctacccgctgactcccaccaacttatgcttatctatatttattgaactgtataaatgaaaactggaaatactggagtgaaaaaaagttatatcaactttctgtcttggaaaaggctttttagaaacagaaatagtagggccaaattatggctctatttttaccttttccaaagcagcttaatgtagaacaatagggccaagaaggggttttttcgctctgaaaaataccgagtcccctgcccaagagctccagtgcctccctcccacttaccccaaatgtctctctctaatgcaaaaacgaccaaagtgtgcagaacagtctatcaaatggttcttttaatttgtaactcagccatctacctgaaatactgggaaatcagttttaacatttttatatgtatatagttcccaatttggtgtatacaagggcatcacctaaatgggacgtacatcagacagtcgatattcctagaaaggattgttatcatccagagatcgttttcatgttattaagctatgaatgacagtagttgtttaatatcttcttggcctttgttgacatattttaacaacctgccttgcacagacagtaagctctgcctggagccctgctaccaatatctctccaactcacacacgcgcacaagcacacacacacatgcatgcatgttcccacgatgcagggctaacttctcatctttcctggaacaattcatatgtctcctcttcgaggaccatcccctggaacccccggggtattaaataacactttgaggggtatctcccattacaccctcagctgacttccttggctatttgccttcataaatgatgaattcctgcagggcagcaatgatcttttattcacgctaggctctcagcacagttcccgagatacagcagaagctgagtaaaagtttaacaacaacaacaaaaaaactttaaaaataattttagctgtgtttctgttggatcgaatgtttattgaagtcacacaaagttaggtgggactaaaatcggccctctgcaggctttctgagttcttagtactcctaggaaaagtgaggagtaaaacgcaggggagtttgtgctcagatgatgagcttcctgcttgatttcaactctctcctgtaacctgtgtttatcttgatggccttatttatatctatttcctttcgataaaaatagaagctccaaaaagtgaatctaccacacaagggaggatacttttaactcaggcctaagtttcacagatagagttacgatgctgccctgcgtgtaggcatccagctagatggtcattttctgagtcatctaacttctgagttttcatttttttaagagtataattaagataggttcccagggatttaaaaaaaaaaaaaaaaacaacccaccaaccctgtgagtaaagtagacagtctatatgtggagacccatataaggagatttgtgggcacctgcccaacttgagagaagcattaagagctattcgaaacctactgaaatgtcaacacacttttgaaaaaggtccattagggatgcaaatgtgcagctccctgattatgataagcactggaaagaaaacagtgaaacccattaggaggctttgagaactgggttctgaggcgcagggaagacaagtctagtttctgcgggtgctggggagatgaagcccagcccttctctgcaccctgaaccagtgattctaatgatttaaatggccccccaaaatccctcttattttggataaagccaattaactcatttgtaaatgggccaactttgaaattccatcaatggcagataaaattcattttaataagatttattctgtaaagtacaaactgtgacttgcttctgtaaaggatctgacattagaagctcacttcaggcttttgatgtgttttggttggttcttgcaggggtttttcttataaaaggttgattccaatttaaaatctataattcttactacatactcgtctacaaatcaactcaaactaggggtatatatttctatctaatagtcacttagagctctttgaaaaattacctagtcagaaggacaccttccattccagctgcccaagttgttcacatatgacatcaaatgatagttatagtaatggataaattggagcataatttttttgtaattgctccataagtaaaaaaatataattgattttttaccatcttccttgatctggaaggaattgtatcagtttccaggacgttgtaaaacaaaatatttaaagtatgtttcaaataataaaaagagaaatacttaacttaataaagatgtggaattcatttatgaagacaaatactggctgtgaaccaataggccaaagagtctgccagaagtttgctgtagacagtcattcttgtatgtccactctgccctatcactctgaagttcaatccatattaagaaaatgaattttctcagccatgctagactttgaaatcattgattttgtttgctttgtttttgagtaatataacagaaggtcttttttcagttttcttccttataaggaatagcagtccgtggcacttataattatagctctttcagccttattttaattaaagaggtttgtttggcatatatatttgatgcttgggaattttatataaaagttataggttttgatccttctggagagcttcaacaactgaaaccatggtgaaaatggaaagcacttaactttcgtaagaacacttgaatgtttcagtattacccgaaagcaaaattataagccttggaaagaaaacatttccatttggcattttcacttttgtgcttgtcaagagaaatagcctcaggcttcagaaaagcagaaagatctattaccaatatcatgaggcaagcactccggtgctcacttatgttggatcaatcttgttcacttctagaagcctttccaactatgttatgatgttctcctttctgcttctccatccagacggagcagtgtcctccagaaagtaagcgtacattttcccaatggtgaaaggaaaccagaatgattttacccaaatgcatagcccctgcctccagggagatttgagactaatcacagagatggatactaaacaaaataaccatacctattaatatgttattagaaatagcatgaaggaaaaccacaggggcctatgtgaccctttaactttgtggttgctagatttggcctttaatttgggggtcaaagaaaattttaagaaagagatatttaaaaggagacctaaaggatgaatgagaatttgtcaacaaaagagcagacggcaaaaccttccaggcaaagatcaaaagatgcttcaaggccctggggtgggaaagagtgtggcacattctaggaaatgaatggaagcttgggtggatagaccctttcaagccaggtggaaagatagtactacaggcatcaatgaggtagaacatataaaagatactgaaaaaacatcctaaatgctaaggaaaatcatgcaagaatgttgaacagggaaatgtcatgaccagatctttggtttatgaagatcattctggctacaagacagagtttggatagaagaagagcaaaactggagtcagaaactgttggaagaaaccaagagaaacaacactgtgttttggactaggatcttggcagtagggatggagccaagtggatacactccaggtctattttgggggtggagtgaatagaacttggtgaatgattagaagtacaagatgaggaatctcaaagttaatgactaaattctgctaattcacttctaccaaatatatttaaggaaatatgaggggaaagatctaaagacggagcactgtactagtcagggttctccagaaaaacagaccaaaaagagagagagatatatggtttattataaggaattgactcaccagattatggaagctaaaaagccccatgatctgccatctgccagctggagacccagaaaagcagatggtgtaaattccaattggattctgaaggcctgagaaccagaagcaccaatggtgttgctcccagactaaggtcaggagaagacagatgtcccagctcaagcaatcaggcagagagagagataactcaaccttcctccacctttttcttctattcaggtcctcaatggattagatgaagcccacccacattggggaaggtatactgcattactcagtctaccaattcaaatgttaatcccttccagaaacaaccttataggtgcactcagaaataatgtttaaccagatatctgggcaacccatggcccagtcaagttgacataaaacctaccatcacaggcaccatggactggatcatccataggactcaacctaggcacttagggaatgtcatcttagctctttagcaggtggtgtcaggtatcatctactatgaagtagtgaaatgtttttcctggcagacctggaggattttcatcattctcaaaatgtccagtttaaacctagtcccaatgagtctgatggctccaacactgaaaagacagaactgcttatttggggacctgtcctacctctcctaaaagatgtcattgtgcttactaataaattacttattctagtgcacaaagagtgaaacctttatttcctgctcatccaaaggattattgttcatatgtgagaagaaatgacctcctcgcctacctgtcacgattcctggttcctgctgccctcctcagctaaatgttacttgcactcagagatcatttgagcctttcttttgttcaaggaaaggaaagtccaagaacaaccagtaaggaattactcatctatatgtgtccacctttgaggaaaatctacctttaactgacgtgttgcttccctgaaataaataatagttctggatctctcactttttttttttaagacagagtctctgtttctgcagtgacacgatcatagctcactgtgtcttcaaactcctgggctcaagtgatcctcccaccttagcctcccaagtagctagtactacaggcaccccaccatgcctggctcatttttaaattttttgttaagatgagatcttgctaagttgcccaggcttgtctgaaacacctgggatcaagagatcctcccgcctcagcctcccaaaacactgggattacagatgtgagccactgcacccagccggattactctctcttgatcatatctactcatttaactttagggttgaaaaggcccttgaagattgttggttcagccattttttgtgtgtgtgtgcatgaggaaacagaaactcagaggcactgaggacacagccctagatcaccaggcaaatgactggctgagtcagtagacactcttgctggtgtattcatattcaaagccatatcatgcaggactcagttacttcactttgtcattttgtgatcatcaggttgacacatcttaagaaagcacaatttggcctttctgttctggtcaggaatctgaagaaaaaaaccaagctatcggctgggcatggtggctgacgcctataatcccagcactttgggaggccaaggcaggcggatcacgaggtcaggagttcaagaccagcctggccaacatggtgaaacctcatctctactaaaaatacaaaaattagctgggtgtggtggcagccacctgtaatcccaactactcaggaggctgaggcaggagaattgcttgaacccgggaagcagaggttgcagtgagccgagatcactcaccactgcactccagcctgggtgacagagtgagactctgactcaaaaaaaaaaaaaaaaagaaagaaagaaaagaaaaccaagctatcatgacagaccagtgaagggatttttgggggaacacttaccgccagtgagcaagcataatgttttgcatgttctttaagtgtactgtcagtcactttccgtttctatttatactagggacttactgtctatagctaaaattgacatttactgtgcccataaccctaccacaaattaaaatcagaccccaagtccctctggggaaaatgtttattaagctgtaggaagacatctgaaatgataccaaattgcattttaaacttgaaaccccaaataccacatttgtttgcaagtaggaataggactgtctgaggaatcatttgagaaactgagcaagtcactctctttggcaacatgcagggccaccagggaagagaaaagtaccttagaagaaacactttatataaaccccttgtggcttttaagtaatcatttaaacgtaaacaaaatattctttagaatgaactcaaaagaaaagtaagccttttaaaattccatgcctttaatgaacagacacagacatttcaattgtacttataaataccctgagaagagggttgagagaaatatcgaaataaaacaagtccattaaaatgtaaacctgggttccagagtttctcctgctaatacaggcaaaagtgtgtttgagacaaaaaaaaatcttcagccgggtgcagtggcttgcgcctgtaatcccaacactttgggaggccgaggcgggtagatcacctgaggtccggagttcgagaccagctcggccaacatggcgaaaccccatctctactaaaaatacaaaaaattagatgggcatggtgatggttgcctgtaatcccaggcactcaggaggctgaggcaggagaattgcttgaacctgggggaaagaggttgcagtgagctgagatcgtgccattgcactccagcctgggcaacaagagtaaaactccatctcaaaaaaaaaaaaatctttctagcacttttgccctttaggatgtaggtatctgtgggtgtttgtatgtagcaggtgtatttatgtacatagattggacacagtgtcaatctcagaacctaataatggaatcaattttgtctacagggaagccatactcagtggtttctttgcttgtgtgtccagtccatgagtagcttggaaaatagcaaagccaggttgaaaagccatttgagatccttgaatgcaaagtgtaaagtacatgccaagtatcattattatgagctttattgctactattttactaagtgtttcagattaatatcaattctgcttcatgataagtgctcttgcaaagtgggagaacttgcaaggtagctcagggaaggttgcacaagagagagcacacagtttcctagaaacttcacccttcccccataccccctgttcaagccagtggtagcttgactgtccctagaaatcaggatagtgtttcaagttatcatagcccttaaaaagatgactgtcatggatgtgacataggggtatagctgccaggaaataagagatagtggaccatgaggtaacgttgttaagtctgttaagaaacctctgtggggctcctattgtgtgccaagctcagtgctctcaaatattctcccttcagcctagaagagagactggtacctgctgtaaggggtctggcatggagagaaagccggcttccctgagaagaggatgggggataactggggactcacagtaatggaggagacacccatacccctcggagaggctgggtgtttctgggtcttttccccaaatgcttcacccccaaatttagaacaatatagctttactttgtgttttaaaatgacagttgtattaactgtattttctacagcagatcactcatctcttaaatagattatgcattgatcgtcttcaaagggctaagcacactcaaaatattctctaaagtcattctcatgccatacctgtgacatggatattacagccacgtagtttttgccaatgagaaaacagaggagttagatgccttgctaagatcacacactcctggtcggtggcagagccaggaggcggccaaaagcctatgcctgtcagccccacaaggctaccttattggatttcctggttaaggatgggagtcagcgttatctctatcatttctgtcagccactatgtctggaataagtgacaataatagacctaatttaggactccgagaggtttgccagttcttcctccttctccctagaaagcaagtcagacagggacaagtctattttttaagagcccaagaagaggaaatttcaaaatctctattagccatttaattgttttacactatttgttcttgggagatattcttttctaagttaaatccacatgctgctgatgtactgttactattctgcttcagttgtgtttgaaagtaactggtgaccattctcagattatagtaatttgcaactttgaagatcatcatcattatctgccagccttctctaatgtctcccccatgggctaaagaagtcttatttcctttacttttcccattaagtcttcccttccggctttttagtattttctcatgcttctctggaaccttctccaaattctccacacctcccccttctccccatgatgcctgacaaggatccctttgggaatcctcactctgatcccagggtttttggtgatttgatcacagcggtgattgagatagagcctgaagctctctgttaggatataacccagtgaagagtttgctcagccttgttaggcaatgcccctttccttgttcatgtttccttggagaataagtgatcctctcagcacgctatcactttatcattaagaatagaacttgagaaatcaggcttttagcagcccaaggttgcatagtccatgcatgtagtcacagctgctgaaaaccactccctctgggccaccgacacatccctcccctgccaatgtatcgtggagctaataaattctagcgctgccttttaaagagctgaaataatcccagcgagtggctgggtggagggtgtcataaatttggtctcccaggagagatatttgaaaactgccgaagagaccctgccttgagattcgagaaaaggtgaaataagagcatgagtgagggcagcagtgaatcgaagagccttgcaggaggcacgggataagcagaggctgccgggaagatccaatagatcttttataagagttctgttttcatggaagtctcttgctgctggagctattgccattcagctgcaaaattccgtcatctatttggaatatagatattggaagattgtgctaggtgtggattccaccacagattattcgttaaaatacactaactgacaagctcaaacctaaacagaattgctgacttggagctcagaatgggggtggggctctccgtgtgactgtgagctcagggagctctctgcctctgcagaatacccaggcaagtgcgccagtgaatgttttcatgaattattcatttatggtgaatgaatgcaagcagcaatcacatgtaaatgacaagactcataatcagagggctacttatttgtccttgtgaggcaaggaggaatctttttaacaactcacaacggaaagaaatttaactgagagatgtctttctgaggatattttttcccagctagtcagatgtacagcacttatttgagttgcgttcaaaatcatcttttatttcatcttttggtctgcatttacttgccttttctaagtgtaactttatgaataattgatggaactgggaagttattggctgattgaaaagccatctcttcatgtctgtaagtctgacctatgggtaaagccaactgttcaggcttttagggtctttaatgaaaggtctttataaaaagcctttcactctttataaggaaaaaaaaatcagattttgaaaatggattttttttctgacaatagtacattagaaaccaatccagccaggtttttggttaataaatgaatcaagctgactgcatgactaattcagattaatggtgcagaaatcagtcactaaagaagccaaaaaaagtttgctttaatagtcttaacagaatgatcataaattcggatctcccctcctattactgctctctgtgtttaaaacgcttgaaagccctagtaaacatctcctccgcctaagtagatgcagtgtatatgctataaaacaaggcaaagtctccagcaggatgcagatctgttagctgtattatgttttattactaccattggcttacttgaagccaggcttttattaaaaaaaaaaaaagaagaagaagttatcgtttgcaaaataacagatactacatccataaaataaaggcatcagtagtaccaaattcataaaaaggaggcccaaatttacctcgtgtggtaaacttcatttccaacaccctggtgataatgatccaaaagtgcccttgtcaatatcgataagtccgtgcgaagcagaaatgagatgtttagttgaccacagtgtgggtgtaactggtgcctccttgcgcacagctttgagcattctaaagtacgaccttattgcagggcaggcatccaatttttaaaacatagtgtagattggagacagatgagtgttcctgaattatccttggccttttcttatgaaatgcctaaaatataatttcaagtggaaattgatttaattgatgtgaaaacaagtgggtctagaactcatctaaaagcttgagtttaaggggtgttgataaaaactacacattaccttttatgcttttcaagaacagaaatgagttgtattaagctgttaatgtaaaatggagttccatttatgacttgtaaatcaattaatttattctcattagtaagtgaagatatctattgaacgtgattcctggaatgtccattgttagagtgattcttgatatttatgttttcattaataaaagacatatttattaagcacctactaggtaccatgtactctcttaagtttcagaaatatctgctacagtaaacaggtagacataatatcagactcatgaagtttattgtctagctgggagaagagacatttttaaaaattactcaaaattaatgaattgctagatgctatggtgagtgcctgtagtcccagctacttaggaggctgaggcaggaggacttcttgctcccaggagttttaagcccacctgggcaccatagcaagaccccatctctaaaaattaaacataaatcattgatgaattaaatcaggaagctgaaatggtcccttctaagagcctacagaacacatttaatttatcattatatatacaccaattggaaatttgtaaataaattattatttaaatgatctaactggccaaaccagttttcctttctaaaatgagagcgtgcaccaagcctgacacatatttgttgtttaattgatctttgatgagtgattgattcattgattgaatagcgataaatgttcctagagaaatgtacagggtatactgagagcactcgagaaagggctccagtctgatgtggttgcccagagaaggtggtgaagattacatatgtcaggttttgtggcaggaagacagatggcgcttccatgaaggtgaaaggaaatcactatggcaggtataccaggcccagagcaatgagcgagagaggtggtcagaggccagatggtgcaaggtcttggagctttgtcatgttgtgtcacagggaggtgggcttactggtctccctgataagctatagcattcgctgtttgacagtgacagttttaggacaggagaggggctagggaagaggcagagaataggctacagatacaaaggcaaaattctcttcctgcacactcaacattctgtgtcaccaaaagaaaagcagatggggaaatcccagatcttcagccagcagccctcccttgagcctaagaaagcgtggaaagagagaatacatgttttaattgagtctgctggcattttgatgccttttctaaggctaaatatttctacttctttgtgtcatttgttaaaaggggaaatattatatctgctctctaggagcttgacagtaagatttggttcggaacatgagctcattcacaaaaagatatgggtaataagacgtcttttaaaaatatgggtcaggcagctttctcgtgttcctaattcttgcttctgtgttcatttgtcattgtttttaggaaaaacaagatactggggaactagttttgttccattttgtggaaatattctcaagggctttttctgaaaaataatgtgaagtcattttgaaaattctgtaaagttgtgggtgagagaagttcatttgcctctgtagaagggtttggaaatctaaagttgatggatttttaaagaaatatcttacatgcagccagtgttggaccttttacatttgttggactgtggttctttaaagctaaagattggtgttttagagcaagccataattttttattgtagtatggtgattaatctgttgttagatcaacatttcagaataataatagtgacaaaaataacccatttagtatattcaactgctcatttagtatcatgagataaatatctctatcacccccattttacagttgaagaaactgaggcacagagaagacaagtaatttgcccaaggtcacacagctggtaagtgatagagctaggattccaacctaggtagtctggcccatgtccttcactttacacatcactccattttacaatgtaattattacctgccaaggaagctaagtatattgtctttctgtttaaccttctacttgattattctaacaattttctttctttatgaaaatagacctgaaatcccagcactttgggaggtcgaggcaggtgaatcacttgaggtcaagagttcaagaccagcctggccaacgtggtgaaaccccgtctctcctaaaaatagaaaaattaccccggcatagtggcacatgcctgtaatcccagctactcgggaggctgaagcaggagaatcacctaaacccaggaggcggaggttgcagtgagccaagatcacacccttgcactctagcctaggcaacaagagtgaaactcctcaaaaaaaaaaaaagagaatttattattattattattattattttctgagatggaatctcactctgtcacccaggctggaatgcagtggagtgatctcggctcactgcagcctccacctcttgggttcaagcgactcctgtgcctcagcctcccgagtagctgggattacaggtgcccaccaccacatctggctaatttttgtatttttagcagagatggggtttcactgtgttggccagactggtctcaaactcctgacctcaagcaatccgcctgtctcgtcctcccaaagtgctgggattataggtgtgaaccactgcacctggccaaaaatagaaatttttaaattccactttggagaagaatgagtaaataagcattttgcattagtaattgccacttcttaagatttaagagtttgtattcctctctttagcatttcagtctcctgtcccagacaaaaaaaagaaaaaagtagtttgccaaattaggctacaagacttcatttaagaaggtccaaaagaagcacatattttaaaaaatttttatttattttttattttttgaaataaagtctcgctctgttgcccaggctggagtgcagtggcaagatctcagctcactgcatccttgacctcccaggctcaagcaatcctctcacctgtgtctcccaagtagctgggactatgcctggctactttttgtatttttttttaatagagatggggttttgccatgttgctcagggtggtttcgaactcctgagctcaagctcaaaatgctaggattacaggcgtgagccacctcacctgaccagaagcaccatgtctttgcataagcaaatacaagtgcaatgagcaaatattctttttgtggtctgggtgtgaaattttgttgtatttaaatgagaaagaagcatgagtcccgtggaatataaagcctttttaatcaacttctcttaatttttaggaacaccttctatttggggtttagtcatgttttaaatgcagttttgatatgaagaactaaatgctggctggaccggcttgatttcactaaatgaagacgctgaccacctactgtgtgccagatgctgggttaagcactgtggttgctgcagtgagcagtgcatgatacccttatcatgatggaagtcataatctagttggattaagaacatcttgttttcaagtcctgaaatccgaattttagagcttcaagagtctttgagatgcctataggctcatctgttcattacaagatggtgaaatggagagcctgaaagttaagagtcttttcccccagtcaataactttaataacaatgacatctggatatcctcctgctccctgaagctttttgttttttaattctgttctccaccaagtccttatgttattattttttcaattttttttcaagatttcttcgatatctatggtctgttatttgttttctgtttttcggtttttttggagataagagtctcactgtgatgcccaggttcccaggttccaggttggagtgcaatggtgtgatctcggctcactgccacctccacctcctgcgctcaagtgatcctctcacctcagcctccaagcatcaccatgcctggctagtttttgtgtatttttctttttgtagagacagagtttttccatgttacctaggctggtctcgaactcctgggcttaaatgatccacccagctctgcctcccaaagttctggatgataggcatgagccactgcacccagcctgtggtctgcttttgatgctaattaaaagaaaatgggaagatcaatatcttcccatcttctaacctactttttttttgcattattgactctctttcctttgcctggtcacatacgtggcagatctgtctgtcctgagagtttaacagatagtcccagtgtgccacagatcttctgaagacctgagaaaggacagcagggtggagagaccccttcgcaccttccagacgaaagcactggcctgaggataggcttgcccaagggcaaagaagaccctgtagacacagttctggcttttcagacacccctagacaggaaaacatccttcggggggaaaaatgaggacatgaaatcgcttgctgcggtgcctatcattctgttaaggacagtgaaaacacagtctgtcatccttgacattttaattgaaagaaaagcttacatagatttcaactgtaagcagtatgtttatacaagtgtagaaagaggaataatctgtcaagttggaaaactcttaatgctgcaggactcagtttagtaattgaacaatccaacatgagctcacacatcttaccttgttccatgcctcaataatttttagtaggaatactttacctagaggcatatggttattaaaagggaggcttggcctgcaccaagtctggaattattagctcatggcaacaagcctgcactggagaaggactgttgggtctttgttttcacaactttactgcaatttgccatattattttcagagtctaactgatgtgttgtttgggaagttttgttttgttttgttttaaaggaagaaaatggaatttcatgtggatgagtgaattctcacgttagcagtattacaggattttactactttatagaaagtccagggagcactgtgaatatcaaaagaaatgaactgtgaattttttaacataaaaaatcaataataacgtagttatgggagccatccaggtgtgatgggggaaaccctgtacggcaagttgagtataagccccgttcccgttcatgacccatgtgaccttgggaaaatttaaatgtctctgaattcagcatactcctgacttaaatgggaagaatatgatctaactacctcattgcattgtttcaaggcacatgaagttagggacaataaaatgcctttaaaaatatgaagtattatttaagtgcaatagaaaaagttttatgcaagtataatgtattaaataataattctagtttcaatatacatgaagggaattagacaatgccatgcttactttaacgatatgagcattctggacaaatgattgtttcttggacctagctacatagctacatgcgtcagtctagtcctttatatacctagtgatgagtaggcacaggtcatttaatttacttttttcagtttttgtagttttaaaaattcaagcaagaaacagagagaaaattctgctggtttggtaggtgggggttggggaaatgatttatagaatctgtgtagaacaataacctcaaaattattcagaatccaaacatatagggatctcaaataatcctttcccttctatacactactaattagcttgatcgatatcattaggaaattattattataatcccaagggaacctagtaccctgaaaggctatcttaatgaggaaatacttgatattttaaaatctggtaggtctctacaaagtgtagaaataacctacctaataagaacactgaattaaatgaaacataccattcccaaactatttatataactgagagttttccatggtttcaggaagaataaaaactcattttaaatgtaattacttttgcatccccattcgcgtaaccattaagttgtttaattaattttttctctaattttttttaatttttattttttagtaggcaatctcctgaactagaataggttcagacagattccctgatttctttttgaaaaagaacacctcaaaaaaatcctaatgaacaacattatttttcatatgtcccattggatacagaatgtaaatgatgataatatgttgccctttgtcccatgagcatgatattgcaaaccaacataataaaaagaaatgtttttagctgtctttgctataatatttttacttgttcctaactgtctatacttaaaacattcccctctggtgactaggaatacaaacgtggtaaaaggctgtatgtgtgtatagctgtattgtgtacatctattgagatggatatatagacggatggatagatggatgattagctatatgttggggtcctctcagtgaatctttctcattatggaggtagggagttcggattatttatcttggatttagaagaactgaccattattaaacattatatatacactttgatattccactattttctattcagtaaagttcccaaacaaaacattaagaccggaggatatcaacaaatttggttgactgagccacatcctatacctatctgactcagtctatccacctgtgaaggagactttaagacctagtgaaggcacaacctgccatggtattttggatcaattgaaaccagcagtcttctagatctgtaaaagccaaaggaccttcaaaggccctcttagtccttattgtcaatctatactccagagttccaagagtacatgtcaagaaatacccatagcacttcatctgcttatccgaaagcactcatcgttgttacaagctgcttccattagcctctctgtgtatctcctcacatacacattctactaatacaactgagtgtaattagtgtatatctgcataatctctgcggaaaggctttatattctttttttttttttttttttgagatggaatctcgctttgtggcccaggctggagtgcagtggtagaatctcagctcaattctcctgcctcagcctctcaagtagctgagattacagacgtgcgccaccacgcccagctaatttttgtgtttttaatagagacagcgtttcaccgtgttggccaggctggtctcgaactctttatattcttttatattttcatatatacacctatctaaactgatcataaatcttgactgattaatgactaatccttctatgatgtgtgtgactctggtggttagctctatttccaaaagacctcttgggcaaaaagagtggaaaactttatcttctttgaaattgcaacaggcatgtgaaggaagaatatgttggcattctgtcccccacctcaatcttccacttttcatgggagccaaaggaactctggggaagcagctccttctcctactctggttgggagcactagacagggctgtcttctcaagcacaggaaagtattgccctacccagaacatctctgtctgcaacctttgcccagcacttagcacgagggagcctctccctcgttctctctctcttaagagaatgcattaattctggaagcactagtttctagcataacattcaggagaaggttgtttaacatggaagcctcagaggtcctgggaggtttttgtttgtttgttttgttttgtttgtttgttgttaggtctttaattaaatgatttgacatttatacagctccccagagcaaaagcatgaggagattgagaatttatgtggggaggtctcttgtttgccatttttaataaacacaaataattccctttttccctcagctccacattctctggctcattaaatcaatttaaggctcttaaaattgttttctggcaaattgaagcaaaagctcaaactatgtacaatactcccccgaggagtgcttacccaagtcttgtaggtcaggcccaaatcagtttctgtgaaacagcctaacacctcgcgttattatgaaatgagaggctggtaattggaggctaggctccggacttgctctgagaaaggccagctgtgctgccgcaccaggatccggcttctttggtttgtttttttccattcacagtggagaacgctgaaaaagtcaaaacagatttctgttgggaattcatgaatgaagtttgctctgaaaatccagagagtgaaagtgtttccagagcaaagccaggcaggcttccaggcagaggtgtgggagagcgtggctaaaataaatgtacatagatctcaggctctaagacacttcagagggctgagatttctgagtaaacaaaggatttcaccaccaagttcctttcctaagatgcgagcgtttaggagacttattggcttgtttctattgaacatcagttagataacagaggtcaggaaatgaagtggaatttgatatattaactaggaagcagcaaaggaaaccaggcttgtgttttatttgttattatttccctaatatcctcaattatgtgactctcccatcagtggatctgatctgctgcacatgtgacattgttgtccctgctgttctggacactggggagacagggccagggcaccaggaatcatgtttgtttgtttttttctttgtcccaggcctgtcccaggctctctatcttctctgctacatctccacaacagacagagacagcccatgccagcctccatgcctgggaccctgcccaaccctacaatgccaggatcttccgccgtcttgatgccagtaagtgtttctgtgtgtctcacaatagcttgtcacttgcactgaggtttgccactcttgaaagggcaaaggaaactctgagatccaagctgatgggaaagaaggcgactgcttctgaatggagggttgagctgtgtgcaattttgctttgagggcccagttgcccatccccaggcatcgtgttggcttccccacccttcagtgctttgctatgagatatggtccatggtgacaagtgggcctgtgacacccagggaatggaatttgttcagggagatggtgtttcatatctactccaaagtctacagtttgggctgtatacagagtgtccttaaattgccagtgagtcgtctaaccaggactcaggataataactataataatatcaataacaatgatcatacataatagctgctaacatgcatttatgcatatcatgttctgttgttctgttaatcatgctagcagtatttattgagtgtttactgtatgctagtcgcattccaagcacttgatcctcacacaaaacaattctacaaaatgggtgtattactgtccccactttttgaatgaggaaagaaaggcaagtaacttgctcagctgagaagcagagtggctgagttttgaacccaggaattctggttctagagcccactctcttaaccactatatgatatgcacacactctctcctttccctctcacaacaaacctgtgagatagacactgtttttatacctattttccagatgaggagactgaggtatagacaggctgagtaacttggctagggttacagagctaataggtgatggaggtaggacttagatccaggtagtccgacttctgagtctccactcataatcattatctaataacaaacaataaaaataatagataaggccaggcgtggtggctctcgcctgtaatcccagcactttgggaggccaaggtgggtagatcatgaggtcaagagatcgagaccagcctggccaacatggtgaaaccccatctctactaaaaatagaaaaattagctgggcgtggtggcatgaacctgtagtcccagcttctcaggaagctgaggcaggagaatcgcttgaacccgggaggcggaggttacagtgagctgagatcacaccactgcactccagcctgggtgacagagcgagactccgtctcaaaaaacaaacacaaaaaataataatagataaacatagaagggagatacccagttttccagaagaaatatttctttccttgcatggacctcttcttcatcctccctggcgttgtgctttggtgaagatggctggtgtattcacagggccaccggagttctcagaagccctagaggcagtgtaacaactcaatgaaaaccctccccacaacaatattaacaatgccttgcaaagccttttagcattttaagaaattgtttccattgttatttcattttattctcacagcaatcctgtggggatacagtagcagtaattactgatacactcattttacagatgaaaagctgaagaagaaattgaaggtagctgtccaatgtcacacagcttgtgagtgaagaattgtggctggaacccacgtctcaactgacactgagtagctcagatcatcccaggttgagcaatttgctcatttatctaagtataggcaggggaacggcgaagggcccgcagactcagtttagagaaatggacttgcccaccctaaatactgagtagtccagattagaaacagtctttgcaacactgggccagaggacagatcacgttggttgactttacctatgttgctctccttagacccctttacatgaaagaaaacagcaccatcaatgcaattatcccacattttattcaacccaaccaactacgtgaagacttccaccacaagctgtcttcttttaggctttaagttgttcccatccaaaaattattatttttttacaacttctatgcattgcccagaaaaataccactgcagagactttttaaaaaaaaatttggctaagctgtgcaccattcccagagacaaagatgagacacttaggctgaaaagacccagagaaaccagtttctaccacatcatttattcctacagcttgacctcctgttagtgcttcagagtagcagcaaaggttcagctgcatggtcaagagctcccaaacctgtgacattgatgtacacagctgccatggcaataggcgtcagtttagagcagcgatgctcacctgggggtgattttgtcccccgggggatatgtggcaatatctggagactccattggttgtcacaaccagggtcggtgggaaggtacaggcacctgctgggtagaggccagggatgctgccaaacatcctacaatgcacaagacagcccccacaacaaaggattatttagcccaatattcaacaggcctcaggttgagaagccctggtcttgagtgacatcaatgtaactaataaacattaacttaagatttctaaaaagcatatcgtaagagttccaggccctagaaacctaggccctttcttccttatcgtgtcaccagttcctgtactataacttaggcatttcaaacctggtcacaggggagacgcttcccctagagtttctgccctggaagaccacagttccctgggtataaaagagaagtctgtgtctataagtgaggacaggattcttcactgatttgtaatgcatgctgctggaccacacattttatgaagtctaggtgtaaaacaaaatgatgtattatttcattcatttactcattcatccatttcataaacttgttgagcaccttctatgtgccaagtaccgtgctgggtgctggggacaagatgaagaacaaggcaggcattgccttcaaggagttcggtgggttgtgatttcttatcttgaaattcaaatgctttaataatttggaagcgtgaacacacatttataattacaaaacctcactgaactacagacaggctagctcctgttttccagtgtgtgcaaaaggtgaaatcctttacatggctattttacctgcagtgctaaatgttgcccagtattcagcaaagccactcccatcttctgggctttttattctaatcaactcattgaagtcaagctcctggtgcagacagagccttattagtccaaagcaccaaatagttattttgactctaggtctataagacgacagtcatgaagttggaaatgcaattttttaaatagataaatcagcctgtttaaaactggcattttgtgaatcacaggttaggtagagactatagcttttccaaaaagtgggaagcgttgctgactacaattccagaagctgtaagcaggctactcttacctctttatataactagtagcttggaaggctctggacaattatctgtacttctgaaagatccttctttggcaacctggaagcaaaagttattttggaatttgatttccctctctgagagggtcaccagtcggaataaggggtcaaatactattccagctctcccatccaccagcctctggaaggggagataaaagtaacatgaatttttttagagcaatgaaactcttgaattcttcatgatttacaattacagtgcatgaatgtacttaatggccctgaacttaatgtacttaatgatacttttaaaaggttaaaatggtaattttatgttatttgtgttttaccacaatgaaaataattttaaaaattagctgttcagagatttaggggggtgcgtgggagtgaacattttattttactgaattggcaaggcctcaaaaagttgtacggaagtgcttggaaatgtacagaaaattcacctttattagctcctcttgaaacagtttcacacatctgcacactgccagatgactgatcagctcattcaggctaaggtaagactgatggctcttaactgtcacagggagtagccaccagtcaattgagagaaagcttttagctagcacctctactaacccacagatttatgtcataattatacccctgctccgaggcagacacaacagaaattgcagtcatggaatcacaacaagggaagagacctttaagggtcatttagttcaatgagccctctcaagcttcactcttgttcgtgaggtttcagtcctccactctttgaacacctccaatagcaagcaactccgtattttccaagactacctaggctaactttaagcagaaacctggtttcttaaaatttccaatcattgttttcatttccatccgttggcaaatggaaacacgcttgcattgaagaatctattcttgtccccctgaggaaagtctaattcttttctgtgtgattttagtattaagtgtacttgatttattcttattcttttaaaagtgttaattttccaccaaacggaaaatattattaatcaaacacacccttcctgaatggaagtagacattttgccgtattcgcttcttagtacgagcaccctggagattaaaatgccagaactcgattcaggtatttgaacgatgttcattttagacacaatggcaggccagcaggaagacaatgtgagagcggccattcatgtgaaatacaaaaccctcggccgctttcttcacctacccaaagacttagccctgctatgaaaccaggcctgaaactgcagctgcgtagagtagcagggtaacaaggaagaagagatgcactgggcagcagctcaaatgcctggctggatcacaatgattgtgtttgtgaactagggtgacaggaaggcccaccacctctgagagtgttgcttttaaaactaattattttgattgcccaaaagatttatgtttactatataaaatttagagacaaaaaaagccatagatttcccaagttaaccatttggtatattatttatcctttcatagtaagtaaccttggtgattatatttagtggagttacttgaaatagatcgtttagttttcctatagcttttgtatggatatattattctttacagccatacaaataagcactattggtggtagctggagtatttacaaaagtggaaatatttggtaattttatttgaaagtgatctgccatgacaatgtagttctctttggcctggggcaccctgtatagaagcacggctttggatgattctttgatgtgcgtgggttcaaggctcaggagggcattgcttaccacacaccaaaccataggccttctcaggatttcttcaaagaaatactaaacgatccattggacagaaaagtgcagctttgtctaatgacctagactgcctttgcagacttctaattcttttctttcctttctcttagatggagcgacaaatgtcagtgaactccagcatcatggggatgcaaggtccaaatctcagcaacccctgtgcttctccccaggtccagccaatgcattcagaagccaaaatggtaagtaacagttataatcaccctttcattattctgtgactttttcttttgaattttactctgactccaaaaccttagttcagctaggtagagggctccatctttgttttggtgaatgaaaggcagtgcagagactgcctctctttttgaggatgtttgttacagagccttggtgtcagataatcatgtaacaagcactggattggcaagtggtattaatgaaaggaacatttaggagttttggtagatccatacaagttggggtaggatatacccaagcgtgtatatatttgctcagcatgtgaaataataaaaataatacaaaactactcattcttcaaggtagttacagtttcaatgccactcttcctgtccccatattcattaagacagaagcttgatgcttaaacacacactggtatgaaaatgttttgtgttttctgttatattgtcagaagtgacattgatttgaaaggatgagagccttattttcttgcaacccttactgaaaggcatgatttcaggtgaaaatcttcagtgatttttaacatatgttacatgtttgcagtaaggtcagtctttccaatcacagatagagttatgcatctatattctaccaaatattagcaaaaccaatgcaatacgtgtctgtctttgcaatataaagtaagcttggtgattatatttagtggagttacttgaaataggtcatttagtttacatacagtttaattctcatgccacaattaataaggtatcacatgactgcaaaatacactgcagcaaactttctagcatctgatattggataaggatagcttgtgctagaagttggagattaatctggtctgctgactggcagcattagagactgtatctgatggttggtgtgaggatgttgttgacagttctgaaagttagccatcaattcctgtgcagggtggagtcagacccagtgacttccttttcaatgtcagcaagagttttctcatgcctgctttggtcactttctcttggaaacttcacgcatttgacttgcagcttcttgacccgaggaatcaactgagctcccagtgctggctaccttgggcaaataaaatctgtggttgagagagttctctttgctgtgccacagtccctgtgatgtgccaaatggcaccagcatttgcagcaaagctcgttaaatctttttggaatgggcaaatattttttcaacttgagccctgctgagccaaaccaaatacttgctggcagaataaagttcaaactggcaactgttttggagaccaaagtaatgccatatatctttttttaaaaaaaaaaaaaaaaagaaagaaagaaagaaagaaaagaaagaaaagaaaaaatgaactgtgaaggtacttaagaaaaataaatgtaagttcttcatgtatatgaataaatactcagggtctgtgtctgagatgttactccctgtggtttactttggaatcttcttatctgcttcagggtctgtaccttttggagggaccttccagatagatattaggtagattctaaaacacaattccaaactgaatttctctgccagttgattttcactggattttatgccactgcttgactcaaaagtgtccttcttctcttcttgctggcaaagaaggaaaatgcttccaaaggtggtgcaggtttatacttatttatacgtatgaaataaatcatatgatttggcaaatgaatagtgaatcatgtcagttggaaacaaagggaactggtctgtacttataaaaatagttttaccccacaaatgtttgttgggttaaatttactgagtaagcacaccacgaggctgattcatgttctaagaaaatgaatatttccaggtccacagcatctgagctaatgaactctatcatagggttggggcttagggagtacagctattctctgccccaagctcccacctctacccctgttattgccaatacatcaatttgaagggaaaaatggtagcattggctgctcatgtttgaaagaatagtactggaaaaatgttaagtgaatttgaatatgtcactcagcatctctgttcttattatgcttgcatttttactggagaaatcagttattgccatatactaaccatatagtattttctagcagctttgggctgctcagatgaaaagcttttacgaaatacaaagtagtgaaggaaaaaaaaaacttgcacgattttaatgtcagccagagcctccccaggtttctctgaactatgggctttgttgttctatgcctaattttcttcctgtgtaagactggaatggattccagatttcaactaaaactcttgtttcactgttttcaaggacttttccaaaggtcacacatggactattgtgatgaatgcactctgcagggtgtgttcccagagcacagaagtaaccagagagctgcaagggaggtgttgcccacaccaaaacactgcagacttattcccctggggacagtgctgtcagagtgtccatttcaagctccctgttggccacagacaaaagccattatcctaaatctctggcgaaacttggaggtcttagaagtggacagaagtttaagacaggattgctttaaatgcacaattttgttagaatttttctgagtagtgattgcccattagaatgcatctgttttctttgcccccaattagtaatttctattgtgagagcaagcaaacccagtgcctttatcaagttctccagcgcattaatctaggacatcctagatcaagaagcacatgtgcaaatcttttgatttaatgtacattagtatcaatgtactgtagccacatctgtccaagctatttttatcataattctggctaattataatttcattttatggattcattttctgaagaattaagtcaacagacatggcttcacaatgcacgtattggattccttttgggggtcagagcagactcagagctctgagaggcttctgtctttctaacctctcaacatcataggctcttccttctagattcctgggagcaatacgtgtcttagatgaaagtgggatctgctagaaagaaattcactgatagatacctggtggacatttttaacattcaaaggggaaaaggaggaaaggaaggggtaggggaaatgcaaaccatcccgggacacatttccagtctctatagcatgcagatgattctgtagtaatgtggttatggtgttctcagagttatgtagatatgtgttcatttctatttatgggaatcagaccaattctattaagctttgaaagaggtttttgtttttattttaaagaaaccagtaacgatttggaagctaaataagcagtgagggttaggggtggagatgtggccatacacctgtcttgtgtctcattaactatgaggtggctactactgtataggactgattaaaatgatggagggctctgaccactctgcccaggtttcaccttaagtttattcagagttagtgaaggctagagagtgttgatactaggaatgacagtaggaaaaagatatgtacaggtgtgacctgattttctcctcagtacagccccacaacagagatattgtccctgtttgtttgtttgtttgtttgtttgtttgtttgaggcaggatctcactctgtcaccctggttggagtgcagtggcatgactatggctcactgcagcctcgaattcctgggctgaagcaatccttccacctcagcctcctgagtagctacgattacaagtgtgcacctagctagatttttttatatttttgtcgagacaggatctcactatgttggccagactggtctcaaattcctagcctcaggagatcttcctgcctcagtctcccaaagtgttgggattataggcatgagccgccatgcctggcctattgtccccactttacagctgaggcaactgaggctacaaacggttaataaaactggcccagtgacacaacacttagcaaagactaaagtttcagactccagtaacaaagcttttgatcacaacattgatcctttggataaaaatatcatatggctaccagatagatgtcagtaaccagcagattaaatcagattcccttgggttaatttatatttacataaaaatgggagacaaggatggcaaggatagtttatacctccaaataacctggaaaagatgtagagtggttagcagcattcctgcttggtttaaacaggactctgtagcctcactaactggtacagcttcactgttctttatccaaacacattcttgtcttgacttttcttattttacacgtgtgtctctctcgattgattgaaaactccttgaagatgatctttgcatcgtgcaagctccttgtactgagaaaggccccatgaatgagaaatgaatttgagtttgagttgagttgaattaaaataatgggaaggaacaaaccctagcaatgctgatgaaggtggggtgaagtgggataaatccagatgaattctaagctaagtaatcagcctatcaagagtagttgacttcatttgatttctttgaaaaatacctaaatctgtcattttttttttcctggagagaaaagcagtatgtctgttcctttgaaaatagaagttggaatgtctttgtcctccttggagttgagcatcagtactaaatgctatttcttccattgtgttggactggtcatgctgtattttgatcatttattgtcaatacctcgtctatagttaggtttgcaatttattgaatagatacctaagtacatgcattaatgaatcaatgaaagaagctaaaaggatgagaaagacaaggcatcttagaaatggagactacttagttagaaccttctccaattccttcttttcacaagtgaggacaccgaggcccactaaagatttagggagataaagccatattttaaacacaaaactggaccctgagcttgggccttcacatttctacctagaattgtgatttctctgtcagctgcactgacacattactaacagtgcttctgtcggctcgtggtttcctccgcacagcctggcagacaagaactagggaggtatggtgagcaatccgtggttgcatatccacttcgttttgaatgtcaacctgggtgtgtttgtgtttgcctttcccctccctaattatcgagctggataactgtttgcctacggtgccccttggccacccactgtccaacagataaatcacagaggagcctggctccagatggagttgcctggaaagcttatacacatgaaaagacagtctccaggtaacatctctctggcactcctgaaaaatgcagttcttcgatttgcctatttgctttaatcatccccagcttcacttcctaaaagtccaggaataaaaagcaatgaatgaataggctgtctgcttctcagaagctttgtgactaggaaagaagtgctattgactttaaagaagctctcatcaacttttgaatcatgccagcagccatgtgaccctgtagcctgtgatcaaaacatgatgatgatgggctgaagtaagatgaccacgtttctcagaatgctcctccctcattgctgtgaaaaccactgtccaccatgcagatgaataggaattacataagattccatgacaacagcagcaacaatagcaatctacagtctcacttgtatgtatgctgtgtctcaccttaaaagcgattttccttcttaaaacaccgtggtagagagtagttattgccagcctgaatcaagcacttatgtatgtggtaggagctatgttaagcatcttgcaatatattctcaatttttagaacaatttgatgaggtagatattcttttttctttctttttttgttttttgagacatcctgctctatcaaccagactaaagtgcagtggagggaccatggctcactgcagcctcaaacttgcaggctcaagtaatcctcccacgtactaggtggtgcagctagtaactaggactgcagatgcgccaccacacccagataatttttttttttttgagacagagtctccctatgttgcttaggctcatcttggaactcctgggttcaagcaatcctcacacttcaacctcccagactgctaggattacaggcatgagccaccacgcttggcccagatagtgtccttaatcttattttacgagtgaataaactgaaaggttgggtatgttgtagagcatgcagttggtaaaatatggtctgggatgtgaacccaagcactgggctcctggttctagcccttaattgtaatgtttagccagcagtagggattgttatcctgtgagtttacattagtagagcactttacaaattgcaaactgcttccatgtacatcatattgttggggcttcatagcaaccctgtaggatcaacagggaaagttactatgcttgttttatagacacagagaggttaagtgacttttccaggatcactcagtggtataaccaggacctgagcccaggttttctttgatttttgtcctgtttctattatatcatgctatccctggcgttcccatggtaacttattctgaataaaagcatgcctttataaaaataaagctcagttgtataaagtaagattaggctcaaattagtagctcaggccccaccacctctttgcttatgcctattaaactctctagacctcatcaactaaatattggagaggagtcttctctaaatctctgtctggctgagacaagtgctgaatttgagtttagctattgttattaaagaattaaaagcaatagcactttgagactaacactgagagccaacagaaaccccatctcctttctgctggctagaagtatgacgttttatatgccattgccactttgcccatttaaactgtagaaagtttaatttaggaatatatcatgtcatcttaaaaataaaatgtaaatgattagattatgaggtcattgataagagaagggctagcaaccatctatttatatttctacagaaaagaataagttcttacagagtttgtattccatgacctgatcagaactccaaatacacgagaatatacattcgattatgtgtcttgaaaacaagaattgagagatgattaattgcctatgaatcaccaaattccaaaacaggaagggagttcggggattcttttggcaaaatcgtttcttttgagaaaaaaaggcctgaagttcaagttaataacttgtctaaggtcaagaagctaatgaatggaagaaggagaattagaacccaggttcctgattttcaagtgtgttgaacttccctctgtatatactatcaagtttgatggggaaagtcatccgctggttgctgtgagagtgacctttctaaggtgatagcttatgaagcattttctgcaatttggttattgaagcgaagtacacaggggtgaaagaggccaatcagcttttcccttctatgtcaactgggaattgaagctgatcatcaaattccccgaaggaatgggctcaattctctatgattcttccagagacttggtggtcttgacttggcttatttgccagccagcgtacgaatacatgctgaggatttcatcccttggcacctagtacaaaatgccttggttttgcttgtcaccaacccaaatccccatgttttctcgctgttttctttgtgcctgcatgggtcttcctcgggttctagagctccacatcatgctgggtgtggagtggtgaatgagcccactgctcacacaagcacagaggggttttgaaacgcccctttccattccatcttttctcttggccctaccttctccaccctcacaaccggctccttgtacacacactcagacattctcctaggactcattgtcttctcggttttatttctttctctttctgccagtatccaccctgttttggtaaccacggcaactggtgaaatacaatcccaatatttgctagctgcctctgtcacccagcccagcacgcgcattgctgggtcttgtttttatgtttgtttaatgttcctgagcctgaattcagatgcatctgggcaaaaaaaactgcatatggtttgggtcagaacaccccctctcagacaaagttttcaagagcctctttcttgtgtatttgtggacgtgtgagcacgcgtgtgtccctgtctgctttggaacattgtgcgaataagttcagctgtgtcagaaaagccaggaaaaaaaaaggaaatttaacaatcttgttacagggaagttctgctttgcagagatatattttggtcattttcttggaatgtttgtagcttacacttccaagatttttgccagcacagctaataatgaaagtttgctttgcactttgggatgatgactctgtcttgcttttttttttttttttgtgggaagcacagaagatctatctggaaatttgtgccttgatagggatggaaggtggggcattcgggtagacagaggaggcaaagttttcctaaaggtttagggttgtttttttttttttcttaaaacccaagaatccaatcttgaaatttaaactacgaagagtatgttttcccttttggtatccttttaaaattgtctttttatcgcttgtttgagaagctggattgtactaaatgattgttgtattgctgtagtgtgaataagatgaatcattagcttcacaggatacttaggtcccagacaataaaggcatgcctcaattatttttatttcaaaacagcatacacagtccccaggacagaagtgttcaaggaggatgagattttaatccaactgtggccttgtattccagagattaaaaagtgcaaccagagagccgagtcagtaaccttgatttcaaaatagagccaggatctgaggtgtaaggagcacacttgggtagaatttcagagctggtaaagtgtttcacatgcacccttttctggaacttccttctcccttttggcaccttgcataggaacatgttgcacccatgtttccaaggtacctgagcctcagtttggtccagtgttcctaccagccccttctcctccactcatctctgcacaccatgatctcgctccaggaccccctctcaggagcccggcattttcctgagggcttcttgctgcctctggctgccccgcctagacttgcatacaatccctgtttgctgctgcaaactccactccttttgtcaaggctcagctcaaatgtacctttcctgtgaagtcttcttgccttccccaggtgggcaggagccatgccttcttctaggacagactccacttgcactgtttgtctcttcctcatggagctttactgtgttgtcattgtccatggacctgcctcgccgccagcctgcaagctccatgagagctggggccagtttgattcagctccgtgtccccagtttgccatctctcctgtacttgctaggtgcccagtaaacatttgctgatagaatgaaggaagaaaagtctgataaactaattgagatggtgttactgtgatttaatatgtcatcccacactgtgagctactttttaagttccagggagaagataagatttaaatcataatttaattctaccatttaatcgtaatgatagaattcaaggacccatgataagtaggtgggatagagacactgaacaggtgtgaattctacccaaaattccccagatatctacgttggtacctgggggctctgccagccacagtcaagtgcagctctgcagagaagccctgcatgaggcctcttgacccctggtgtggcaccatctgaaggtgtggtggccttacatgaaatgctttagcactttagtactgaaatccccttgctgcaggcccaaggcttcagtagttcaaaaaaaaaaaaaaaaaaaaaaaacacaaacaaaaaaaacaggttaatggattccagtatagttttgatccaaacacataggtataaactaaactttttgccttcaatacatagaggcaaaggaatgtgttaaaatgaaaatttcctttgccttttttctctgttcatataagtaatacatcaaaattgggttcacactaaatatacagtttatatcatgcttttaaaaatgttatgagtattttttcctatcaagtatcttttgaaaacattttaataattatctaatttatcttatggggtttcacttaaaaatttaactatttcctcatttctatttctggatatttgaattttctctgctagaaatagtcctttgattataaaaattagaaagacaaaaaaatctgaaactaattacatctttacttagttccttaggatagattttcagaattaggattaacaggtcaaagggaataaacattataacgcttccaaatttcttaaaatttatactaaattgtatttatttctataatacaggaggatgttcatctcacagcattttcagaaatatttaacattatcattttaagcaagattttgccaatttttgtttgcatttcttacattataggtaatgttgaaagttgtcttaaatattttttggccgcttgattttattctttgataaatttctttactttaaggtgaaggtgatttttcttctttgtggtcagtaccagaatccagggaactagtaatagagcaaattgtccttcctctgctgcattttgaaaattcttactaattaaccagcttcaccaccttactttactaattatactttcattctctaagactaaatgcatgatttaaaatacacttaatcgttttggttttttttgtttttttgtgtgtggattttttgtttgtttggtattactttttttgcttggaagcagtgtttagaggtttgtttttattctaagcttaagctttctgatttttatagttatacaacttatgtgatacaaaaatattggcttctccaggattattactctggctctttcacattttctgtgtttatctaaccaagactttgattatttaaatatatgcctaagtatctgaaataaatcagagatgtgtttgtgtcattcacaatgttctgaggtaggattacagggatcctgctcttatcccatttatgacaaatcaatctctggccatttttatttcctcagtcactatgtacgtatatagatttatgttagttaaactttatcattatcattgggtgggtaagtgttgctgactccattctcaagcaagaaagttaaacagaaaatataaggagtgtaagtgttattaatggagtattcttttaaagttgagtgagtcctctgttaaccaggttgtaacctccttactagtgtctaggctccctgagggggagggatctgaacacctggcatatagttgctagaaaatatctacttatcaaatgaattaatatgaataattcattatataatagtattaaacatttactgagtggtaatcatgggccatattactgtgtgcttcctctctctctctttttttttttaatggaattttgttctgttatccctgctggagtgcagtggtagaatcatagctcactgctgcctcaaattcttgagctcaagcgattctcccacctcagcttcccaagtagctgggactacaggcagacgccaccacgcccagctatttttaaattttttacagagacagggtctcgcgatgttgaccagtctcaaactcctggcctcaagcgatcctcacatctgggcctcccaaagctctgggattacaggcatgagccccaacacctggccccgtgtgcttgctatgtggtaaggagtcagcaaggaactacacacaaagcactatatggttttttgtttgtttgttttgttttgttttgagacagagttttgctcttgttgcccaggctggagtacagtggtgtgatctcggctcactgcaacctccgcttcccaggttcaagcatttctcctgcctcagcctcccgagtagctgggattacaggcatgcaccaccacgcccggctaattttgtatttttagtaaagacggggtttctccatgttgttcaggctggtctcgaactcccgacctcaggtgatccgcctgcctcagcctcccaaagtgctgggattacaggcgtgagccactgcgccggaccccacacaaagcactctgtgcacttacatatattatcttctttaattatcccactctcctatgaggtgggtgtcctcatttttgtagacaaatgaactgacgtacaggggacagtgcccaggatcatttagccagcaagtggccaacaaggatttgaacccagctctggtttcaaatctcacattcttagtaaccctagaggactagctgacccttccatgctgtctttgctttggttaccttaaagcaacgtggtgactggatttcaggaggtgtggacgcatggaagcagtgacaattagccagcaaatatttattatccatgtcagctatgtacttaggctctctctctctctctttttttttttttttttaacagtaggcccctgatgttcctctgtgggtttttcctggccatgtaatgaatccctagaaccgtgcatggagcacatcatttccctgaacccagggcaacaagtggggaacacaaccacactgtaatcctgaccccagatggagggccaggctgatcatcctgttcccacccagacctgtggagcaaatgcagctcaaatctataccccagtggaagctcaaatcactataggtcatggaatttgggggttattttttaatatttgaaatcttgaatgttaaattggaaaataccaagtctctgtatcattaacaataatgttaataatgaccactagctcatattttaagaactaggaaatgttttcatacctttcacatagacagtaggctaccttttcaggaaaaccacagctctcagttggaattaagaataaaattttttgctgttgttgttctttttaagaagcaaggtgaggcattgattgaaaacaaaaacaaggaatcagactgcctagcttcagatctagctgcacctcctggtttcttcccccctctgttcctcatttccccattgacaaaatggggataatttttaaagattaaatgaggtaacagagaaatcatttagcacatagtaatttctctctctctctctctctctgtgtgtgtgtgtgtatatatgtatatatatacgtatatatatatatatatatatatatatatatatatatatatatatatatttttaactcctgtttcaaaggatacttctgtttcttttactggtttaattcatatggtttaaaacatacttgttcaaggtgcatagtctcaggaaggagaaaactgagactaagagagattaagtaacttactttagatcattcagcaaagatatggtaaaaatcagttctagcattcaactcctagctttgattaatggacttagttaccatgtcctttgtagagacttggatagaaaaactcatgggagttatacagctgttacattgaattcaccaattaattaattgaaatatgaaaaagtaaatatgacttttaagattttttacaaatagttcaaaatttattttagaaaacagagctcagtgcagtatattttcaaattgtaaacacatgttattgttttatggtttgttagttcacaagcttataagtacaaaaacactttataacattaaacctgttaatgttaaaatattagggctaaaattgcacagaagactaaattctcaccaagaaatatatattaaattccaccacctaaaatagatttttactatgtctgtgcaaattactttgaattatccaaatatttggaatacgtctagccctgagacttaattatctaggtaccctaaaatgacatgaatcatgccatgccaacttttggcattattttttcctaaacacctaggatcatttttggtttgcataagagtttcccttatgctttgcaagtgtacttggaataaagctagcaaaggagcaagaactccccaggcccttggatggatgtggttcggtctcgaggacatggttcagtaggctctttgccaacacaccctctggaacaaccgtacccatgataacagagtgtaaaaaacctgattattttcaaatctgatgaatgagttcagctgttcggtagaccagtatggggtatgtgagaacatgggatcacagcaaaaagcatgtttatctcactccgtcattgcagtgaactttatctcctgggaattttcttaaagggcaagtctggacaaagtcatggcttaatgaccagagagtctacaagcgagttgttcctgtgttccagtgaagcagaaggcagggcctgagcttgtgaggaaagatgagctaaagaactgcgtatgctccttagacaaagataatttgtcacatcaccaccattcatctcttagttcccagctcactgttccaacaagtctgttttgtagatttcttatatattaaaaaatgtctctagccgtccactgagcaatcagttcattcattcatccttttcctcccgaaatatttattgagcacttttaaaataccagtattacacctggttctcagagatacaatgataaataagctataacttaagactcaagaacttacagtccaataagaaaatcaggtaaataaatagaaaactaagtatgttgtgataaatattatgataaagtcaagcacaaggtaagctcctaatctaccttcatactgatggctgggaggtgtctagagtggttcttcagcaagacttctcagaagagtcaaggtcctgtgctcttcaatacagtagcctagtggctacctgtggctaggttaagttttaaatacatgaagataaaataaaatttaaaaatcagttatgagttccactatccacatttcaagcgctcaataactacatgaggtcagaggctagcatatgggcccacatagataaggaacatttccatcgtgtctgttcagtagcgctggtctcagcagatctgaaaggtgagaggggaggggttttggagggagaatacaaagagtgagctgaaacctggagatactggggaaaaacagcactaaataactgttttaaaataacaagttatttttaaaaacatatgtatttattcaagaagcatttattatttgtgctaacaagctgcgggttttgcaaagatgcttaaacacagtctcagcctctaaagaacttacatttttatgggcaaggtaggggtcataaaatattaccagaaaagcatattcgagtttagaggacagactggttagttcaagtgtgaagcagtgagtgggaaaaggagaatttggagggaggctcaggctaggcttcattcttcctgaagttgttgtttatgacttgggtcttgatgagctgtaaggattcagacagggcagtggcattaaattccttaccttggttaaaaaaagaaacattcaagtttcacagagttcttacagctttagggtccagcaagcaactgggaagctgaggctctccccactggcatattcattaatgtctttctactgggactgccccttatacaatagagatctcattcggccgtgccaacttacacggaatagtctcccttctaaatggtgttccgtggattagtttagggaagcctgagccagatcttgtttgcattaggtggctgaaaaaaggaatgggggtgggggtttaaggattatgcaaatcactggctgatatgtaggttggaaactggagacatgtgaaagcagcttttatgcaccaataggtaagggaactaggaaacatttctaggtgaactatggggtagctaacttaggcagatcgaatgaaattgtcaggaaacaactagataaatttatgaattttgttctctgaattgtataattcaggtcttatgaaactcatccctggccatttattccctgatttcttggtagcagaatctgttccatgaccactttccctttctgtttggtatttttcctctgctgggagtgtctgcgaagtgcaggtgaggtcttgcttatcacaaaagccacttggtcctccatttctaggggtacgatgttctctgttgtttgggaaacaccagtctcagaaatccttttgaaggaattctcccagtcacccaggaagagaaacattcaagagaatgacagaaaaggatcgtcttagcaaaaaaaattatagcctgtgctgagaggaaagttgagatcaggtctttagaaactgtgtaacatgatgatgagtgaaaaaaaggaaaaaacagttttccagatccctctttaaaatctcctctgaaatggggtaaccaaggcttgcgtcttcgttcttttccggtagaaaaatccttctgttaaactcatgtaaccctttgaaaaataaaaaggtgattagaaagatggtatgaattatttgaaagaaaaaggaaattttatttttttcattgttacttgatatgtgactttaaaattttaattaaatgtagttggatatttactcaggcaaaaaaatatcaaaaggacatattctacctggataatatgtttttagtttctcaggaccaataatacattatgaacgtattacctggccatgcagggatttttttttttttttcaaccttgttaaattaactgatttctacttgactaaaggttgttgagttaccaaaaatgttgtggaattgagcacagttcaggaggttttacaatgcttcccctggaattccaaggtagatcttccacaaacacttccattaaaaacaggcctccgtgcgcactcatgggtggtgttcccaaagtgtgtttaaaagtcagtcattcagaactcaaaacacagttttcctcacaagaaatgtcagagatggttactttcccagggctgcccacaaaagccttttattccataacgtatctgaaagagcctccctccatctgttgagggaagaatgaaatagtactggacagaaatccaccccagccacccccaccctgccatccctgaggacaacactttttatttgctgaggcagccacctggacttcagggagaaagaaaggaaacacatctctctctgagtggattctatctctgaagccatccctggaagagtcctttgtagagtgaatgtttatcagccgagatgtgtttctttcctttgagatagctccataccaacaattaagtacgttttgaactttctcttcttttattaccatgatcttcgtcatgactgttctgcaccattactggatttcgaaaccagaggaatgatgatcgtatgacaatcaaaattaatatcccttggattcattgtttagcaagggcacggatctcccaccagccaagatatatccatttcatagcccttaaacatagccataatgtaagccaggcatggtggcttacacctgtaatcccagcactttgggaggccaatgcaggtggatcatgaggtcaggagttcgagaccagcctggccaacatggtgaaaccctgtctctactaaaaatacaaaaattagccaggcgtggtggtgtgcgcctgtagtcccagctacttgggaggcggaggcagaagaattgcttgaacccgggaggcggaggttgcagtgagcagagatcacaccactgcactccagcctgagcaacagagtgagattccctctaaaaaaaaaaaaaaaaaaaaaatccatagtgtggtgttctcacatttgattaacatattatgactttttgatgtctgagtaattgattcttattaccattgaaaccagagatgggagtgatggaaatgacctacagaaggattaaatctacccactgcaagggctgaactaattgaagcaattctatgtgcttacttcatattagaaaatgagcaaacccggccgggcgcggtggctcacgcctgtaatcccagcactttgggaggccgaggcgggcagatcatgaggtcaggagatcgagaccatcctggctaacatggtgaaaccccatctctactaaaaatacaaaaaattagccaggcatggtggcaggtgcctgtagtcccagctactcgggaggctgaggcaggagaatggcgtgaacctgggaggcggagcttgcagtgagccgagatggcgccactgcactccagcctgggccacagagcaagactccgtctcaaaaaaaaagaaaagaaaaggaaagaaaagaaaatgagcaaacccttcatctcctcctcatcattactaacaccaacattgtctgacatttttgtccacctagaaattgtattcatgatttcttaaaacataagttactcactaatcctcattcacctctcaggatatacttgggaaattttcaagtagtatcacacactgttgctttttcttattttgctttttttttcttttgagatggagtttcactctcgttgcccaaggtggagtgcaatggtgcgatcttggctcattgcaacctctaccttccagattcaagcgattctcctgcttcagactcctgagtagctgggattacaggtgtgcaccaccatgtccagctaattttttgtatttttagtagaaatagggtttcaccatgttagtcaggctggtcttgaactcctgacctcaagtgatctgccggcgtcggccttccaaagtgctggaattacaggcatgagccaccgtgcccagcttattttgcttttactaatcgagtgttgagacttggatgacagtgtaggccctaaggtgctatatagctcattgtccctggtgattcaaggctattttttgccaaaacatggcagggaggaaacccagggaagtggacattagaaaacttagaaaaagatttgtctctatccgactgcagtggctcacgcctgtaatccctgcactttgggaggctaagatagaaggattgtttgaggccaggagtttgagaccagcctgggcaacctggtgaaacctcatctctacaaaaaatacaaaaattagctgggtatagtggtgtgcacctgtagtcccagctacttgggaggctgaaatgggaggatcacctgagcccaggaagtcaaggctgcagtgagctgtgattgcaccactacactctagcttggcatcagagtgagaccctgtttcaaaaaataaaaaagaaagaaaacgaaaagcttaggaaactgtttgtttctgtattggtttgttagcgatatcccaacaacataccgcagactgagtagcttaaaccacagaaattcatttctccagtctcaaaattctggagggtggaagtccaagatcaaggtgtcagtggggtgattcctccagagggctgtgcggggaagaatctgtttcaggcctctctccttggcttgtagatggccaacttccccctgtgtccttccccggtctttcttctctgctgtgtctgtgtcctaatctccttttcttttttttttttttttttttttttattatactctaagttttagggtacatgtgcacattgtgcaggttagttacatatgtatacatgtgccatgctggtgcgctgcacccactaatgtgtcatctagcattaggtatatctcccaatgctatccctcccccctcccccgaccccaccacagtccccagagtgtgatattccccttcctgtgtccatgtgatctcattgttcaattcccacctatgagtgagaatatgcggtgtttggttttttgttcttgcgatagtttactgagaatgatggtttccaatttcatccatgtccctacaaaggatatgaactcatcattttttatggctgcatagtattccatggtgtatatgtgccacattttcttaatccagtctatcatttgattcctaatctccttttcttatgaggacaccagtcatattagattagggcccatccatatgacctctcattttacctttagtacctcttttttttttttttttttttttttttgagatggagtcttgctttgttaccaggctggaatgcagtgatgcgacctcagctcactgcagcttccgcctcccacgttcaagcgattctcgtgcctcagcctcccgagtagctgggattacaggtacacaccaccacgccctgctaatttttgtatttttagtagagacggggtttcaccatgttggccagggtggtctcgatctcttgacctcaggtgatccacccgcctcggcctcccaaagagctgggattacaggcatgagccaccatgcccggccccctttattacctctttaaatgtcctgtctccaaatacagtcacatactgaggtcccggagttaggatttcaacatatgaatttgaggtgggacatgggaggaacaaaattcagcccatagcagtttcctaaactgaagattgcttaaatattaaaatcttaaacaaaatcctaaccaggatgcaatgatttgcctttgcaaaatcaaatctcgaattccagtgggagttctctaaggatctgtaaagcctaactgtgttgggctggtctttctcaggaagagacctcccttgagaatattgtagcttgcagactggttcatttatgaagctgaaagcaggcaagagaggtgcccagggtacaaatataggaaagagcttgctcttggctgtctgcatgctgaccgtgtactgtgcatttgcacaattctgagagtgaatatctctttaaatcttgtgccctgaacatctctcttgctccacgctggtccttgcacttctgtagaggaaggcaaacagtattcataagttgtagtcgctctttcaatgatgttttggcaaacatctagtattcaagtgttctcagaagttgattgaaagtgtgattgttaacacaggctgggggaaggaatacgaaggtgtcctaagtcatttccttgttaatagtgacagccactgaaccaggaatagattttgaggtccttgtgctgtatctctacatttgtaacccaatgtcatgcttgcttttatttggctgcattcttagccttgatgctagatgatgacctagaggacagcccaggatttgggaagggattccatgccttgatttgtgaatccatagccaggctcagaatatgctgaggtctttggcactgtgtcagtgatatgatcctctcagaagtgtccagctctattctgagaacggagcaggcgcagatgcacctcatctctgccagtggctgtggctgtgaactttagaaacccattctgctattacagagcagaaccccaagagctagagcagatgatccacacctctggagcatgctgctgttctagcaacaggccggagctgtctagacaggagagagctttccttcttacccctggcagtccttgatctgaccatggaggcaatgctgttttctttccagaagtggcgtggttagtgaggcagtgaatgttgctgtcttttaagagaccagctaggacacctaagtcccaggctttcaggatgaacattttagtgctctggctccctgcttttgcctaagaacacgcacttcctccaagaacctgctcaagccctcctggaggaagtccagatcaatgcttctactcactgtcctcagctcagtgccttgacatgaatttgcagagcctgatgaaatattttctcattctgaggggaaaatcaaagccacctctccccttccatctgactattcaaaatgtaccagaatttcctttagaagttgatctctaaggaggtacaaagctacttttgcaatgagccccctttttagtattacgtgaaagttccaccattaatattagcaaaaatgaattctctagggacatggagagaaagaaattttggttataaggtcagtctgcctgtaactttctcattctctcactctatgtaaagcaacaagaaaagttgtaagttcaacatggcattagtctgtagaggctcgtttcaataccacaaaggctacttccagctaaattttaataatctaaggccttgctgctcaaagtggggtcccttgacccacagcaccaccggggagccctttaggaatgcagaatccctggccccacctcagacctgctttttaataagattctcaggtagctcgcaagcacattaagctgtgagaagcactgttttaggaactaatgaaccttaagagattctgtccaaagacaggaagatttgaattatcttctctacccagaagctgataattaactttagcagttgttagaggcgatggtttcttcctatcaagtccttttgcagatggtccctctcttatccattctgtttgagaccccttcagtttgtaatgaagcttaattgattagctctatttgtgaaaagctcaggccctaataagcacactcccactgggtacacaactaaatagtttatgaggtaattcgtattttaatgtctttcctaatgagccctttcagtaatgaaatcccctgagaaaacgttattggttcccagacgtttcttaggctcctagggcaggaaggctgatgaaggtggaaacatgaggctctagagtagaaaacagttttcagttcaaaacaaggcagattcttttcttccccctcaagaaatatttcaaatatggcttttcataccttattttctaaatccttatcttctcaatcatttagaaaaactagaaacaagactttttttttttttcctgaggctgttgtggaattcctttcctctgcagtaaataaataatatgagggttgccagtgtgtatgatgttatacaaacaagaaagacagatggagaggaaaagatacagggagacagaaatgtgtgcacacacacttgtgtgcaaatacacacacagcacctgcttggtgcctcaatgttctttgtaagtctgtatttaaatcttctcagcatcatcacttctgtaatagttgataaatgtgtcaatccctcctcattaagggtgaagccaaaatgagtcccataatgagaaagaagcatttagaatagcaaagtggctgagcaacaagacagttatctgtagcacagcagaattcgatccaaagggagttacagcaaattccctttaagtgaggaaggaagctgtgtcacaggggtttgctggcagctgtctggaacctgcagtggtgaagggactcacctttctgctccgaagctgagcagagagtagacacactcattcttgagccctaatttgaagccagacagcaggcaaagaagaccagtcccagcgtgttttttttccagtctctccctctgagaaagcttcagacaccaggctgggttggccagcctgacacagtgcctgtcctgtaagtgatggcaaagcgtatcctgaccctactttacctaacacgaagatcaaagcctcccagcatgtaatggatgctgaaaaacagcctttgtttaccagtcttgccctttaacttgttaagggcgcccctcccctgaagaaacacactttctcagctggatgcaggagagggaacagaattgtggaagatgtccttaacaggcccttctagaatcactgctcacggtggtgtctccattcccataggaggaaagccagaaccacaggccagggtcaatgaacgtattccagctgggcctgtggccatgtggctggctgcagattttgctttgttacctgatggctttggataagcaggataaaaaataatgacttaatagaccatgagttttaataacatgtctgcaggtcactgggaacagggacagcatagagctcatgtgtagtgttttgctttgttttcttgacaagcaaaatgagttgtcttcatgggtactgtatgcaaatctaaatctctacaagccaaattttgtggtaaattctgtgatctgtgggtatgtcaggattttatgaatgagacaagcacatatatgtgtaggacttctttgaaatcccagttatcactctagctgtcactatgaggaagaacaatgtgtgggcaaggaaaagctctttgctcaaagccagagccagcaatcttgaggacagagacagcattctaagtgtgatcctgctaaaactagagagaatgtgtccaagccaaggacgacgaattactagagctcagtggtatgaaaaaagaagaatctcagagttctggagaaaattctttaaatacccagggcaggctttgtggaggtaccttcatccttgagaagagagacttcagtatctgtggaacaagtgaagctagaacttggcatcggagcatagtgctgagcaaagaagcctctactcagatagatttgagttaccacggcatgccagtgaggaaaagcagcctgcacaggccccagcgtgcaatgaggattttaagatggtttgtaggtcttggccctccagacagtgagtttgcaagcctctgtgagattctgcctggaaaggaataaatgcaagaggggaggaaaatctgaatgaagtttttattctggagggctctcccagtgtcgtagctgcttttgtgcagggacagggacaaagaaagcaaccaaagagtgggtggctgggatttatgtatttgattgtctcacttaacaatcaatgaggctttaatattcttgaaagttcaggctcctactaaaactgccttgagccaactgcaacttggatttgtaagcagaatccaagcctgacctcctaaggtgtatgctccaaccccttattctctgagtgtttcagcatctgtgaaagcagaggcctcaacccagagtggtaatttcagcaacttttccaaacaacattctgggcgagacaagtcagctccttcccatttacttatgagttaattagtatttaaatacaagtctccaggccagtgatttattttaataatatcttagccccttggcaggcccatgacttcatgactgcagcagtggggaaagggcacaccgccctgatggatgtctcagtgctgcatgtggctgatttacaaggcagtcctctgatctgagtcactcttacttcctctgctgcaaacccattgagtggcacccagcggttggagcgtctacttgcttaaagtgacagttaaaagaagagagtgggttgaatacaaataacgtggatgaaattattattgaacaagaaatcactggatacttcaaattgtgaagcagttgtatattggccaaataggatcagtttccatatgttcattgtctgttgcatttattaaaacaaaaggctatagatgctggttttaaatcagtcatctgcattttataggtctcattacaacaatgtccataatgatggagtcagctgatttttttcaagacaatctttaaggttattttgtgtttattaggttgctaggggtacctaatacatcagtacgaatagaagaagtgtttaatgcagttgccagatttttatgcaagataaatagttttacatgtctcagaagtagaatccaattggccaagaagttggccaagagctgaaatttgacatcattcttggcaactgatagtttttttttttaacgtgcattatataaaaagctcactatatcttttctagatataatattagactgcaaatataacttttaacaataaatcaatatatgtaaatgataaagtatgtttcctaactgttggtcacagcaatagacaacatttcaaatggaaatatgcattttttcttttttcctttagtatttttgaaatgagaatatatgtggcatatctttatgttgtagagctcagtgatacaacaaatacctatgagcccagcccccagcccccagccccagaaccagagcatcaccagtcatttctaactgtcagtgtgttccttccacgttccatcctgcctcgcccttggggtcgtcactgtcctgaagttggggctcatcatcctttggcatttaaaaggagttttatcacaaatgtatgcatatcttaacaataaactggttaatcttgcttgtttttgagctttatatgaaatggcatatagaatggagttgtctgggcttgctttttcacttaacattataaatttctgacaagaaaatttgtggatctcattttaaggaagagaatggccccatatacaaatcatttttaacctctactatagatatgtgatacacaagaaatgtaagaaatacatgtagaagcttaatacgaaatatatcactttttttattagagtcagagatgcttgctgtttccatacttattgtattttaattggtaaaagatgattaaaacatatgaattaagcctcattttgatgtttctgcaatgtggtaattaaacccagagaagatatattttctatgaaactattacacctaattagcatgtaataattgtcaaattaaatatatattaaatactcattttaaatgtgtaattgaagtgtcatgacatgaaatctaatatttttggaatgaatttatcaggtaatgtaatttcaggttgccatcagccttcagaactgtactaaacataggcctaattacccctatggaacctttcaattgtctgtctggttgagcacagattctgaaaaattttaaggttagaaatgaaatgtttgataatctcatcaagaattaaatgccatatcgctgggtgaaaggtttccgtttagattctctaggcttcttccaaacaaatatcaaggcagtttttccctttccccattaaccaacaaacgaagccacttggttgctcacaagcctgggaagcgtcaggaagcaaaagatgactgcgcgtgagccaggggtggggggtggggggacactgtggagaggaaaggcattccttcttctctacacatctttattaactcagatgccatccccagcattcaaagaaggccacagctctgctggaagggattgccactgttatcactttgtcagaaaagagaaactgacacatttggaattggcatgttggccatgtgaagatccagtggattttgtctataatgtgttctcagatttcagcaaagacaggttaaattcgccatttcagaccctagtggttttccactcagtcgttgagttgcttgtggtttgcaaatatctacgaggatccagtgccttccagagagggcttgcctccctagttatgtggaatagacacatgttgttttttcttttacttactaatgttgtcattgttttattttttatcttgaaacaattttaaactaatggaaaagtcgcaaaaatggtacagagttccgatacacaccaagcttcctctaatgttaacatcttatacaatcataatacaattaccaaaaccaggaaattaacattggtgcaatgttattaactaaacttcagactttattcatatttccctatttttttcaccaatgtctttttttctgttccagcacccagtgccacattgcatttgtttttatgtctccttagacttccaatccatgacgatttctcagtcttcctttgtcttttatgatcttgatatttcttacgagtaccggtcagttcttttgtggaatatcccccagtttgtgtttgggtgatgttttctcatgattaaattgaagttatgcatattttggaatacttcagaggtgatgttgtaccctttttggtctgtcatgtcaaagggtatatgatgataaatcttatccctggtgatattaaccctgatcacctgtttaaggtgggatgttccagtgttctcccctctcaagttcctatctttctctttgtaattttttctttttttggaacggagtttcactcttgttgcccaggctggagagcagtggcaagacctcagctcactgcaacctctgcctctcgggttcaagtgattctcctgcctcaacctcccaagtagccaggattacaggtgtccgctaccacacctagctaatttttatagttttagtagagatggggtttcaccatgttggccaggctgttctcaaactcctgacctcaagtggcccacctgcctcagcctcccatattgctgggattacaggcatgagccatcgtgctcagccttctctttgtaattaatatgtatctcagaagaatattttgagacaagcgaacaccctactttaaggaaaatcttcgcatggaaacctgaacttatgaaataagtactgatgtattttcttgcattaacaaaggaattcttcacttttccaaaggattcaccccaggattcaattttaaatagcaatctcagttctagtacatttaacatagggcctgtctaataaatgttaacagttaactttttgagacaatgtttactacaatggcctcttttaggacaatgtttgtcttcgcaaataatccataaatatcttcttatccccttatataatgagaaaaaaacagcagaatttctcttacctggtaggtcactgaaagaagaaatagagcttaaatcttctactctttattcttttctaaagggatttttttttttttttactgccagaattagtgggaaggtcaggaaaatacacatgttttgtggaaataaattctcagagataatattctataacataataccaaagtagatgggctaagaggatatcaattatatgccatacacatgattccacttactggaaaacagtttggcaaaatgtaccaagccttgagttccacctcaaagaatctgtcctaagaaaataatcacagacccaagcagagatttatgttcaaagatatttactgcagtgctattataaagtattaaggaaatgatttgggaaattggcaataatctaaatgcccaataaataggaaatggtgggattttgtccaacaattcatgttttcaaaaacaaatgccccaaaaacatgttcaagtgatcacaataccatactatgtagaaaaaatagaagtaatattgtctatacagaatgtccctaatctctctctcgtgcatgcatacacacacacacacactcacacactcacaattggtagaaatactgatgagagagttatctgtaggtattagaatcatgactgatatttattttccttatgctttttagttttccaattcttgtgctataatcttcttatattaacaacaggaagatatttctgagaaaattagcagtaattccataggtaccctttggggagatagattcattgaaatacctttacatttcctctttttcaaccctgtgtagattacagctttgaaagaaactaaatggcatgcacttgttgaatttattccaaatatttatgtgtatatgcattcacacacatatttatagagccagaatgaactgcatgatgaagtgaaatgattaaaatttttaaaattagatgatgtgcatttggagaaaaaaattcaatatctagcttttccatggttggctttctaaatctaattagaaaatacataggatgtaaggactatgatgcaagaaagaatgagagaaggttaaccctaccagggatacagtttttcagaaaaaaagaagacgatcttttttatattattcttttcaaggttagtctttaaaattaaactcattaaaaaaaaaaaaacctccctcaacctcatcaaattacagaaagccaaatatctagctttcatttttaatcaagcaggcctaaatattcatgtttatgtgcctaaatgaaacttttgtatgcagtgttccactccatctgcatgaatagtagcattgtggccgggtgaggtcactgcagaagggagagtgaggtaagaacacagctgaatctacaggctttctgcagtgtggtgcaccagctctttcttaaagccacagaactgccattctcacaccaaaggccctcggtttgtttgtgccgggctgcagccccacttgcctgtgtgtagtgatggcactgtgtgtcatgaataattcaagtgttccaaaggagagccagaactgcaaggagtagcatgtggccagaacctcagcagtgtataatttctgcttctttaaacatctacgttggccacctgttctcaaaggaaaagatggtaccttccgtttcctactgccctgccacaagatccatgagggatcgctgctgtagttatggggaccccactgtggtgtgcttccctcccaagcagtggcaggctaagtcaccagaatattggttaaagatgcatgtcagttcatattttacctacatttcctactaacttagaggaataagttggttgccaagagcatgctggcacgtagctcccagccaacacgatcctcattagagctgtgagaacatgaaaaaacttcactcttttttttcccccaataagctctccaaacgttttacctcctgctttacaatagagagggatcctttattctccagtcagcatcaagcagcatccaatttaaataataagatatttccaagatatgggtactacgcctttgcttgtatctgccttggaaggtgccatgataccaggaataacaacagcttttaaaatctttcctggaaaactttcacacctgaggcctgagcatataaactcgcattaagtaaaaagatagcactctctgaaccaaaacttcaagaatgggtaagattgactctttaaattaaccaaatcctatagagttcatcttgggtatcagtactggggataaatgagagcataagattggttaggataggcattatgggggttacatggtccctctgtaagtttatagccaagagaaagtgctttagaagttcagggaaggacctgctactggatctggaagacttggagaaaatactttgtaaaggaagcagaagatgagaggtcactgaaggaggaacaggcttgggcatctccagttgagaacaatagtgtaaagagaagggtattggtgccgtatttataacagctgctgaagatacaaactctggactagctcagtcgactgacagatgaccacctctccctgttcagggatcatcagtagacctgttgagttgagaagtcaattcctatgagagaagggaggtccagttggcaagatactttgggtcccagccagaccatagaggctcaggaatgccagcctaaggaaatggtcattatcttttaggcaatagtgagtcactggaggattaggagtagggagggacacgatgaaatcagtttttttggaagataaatctggcagtgatgcacaagaagcacatatcaactaatagtaataagaaaaaaacttactaagctaggaatattacagttccactctaggcagtgttaaacaatgattaaacgatgaaccctgttcatttctgctgatggctgctgaacattgatcctgagagctgctcgccatgaaaagaatgaaatgaatgctgtgaaccaaggacccaattattattcaggtaggccctaaaatctgtaagtgttagtggccaaagagtgtttctgaagtgtttcagagatcttcaagtgcattcattcattcatttagatcaaacctactatgtgctgggttccatgatagtcccggggtagggtggggcgggcataaagaacaatacaatgtattctatcttctcaagaaatttatatttgctatagatttttaaaaatacagaacataggaaggttcagaagcccagaatttacagcatatatagcactattgtatgcaaaccctcctacctcgggggatttacctacctgctggaactcattcacaggcctggctgaggttcagtgatgctgtggcctataagagagaagtggaagtgtcgaggaaggcaagtcgcagccaaatgaagggcttgccatctccctttttcactcagcaaaagtacattgagtggctgggcacggtggctcacacctgtaatcccagcactttgggaggccgaggcgggcagatcacctgaggttgggagttcgagaccagcctgagcaccatggagaaaccccgtctctactttaaaaaaatacaaaattagccaggcatggtggcacatgcctgtaatcccagctactagggaggctgaggcaggagaatcgcttgaacctgggaggcggaggttgcagtgagctgagatcacaccactgcactctagcctgggcaacaagaggggaattccatctccaaaaaaaaaaaaacagcacattgagtctaagtagcccttgcatttcagcaggatggagtccagtttatttttcacttagaaatcttccagaagtgtgaagtgttcattgaggactcaaaatatccctaaccaccatgactaccactggtgctctccaaagcggccctctcctcaagcaccatattggttattagtgtcagccacaatggtgtactctgaactgggcacatgctttaactaatgttcagagacacttattggaaattgacaacagcaggttttgagagagagagagaggcagagagagatcaactggctatttttgcagggtgtttaaattgctggttacaatttgttggatgattgattggttcaggcgctcacatttcaaagattgtatagtcaactgttaataagtaaattttgagaatctgcaacatattgtttataggtaccaagttaaacacagttactgcccatcatgttgcattattgccagttttcagttactcaccctaatttttttagcgtactgttacatagtatttcccctgagccaagcactgttctaaatgctttgtaaatagtaacacagtaaattctcgcaaccgtcgtatatgagacatctgctaataccattcttattttacagaggaggaaactgaagcacagaaagagtaaatggtttacccaaagtcacacagttagtaagtagcagagctgacatttaaaccgagcagccacactcctagagttcatgcctttaactactatgccactgtaacaatgggcagcaacatgaggaaagaaacctatatagaagtaatagtatgggctgggcacggtggctcatgcctgtaatcccagcactttgggaggctgaggcgggcagatcacgaggtcaggagatcgagaccatcctggctaacgcggtgaaaccccgtctctactaaaaatacaaaaaaattagccaggcgtggtggcgggcgcctgtagtcccagctactcgggaggctgaggcaggagaatggcgtgaacccaggagccagagcttgcagtgagccgagatcacgccactgcactgagcctgggtgacagagcaagactccgtctcaaaaaaaaaaaaaaagaagtaatagtatgaattgtggtagtagtggtggtgatggtacaggtggagtatcccttatcctaaatgctggggaccagaagtgtttcagatttcagatttttttcagattttggaatatttacattacaccggttgagcatccctaatctgaaaagtcaaaatctgaaatcctccagtgagcatctcctttgagcatcgcggtgatgctcaaaatgtttcagatgttgggccattttggattttggatttttggattaggggtgttcaatctgtagtcccagtagcagtagtattacagcaatggtagtgctattgtaacagtagtcgttttgtagcagtagtgtgggcgcagcagcagcagcagtgcagaacacagtaagagtggtggtagtattgtagtcatattgtcatggtacagcagtagaagcagccatcattgtctctgttggcctggttgttgtactctcctttcagacatgaagatatcgaggctcaggtagacctactaacgagtcaatggcaggacaggatttgtgctcacaggtatctgagtcctttcctgcctctcaggatgttcacataagaagaaaatggctgttctgtagcctgcagaaattcctgctcagcggcttggccgtggtttggcaatgctaccatacactgtggcacttgaaaggtttgttgtcactgttgttgttgttatccttggctgagtctatgtcatgttcaagccaccgatttgttggaagtgtgagggctggtatgtgaatagagggaggtccggtggggaaagtcagtcaaattagttgtgactgaactagcttgtcaattcagtgagacagatcaaaccatagccccatgtagacaccaccagggtttgcactaccagtcagtaggtcactgagtcctgcccctgtgaaatcccccagccacttagagcagtaaagattgattaaacatgtttatatgcaatttgaaaatggttctttcaggaaacgtgtggttctttaaagtcactttaacatgagagattttactttagtttatttatatgctagccaaaaagaacccaaagtcgagcacaaagtcccatgatgtatggagtcctctaggagaaattgtcagagctggtttatatatttgtactctatcaatatggcctttcacagttcctaattagttttgttagttgacttacagaaaagtgtatttaaagtgagacgtcagtaattccactgagggaatagcattaatgaaaaacacacagtcaggaggccaatggaagagcaaatggttcagtcctgagcacccctaatttgtatgggggtgattaactcaactgcttctcttgttaggaaacactttggtagaaacccctggagattattcaggcaatggatacatgtgtttgtgtgtgtatacaggtacaggcacgcagacacatattttttgttcaaaaaacaagtaaataaagattaattgagcttttggaatacctacctggtgtacttctgataacatatatgccacagagattgtactggaaactcagctgagtttgagctaagatatgttagatcatgtcaagtaaaaaggaaatagctccaaaacaaagagaacaagcaataaaatataaatttacccaattttgatgtttacttctgccagctatgtgaactctgagtttggttatttatacttacatggggcttcttagaaaaatgtatttgaagaacgctgtctcagaatttcaatagccagagcagatgtgcagtgttctttgtgggttttacagtagatatgtgcagtctaccagaaattatagatgcacaattagatttttacaatgtacacattcatgcagatcaaactatgttccttaaatgagggcttagttttctttatttcctgctgagtttaccaagtggagcattggttgccagcatttctagctaagtaagtttgctgcaaaaccattcccattcatttgtgctcaggcgaggatggagggtcacttgcctttgtatagagaatgcaaaacaggaaggtctcgtgtcatcactccagcttttctctgctgccgcagctctgggcagtgggaaccatttggaatttacataccacgcaacttttcagaatgtgtgacatgctcaggtttatgtttgtctgtggtatgccgtggttgtttattatgtggaagaaatggaaagcttgccaattcacatcactaatgtgagtttgactaatgacatgggcagtaaattagaatttagcttctaaccacatacaaataggtctcaggctgctggttaatgccatgatgtcagttctgatgcccccttcattagctgatgtgcttttaaaggtagacgccaagagaaagaatttggttttgttttcctaatgcacaaaacatgttttgaacaatagaaatacttctctatcaacagttttctggcttgttgatttcccaactctgctaattataccctctgagtctgtatttccaggtctttattagaacacaacattacctacaggagagttgatttctaaatcagattgagtttccccacacacctctttcctctcccaggagactcaattgggtatctacatgtggcagcaaaaccagaccaaccaaattattctacagttctgatgcatcatggcaggttaagacagtagcctagccagtggggaaagatgtttacaagggcccactgattataccaccttgaagatcccagagaatgattcagacctgccaaagttttttcttcaaccgatgctgcctccgcatgtttgtgttcatctgatgggcagtcttaccataactcatgtagggcatatattatcatttgtggctgtctctttctgaatcagcatttaccttgttagtagactgttttgccacacacaaaaacctatttatgaagaaatatttccctccaaaatatagcattctcttatgaatatgtgcccactcagggcaggtctgtgtttagagacaagaaggagtaataaaagcattgaataaaaaagaagaagaaaaagaaagtagtaaagcctacctatgactggctttcacagtaatgtctctgtgagcctacagttattttcttggcacagcagcaaatacaaatgaaattgttgcggaatctaagagagaaatttcattaggtgtaataatagtgcttttcattttcaaagcactttgaaaatgctaactaattaatcttccataatatttccaagtagtaggagcatatattcttctacttgcacaaagcgtagcacatataggaggctcatgttacaggaaaacccttagagactttgcctacatgcgcttcctccggctatccacacatttaaaccaaaatgaatatcgtcaggtagagaactgacaaagcacacaacagtatatgattgacagggttagaaagtgagacaaagaaaaggaattcaaatatccagaaattgtaaataaatgagcatatgcccaatgatcccaagtttaaggggagagtcaaggtggaaagaaatatatttttgtatgtagttgaccctagatggggttccacagctgctgctcaccagcgatggacccttgggtaagatattaactgctctggacttcactttcctcaactgtaaattgcgggtgtcggagtgaaggtctcaagatccttcttgttctgaaattcacaggtttctgctcagggcaaatggcaagtcaatagacaaggcttcattcctgagatgggtctcaggggaatgttttctgagggggcaactttttagctacagagcaggaacatggcataaatccccaaccagtacatttatccaattagatttaaactcaagcctcaattaaagatttctctttcacggcatcgtaccaatatcagaaatgcaaatactgtatggggcttttttggctggagcaagtcatatagctaacattttgtgactgggagagagtccaaattctttcctatgtgtaatcactttaaatgatgtgagggatgtgtgtgtgtgtgtgtgtgtgtgtgtatcatttgttttatggaaatatttgtgtgtggaggggtcaaaggtgataattcaggaaaataagccaattatatatgccaagacttgagaagatttcagtgattccttaaatatttaaatcatttttaaaactagtgtgatcctgcttgctttgggaagcagaataatttttagaaatgagttcgcaacataaagataaagtagtgtgaaacatgtgaatctcaatgtaaataactggttggggataaaactgatctcattctgaaacttccagcagaagaaagtttgtaatgaggagaaaggcaaacttaccagctaagtcatttaaatgaaagctttatatattttcccagatattcatgcagcgttacaatggcacaacccatatttgtgtatttgttttttaaacttaaggttaccacatctggcataaactattattttggttgtcaatttgggtcgatgaacttcaaaccccacatttcaaagtaaatctgaagataaaataaacattttacagaaagaaattttgtatggttagaattttaaatatttagatgtcagaatgatgtgctcacattttcaggttacattacttttaaaggaattttcaatatattgtgcttggtggtttggattttccagcaaccctttattttgtaactttattatttgctgctgctaatgttgacaaggacttaaaattgtacgtgcagcattagatgcaaatatcctgctacaacacaactaattctatgaaatttagagcaaaataatgctgtgataaaatttgagtgaccatttgataattgtttgtatttctctatcaccatgcatgagaaccttctgtgctttaaaccttcccttctacccaacacaaaagaaaacaaaacaaaaatccaataaacctaagtggattgatctttccctaagcaaaatagtcatctgtcctaaacttaaactcttggctatggttttttttttttctttttcttttttttgaggctgtcagatgacctcgatacaatatgaaactgagagaaagtgcatttcttttcattcatttatttcttcacacatcttcaatgctccattttgtttaatagctgaaacacataacaaatccattaaagactcttggctctaatcattgttcagaataaatacagtgtcccaaaagatcttatttataaaagtattccacttaagatgtgggccttgtttcttacctccacagcatttacccagacaagacacagattttcaggagctttaccaaaaaattgggaattgtaacagaaagaggcctaaccttgcttaaagtataacttgtgcatcttgttggttccagggcatcttgagggtgatcagatcagaatttcccttgtctttcctgtgagtttctcctgattttctattccactctttctttaatataaaaacatgcaaagaagaaaatcatctcaaataagaaaagcacttagatgtgcctctgcatccttagtagctactaataggtattcaaattgtgacgtgtatatacattatacacaagtgcctgtttctttttaggactgccataccttctatttcaaagagagtcctcctttctttctgtaagttgcttttaaagacagtccactatttcttaggagcttggggagaaaatttgagtctttaggaatataaaagccttgggcttgttgctttaatactgtcaagcaacttgtgaaggtccccatgcagttaaatactttaccctaaaccttcaattaattatcctaccacactttagcctttaaaagcgagtcttgctacaacatataacgtttcctctgtgccttgccactttatagcacagacctgaacataagaagggcccttgaatatattttcagtgggttctcagtactcctgtaaattatcctgcccttattctgaggttttggtgatttataacagatatttttccattagcaaagtttccttactttttgttcttattcatgagatttgaaagcatgatgtaatcgctgtggggatattattattattattatttttttttgagacagggtcttgctctgtcaccaaggctggagtacatggcatgatcatactcactgcagcctcaaaaccctggacttgaatgattctcccacctcagcctctcaagtagctaggactacaggtgtgcaccaccatgcccagctaattatttttgtattttttgtagagagagggtctcactatgttgcccaggctagtctcaaactcctggcctcaagcaatcctcatgttttggtctcctaaagcaccaggattacaggtgtgagccaccatgcctggcctaaggatattatatattgtcagtagtatagaaattacattcatggtgctggaagaagttttcttcaaggactactcagtagatacaaaaattattttttactgacctgaatacacccctaggttctttaatgttctcttattattttttttaaatttcaagcaaaatataaatgatataacattaacattataacaagttatacagttttacacataagccagagctgaaatgcaggaaaggccctaattctcctgtaaaaaaaaaaactgacccaaaagtttacacttttaatttaccattagccatttgggttttggatggcaaacacaacactttgccaagctataaaattcataatgtttaagagaaggatcaaaactaaaaccggagagtttatttgcacaaatatttgcttggtgcaaatattcgtgttggatggtcttagactatttgatttcggtgggttgaaagaaagtctgagctataatttgggttctattttcatattaggctttcccacttttcaaaactctttgcaaatattgatttgtaaagctactatctccctatgagaaataaatgctcctctccatggattgactatcagattttttaaaacttgggtcagttttatatgttttcataggtaattgaggatttaattcttttcactagagtctacatataaatgtcgatgacaattcctgtttacatggtttaaagaatttatttctgagaataatgagatttagaagggtcactttcactttgttaccgtctcataaattatctttagtaacttcagtgtcttaggtgaccacagttttgccgcctttcatagtctctcatagatgtaggtatgcagcctcaaactccgaaattcatactccaattctctgcttatgcagccatgaaacatctagaatatggatcaccaaaatgatgacaaagatgagctgattatctcactgtatttatgttactgacatttttattcttttgaattacaaaatatctaaaagggtcccaaagcagacttttcttataaatgtgtgtttacctttcatctattgtgatcatacgtgtcatgatagaaactatgtatggatttgaggtgatggtggatatattcacatggctcacagtctggtgtggtatgattttcttgaacacaatctagaccttggtgcaaggtcagaaacataagagtctgtacttcctaagtgttttacccttgtacaaatccagcactttaaaatgtgaaaatatttattcaatattatttatcaacattccattccaacaaacatgaatgtgtattaggtgtgtagtgaaatatttagttgttgttctttcttcgtttggtattcctctctcaagtggagcaaatgccacaaaaccacatttgccttattcgtagctttgtgtgtacatgtatgttttctgtctcccatggagccatgatataggtagacaggaagggagaaagggggaaaaaaactgaaggagagggctagcaccagcaataaaaaaagacgaaaatatttggtagagatacgaatggctgcagagaagaaatctcttctttgcctgttggtattcacagcagaggtttctcagatgttacaccagatctcaagaccagcagtatttacggtgggcacactgtaatgtgcccttagacagaaaatgataacagataaagtatgtttccaaatatgggcccccaccatgcctcgagcctgctctctacccattggtggcagagaactgcagctattgcccgtgtgcaggacagttcgagaattaatatcaagttgtcactgactctaatctcagacattttctttgggtggtgcggcagggaaaagcaagggctttgaaatcagactagtgtgtttaataccttaggcaagttacttagatctcttggagctacattttttcagagtgtaaaacagaagtcctaatacacatcaactaaaaaaaaaatgagataatatttgtatgttccttagcacatccctagggcataatgagaactcattacatataattcattagtttagccactatgcttattttctttgttatgcaccatctctttaaagttactttaaagataaatgagaaataaaaaacagtctgtcatctttcccttctgaagaaagggaagaaggtcccttccctgcacaagcaccccctactctggaacaagctccctcaaactctgcctccccgccccaactccactagccgtgagcccttgggtgtaaactcagtcctctgtcacactaaagaaaacacatttatttgaggtctgaatgataaagcattaacatgcaaagtctgttgaaaagatgacaaggttatgcttcgtttcccagaattttagttaaatttctcaactggttctcagcaagggatttaaacagatctctcaaatgccttgtaattgttgtccagcttaccctggaatgtgcaggaaaagttgaatgtgtcagtgcatggcaaacattggagcacccacgggctggaatgtcgacccagattgaagactgcccttcaggctgtggctgcttggttgttgaaatggaaaccagaatggcccttgtgggtaactaagccctaaatagtgaggaggaagactccctcaggtgtccagctcagccacattggtaaactttcctgactttctgatcccatcacccactagtatccacgggaaaaggcagggatgatcgtgtgtcttcatcaaagagaggttctatgtacaagataactcttggggacagggtgatatcacacttcaaacctctctgaagtatggagtaaggacaggtcatctgcactccagttcaaacacagaattggacgctaaacattatttctatactgatgtcaagttctgcttcttttgtttgagtctttgttttaacaaagagtaatacacacttggttttaaactgcatactaggggaaaaatcctagaaggagaattgcccaagatcttgtgttttgtcttcatgtcatgacttaatttttacaaaatcaaaatgacttcattcacaatttatgtacccaagtaacttagcccattttaaaattcttgctgccctgttccatgtatgcatttatttttgttttttattttcattgtaattatgtgtaccagactgggctacaggcagtgtgacactgacaaattggaaagcatatcgaacatagagagaaagagaatggaaattctaagatgggttagccagcctctcttgagttgatatattcatgacattattttctttgagctttgcactatcttttcaggaatcttcctattagaaaataacttaacaaacctgagtttattttgaacttggcagtggttctgattagagatgttgcaaaataaccattcagcccaacatggccctaaagactcagagtttccaagatgaatcagggcagatattggcatacactgaggagcatttttaacctttaacatggagtgggaatggggagagaagcgacacactgcaaatcggcacacaccctttctaccatcctcaattttatttctgtggctttttccacataaaagaaagtcattttcacaattactaagttgcatcgcatctgtatccatccagcccaagcttccaagctcccaactggggaacaaaagcagctcattttgcctaatgcctcttcaacctaaaagtagtttctaaacatcggtccttcccatgatccatctagaatttaatctctgcacaagggatttttgcatccattcagttcttacaaatatgataaagtttaatttccattatgaaaagacaaagataaaatttaaagaaagaacagtctttaaagtatttgaaaattggtctaagatccccataaggataggaactaattctatcatttataaaatctaaggattttgcatattttagccctatttggctaaaaatgcagaattaagtctgagttggatgtgccttgtagacaggagttggggtggggaggcagagtctgaggggcatgttccagagtagggggtgaatgtgcagggaagggaccttcttctgtttcctcagaagggaaagaagacaggctagtgaagaaaaagactcttgtggaaagtaagagggtttgcagatggataccatttaaggaggggacagtggcaattggaggcacttacacccaatgctttcatctgctcatgaatgtggaagtgagatgaagttcttgggggaatagttttctttctcaaatgggtaaagaatctgaaaaccatgtcacaaaaaaaaggatgatggaaccccaatatctaatctgagatgaaataattatcctcatatatttgaaaatctgcagtgtgagaagggagttagagtttcaggaaaacagatcttaccttgaggtggaagaagttgctttatagtcagggaacttttcctgtctgaattagaggataaaatggcaaccttttgaaggtactgtgtgtgtgtgtttgagggaagaagaattcttgcataggttctcttccagttctgcttctgtggatgaggttttaagcactcacttcctgacaagtgtcaagaaggtcttacaaacactgaaatttggtcatgagtccaatctagtcccaccattgatgatgccacttgagaaattcctcccactcaaatgagttaacagtgttggccatcttcccagaaggaggtagtttcatctagttgattagatctgagttgagctgcttgcatttaggatagctttccttcagcctcagcctctcctcaggcagcccctcgggcaaagcaagacctttctcattcttccagaccattcagaaaactctgttatataaatgagtgagcattgaccactagctgtgagtccttgagtgtaaactcattcctctggtacactaaaggaaacacatttatttggggtctgaatgataaagcattaacaggcaaagagttgggaagatagtaaaagaacaacattttttctttttcttttattaaaactcaactggataaattagctatgctttgaccaggcctgaaactatagctcattcagtggatatcttgtttgcttatgaacctctagtgcttgtaaaaaacgtgtcctagactagtgttctgtggcactacaaggtgactataataaacaacaatttattgcagattttcaaataggtacagcagcagattttgaatgttaacacaaagaaatgaatgtttgatagatgagagatatgctaattatcctgatttgatcattacacattgtatacatatattgacatgttacatatacccataaatacgtataattatgtaccaaataaatactaataaaataaaattagtaaatataaattaatttaatgaagaataattttttaaaaaacagaatatgtcgtagggccccaaggtgtatgtcttgttgatgctttgaaatagttgagttaactgtaccttccggtggatagaataaggcttggagttaactccttattaaagagaatcatcagggaagtctccttgggtacctgactgaaatgtaattttttgtccttatagggcagttagagtatgaccatggctaaaatgaagacagccattttttatttcaataggacaatccaggaagctggaaatcgagatcagatttaaaagacagacaattccaataggacaatccaggaagctggaaattgagatcagatttaaaagacaagtaggatcactagagcattcttccagccttagaatcagacctttccatgaccacaaaagagacatttcttgccaatggtgaaactgggatggttcttggcaataggctccatagttctgtacaactgtgtccagagtgagccactgctggcccgcgacagacagggagcctgagctcagagtggagcaggcccctacaacaacttcttccaacagccgcattcctgtctctaatggaaaatttagtatagaaggtgagagttatgaaaaagtgagccatgaggaaggggagccggtggagaaaggggagagaagagtggagttaatatgacagggcttcagcttcaacttggtctgttttgccatccagagcagatctgtggccacttggaggaacaagctcattgcagtctttcttgggcatctatgaaagcctgtaatactggagcttctagctactagtaagcttaatctcaccactagagttgggtagggaaagagaaacaacaaaacccagagcatttccacattctcttataattctaccaaggaacatctttgttggccaaccctccttagtaaagtatgagaaagagaaagaatggaacttttttttatatgagtgggtacatttgtacctttcatcatgatccattttttatctgttagtccacttaatgttttggttttcatgaccagaaaaataactaaagaaaaggggagaaaacccaattgtggtaaagacagttacatcaatgatcatgctatgaattgatcatctaatgatggtttttgaagtgggtggtccttaaatttttagttgcgacattagcagtacatcttttctctcacaaactggagtgttcactcttatgtttaaaaaatatatatgtggtggttaccaggggcagggggatgggagaatagagaagatggtcaaagggtacaaactttcagttatagaatgaataaattcagatcccatatgcagcatggtgactacagttaacagtactcaaggtatacttgaaatgtgcttaagtgttctcatcataaaacaaaacaaaaaggggtaactaggtgaggtgttaattaagttgattgtggtaatcatgtcacaaaatatatatgatagcaaatcgtcctgtggtgcacctgaaaatcacaaaattttgtcaattatacctcagtaaagctgtaatttttttaagtatgaaatagtggtagagccaaaaataagagttttgccactaattagtttctttctttgaataaatcaccctacatctcaatgctttaatttcttgctttgttctgtaagggtgtttggatgaactgatctctgacaccccagtggttctgtaagcagagagaaaaaaatggctccatctttaggggagagatacagggcttgaaattccagggtcacattttcaagacttttcaatgaaaaaaattcagagtcagtttacgttccctcatcaagggagccaccttagaatagggggattttatccaatgtgttttctggttgtcctctggatgctgcctgatgtggacacgggattcacgagaagtctgggggcgtccttcctccattagggcccctcatcctctttaaaagaaagacaacgatgccttcctcagggagtcgttgcatgaacacatgagatggttcttatcaggctcccggtacgtgtgaggagcagggcaacccttctcatgtcatgatctctctgtgtggggcatttcatttacagcgctaccccttccagaaacttctaagtgtatttttaaatggcaagtacctaaaacaaaaaagtatctgtattgaggtccagacctggcacttcataatgtttaaagcatcagctgccaatttgctgtgcctgtaatatctaatttatagttccccgtgggtgggtgggagggtggggccaatctctcaggagaagacatttttcttgtttgtaacttttttctttggtcatttaaaaaaggtttagtaagtgtgctccataaactcagggagcatcccagccttcctctgtgtggctgatgtgttgagtctctattttcccttggcaataaatttcccatgaggaggaaagtcacctttttcttcctggcctggtaaaaactggacagcaaagggcagttgtcattctctaaaacactcccactttctcgggccaccacctaccttggctgcccagcccagacgttaagggacatgggatagtttcacttataaaatccacttcctcagagagagcagatactggtggagtttcctgaatttggcagaatctctctttagagagactctgcttcagacggctagacacttgggacctgttggctcaggtttaaaaaatgttcaggttagtagccgaaaaccgctggaagttggggcaaaagagcaatgagggctgcagggtgacctgggcagcccaaggggtgactgcttgaggcaacactgggaatggagagcagggtgctcaggaagccaggtggaacggggagcccaactcactaccaaaggctgggagcccaggcgccgctcgagcctcgccactgtttgttttaggtgaagcagaaatggaagagcggtgggagaaggcgcgcccagcactgaataactgggtagtgcaggcatgaaattgcccgttcattccaccaaagacttgaaaagaaacaagcaaaaactgttgtaacaaaggaaacacaggaaggttttaaattctctttgagagacattttcaagctaaatgtagtaaaatcctcaattataagtttcatagagcaaagcagtaaagcctttatagaacactagcactcattttttgataaactaactgctatctggagagactaaaagacttgtccaggctcactcaggtttaggatgcagaagctcacctttcctgagcaagtcctccttctctcatctactgcattttggggcgggcagagtaaggaaaatacttggatttaagtgacacttgtgcaccagctctggcctaccactttgctacttggtggtcataggcagctctcgtaacctcctagatctcaggttcattgctctaaaatgggctgcattgtatctaatgtatgggttattgtaaggattaaatatgtgactacaaggcagggttttcgagagctttagacattgttagtcttattttcaacatgtaaattcctcctttaagcgcccattcagcatttcctttttaatatctgttttttaaaattaatactttcttaaatagcttggtttccaaaaacaaacaaaaaaaaaatcactttaagactgtttgtttgactatgtggaactctacctacctctattgccaggatcttttgtgcagagcaaaattttttcaaagctaggaccaaatatataacatatatttacccttaattaggaaagtaaaataaccatgaagaactcaaggaagtagttttcaggtctaaagcttaagcataattacctaaagttggtttccagttttagagctattcttataaattattaattaaagcttttaataactgaagctattccagataaatagtatattacagcagaagtgggcaaacgttttctgaaaaggaccatataatcaatattttaggctttgtgagtcagtcatatgatgtctgtaagaactacccaagcctaccattgtatcacaaaagcagccatacgtgatacctgaatgaatgggcatggctgtgttccaataaaactttatttacaaaaacagctggccatagtttgccaatcctgtcttaaagaaacccatatctttctgctttccctgtttggaatggttttaattgtcacccctgtccactgagttcacagtatttcagaccagcccctaatatggctccaaccaggttagtgacttgaaggacttagggaacacttaaattcagggctaatttttagtgaggaaagttggccagtaagagccttagtcacttaatcttttcctagcgtccttcatttcagttcccatgccaacgctttacaatgtcgaggtggatggaggtgtgttttccaacataaagacttcagctggaatattgcccaggtcatttctctcctatttccctccatgtagaggttgttcattaactaataaacttgtagaggagagtttcgtactcttgactaccaaggaattctttcatctttctttccttcttttaactgaaaggtcaccagtatgagttattttttatgttgacttagcttctatttcatagttgctgtttagacttggagagttttctgttttctatcaataagttgctttcacatttccagaatttcaactggtgggtaaaaccaatggctactgcaggtagtagtctagacagagcaggaacaataaataactcaagtcctgtcccatttttctgcattcatttgtcagggccatgtcacttcactcactccggccttcatttcctgggctaataaacagtactatcaaaggccaaataccattcacaaagttgtctatgggtccttttaaaaggcaaacttgtcctcagcttctcttcaaacaccctgtgtgctcttcccagaatcctgcatttacagtatggacatttgttattctgagactgactgttgccatatggtattacataattattttccctttaggtataattacagaattgccaacccttcgactctgttttgcattatttcacacgtattttctagttttgatttaggtctctgcatggtatgccataaatcagcagagtgggggtgggtaatgaaaggacatcaaaacacagcccccactgctatagaatgttactcaagtgacactccataactcaaatactgcaaaccatggggtagccaaagcagggcactgcgacagtatgagttgtttttgttaatagagatgaaattatgggtgtaactagctggcagtcctcaaacagacttcagcaaactgtttactcagctgtcctcaggcaacaacttaatacttgtggataaaattattctcccaccatctcccaagtggtatagtccagggatcccaatttgttctcactaataaaaagaaagaacaagtttgcaatctccaaaggcagtttgagattctggttatattttgtttttaacatatcaggctttcggcactataattcatgaaaatttccgtgtcctttgaattctgcatttcaaaaatctataggaagctgaaacctaaaatacgttgtgtggcttaaagaaacctgtggtccctaatgctaaaaccttgacatattttattttcgtacactattcccgttgcccacaatccctcctgcttcctctctgcctgttgaaattctgactcttttaggctcagctcagatacctcctcctagaagtcctctctgattccccgcctcacctaatagaaattgacctatcaatttttctctagtttaatttttaaaaattattattcaatgttgaagacatacagaactgtataagaaatgatacaataaacatccatctatccactacctatcatgcagaagccctctgggaactggaagaccattatctgattttggtatatatcattcccattctcacataatatattatgccatatttatgtattccttagccatatatatatatatatatatattagcgtattttaggtaagtgttctataaatggatttttgttttgtgtattcttctgcaacttgagtgattttgggggggttcacatttatgtttagcagatttatcatgttgattttcattagttcatttccatagctgtagaatatttcatcattaaaatttactgatcattctcttggtgtacatttaaggtattttcatttgctctcatataacttttaaatcactattatgacactacattgtaccatagacaggtcagttgcctatatactttttaccctctgcctagcacagttccagtagatgctttatatatgtttgttcttttgaattaaatgcttgcaagagagccagaaaatattatcacctttttacaaatggggaaactgacagtatgtaactgccccgtgtgcacagcaaattaacatctgatacagaattagaagttagaatttgtggtgagcttaactagaaagttaagcgtgcggctgggcgcagtggctcacgcctgtaatctcagcgctttgggaggccgaggcgggcggatcatgaggtcaggagatcgagaccatcctgactaacatggtgaaaccccgtctctactaaaaatccaaaaaaattagccgggtgtggtggcgggcgcctgtagtcccagctactcgggaggctgaggcggaagaacggcgtgatcccgggaggcggagcttacaatgagccgagatagcgccactgcactcccgcctgggcgacagagcgagactctgtctcaaaaaaaaaaaaaagaagaagaagaaagttaagcgtgctattttaacaatcattctcacccattatattcagaaaactttgaatttttttagttcagaatttgacatgaaaaattttaaatttatattatttctgctttttatttggaggaacagcatctcatcataagaaggcaagagagtttttttaaactttctttaaactgagctctaattcacataccataaaattcactctctcaaagtgcacagttcagtggtttttagtatatttacaaagttgtgcaaccatcaacactatctaatttcagaatattttcattacccttcagaaaaatcccttatctgtaagcattcctttattttgccttcctcaccagcgtctggcaacgagtaatctactttctgtctctacggattgcctctttggatatttcataaaaatgggatctgttatatgtggccttttgtggccaccttgtttgtttcacttacataatgtttttaaggtccatccatgttgtagtatgtgtcagtaattcatccctttttactgttgaataatattccattgtgtggctataccacattttattcacccattcatcaattaatgaacatttggcttgtttccactgtttgactattatgaataatgtgactagaaaccttcatgcacaagtttttatgtgaacaaatattttcagttcttttgggtatatgcctaggagtagaattgctgggtcatatagtaactctgttcaatcttttgaggacctgtgaaattgtttttcaaagcgactgaaccattttacacagtagattcttacaaggaactcaacaccccaaagacatttctagcttaattgtcttcattgtggtcctcaatttagtgttccgaaccttaaaacaatgtccgaactcattgtacagtgatgtgctactatccggtgcttatatctaacaattttatacttgccttttcattttgtgaatgaaatagtcttatgacaggtttcatttttacattagcctcaattcgatatggcttcattgtaaggaaaatccttgtagtaatttccatcccatgtttattttatcatctaaatttaaatggctctgatatataaagactagtagaaaaataccacctggtctaaaaatatagaagccttgtataactacattccatcaacaaggtagcctgttcatatttgaatgaaaagaaaaaataagacagtgggaagtcctgcaaacaccactgcaaaacaatcaggagaacaaattaatctgccttccagatgtttgcctgtcaaaagttctgggacttgtgaatcactctcttttggaggctcttctttactgcataaatataaatgttcacaatatttcttttgaattttttgatgctcagtgaatttttaaaattatagtatttatttttttctgattgaaagatgtctgtgttaacaacaaaaacaattttaggtaatgccaagaaaagaaaaaagaaaataaaaataatagtaagtcacttggaactcagttactcagagacgactattgtcaacagaatattttcttttggtcttttgtctatgcatacgtattctttgaaaacataatttctctggttgaatgacatgtcacatactaatttactgtgatttatggaaccatccccaatggagaacgatttattgatcttttccatattgtttgttgatgtttctacactgttttcacattatggtgggaaagatgacacaggcatacaaaacctgcctagccttcccatggaaagaattgaaaacaacaaagttttataagaaaatactaagaacttgtagtaacttgagcacatctttatgtaaacataattttctagttgtactttgtaatttactattcgattagtaaaaaggtatgtaatgttaagcctaccagtgacaaggcattagcttttgaattaaaagcagaagagcccttgtgcatagaagaagaccaggtaacacttcaaggacgtttggcacattggatttgtagagatgggaagttactcctacacacctgaattttaagatacggctagcaattatcattagaactgattcttgttataaatctgtgattcttgatcatggtggagacatggcactagttagatttaatacaaattgtcatgctttttttcaacaaatctacttacagatattaacacaaggactatttccatgggcatataaataataaggagtaagtatgaaatgaattcaaattacttttatcattttgggaactctttaaggaattagaaaatgtgctagtatagtgccaaaaacaacaaaacatgactgggcatagagggcaaagatcactattataattaattaataggatccagaatattaaacgttatttggataattaaatacaatgaaaaagaaagccaacaaaattatttcaaaatggtgactactcctcccattcttcattatgagtcagatatagcaaatgtattttgactttatgttaggatttaatcacgtatttttatagatttttaaactcattcattctaaactgaggaaatggattgtttttatagttgttgtgaaatacccgccatgccaagacagagttcttccttctggatgcatttgcaatcttacaaagagcttctggtgactcagaaaatcccatgcgtccattttccaaattggatgttatgtgattaaaaataaatgtaaatcacacagagactttggtgtgcttccgaaaattcccatgtcaggagttggcatgtatcaaccatgtgtaggtgtgtgtgtgctcactaatactgtgtgagcatttaggaccttatttgagaagttctttcctggaagaagagtaaagggtactgttttggaactcagcctgccatatccagctctgtttcggaggagaagaaagcagggcggatagacacaaaggaagttcacagtttaaaatttaaagaaaagggctcactggacttgttatctttggatatttatcaactggaatttttgtttctgcacagcccttcttagataaaggagaagggaggaaaatgagtattcttatagcacaaataatgcatttttctaaatcatgctgcctccctcatccaggcctgccaaccctaactgccctcaattggtgacagttcccgtgtttttctttttacagatgaaattgatcaaacaaatgcatgccctgcttttggttaggaaggtagacttagataggtaataaataattggggtcactttaagtaaataatgagtcttggtcatgaacagaggaaaagaagaaggggacatcttccaaaaagctatttgtcatctagactagttctctaagccttgttagaaatttggaatttgttcctctcaaacccgtccatataacccacccaaattccaaattggattttatgtgattgcaatcacataaaatgacagccagatactgtcaggctctttcttctctgacacccactttctttctctttcactgatttgacacttatgccactttgattgttaagctgtggtgtgtacacttttttgtttttattttttatagagatagataggcatatcattatttctcccaggctggtctcaaactcctgagctcaagcgatctgccctcctcagcctcccaaaatgttgggattacagggcatgagccaccacgcccagccatgtgcatactttttatttcgccaactggacagtcagttccttgagagtaggagccagatcttctgcttctctccactccttttcatctcccacacatcgtcagccctgtttggttagttcctgtggcttaggcaaggaaactgcaatgagaagcgtaggggcagacccttgcactaaggagacgaaagaagctgaatgccattggaactaccccaacaaacaatgccctgccagagtcaatgtactctgcactgcagaaaacacagctttcccactcagtggaggaaatagcctttaactaagtagtagaaaaaagtattccacaattcacaacgtaattaatcctatattaaaatgatttaaaatcagggctaggtggagtggctcatgcctgtaatcccagcacttcgggagactgaggcaggcagatcacttgaggtccggagtttgagaccagcctgcccaatgtggtgaaaccctgtctctacaaaaaatataaaaattagccaggtgtggtggcgtgcacctgtaatcccagctactcaggtggctgaggcacgagaatcacttgaacctgggaggtggagattgcagtgtgccgagatcgtgtaattgcactccagcctgggccacagattcaaaatcaaagctttttagattccctgtactatgagtctagtggttctttcaactcttactcttgaaatgtactgaagcatttacccagcatacaagatgatgcttttttatttcagcattcagtaactgcagactattttctccctgtttgcactgtagttttgtacactgtgtagttttgcatttaagatgacaaaacagtaaaatatattcaaactgtcttagccaaaatagggctaagttctgaatgcatattaaattggaacttgaggaatagaattgtgttatttctgtaactttgaactctgagggagaaaatattccttcctgctagtgcatctcgaagcattttgcatcctaaaggaagtgtggacttcattggttgtgttgtgacatatattagagcccagactgtagctaagtcgactctctgagcaacagacactctggaggatccagagacagtaatgaatgaagccatttggacagatctgtgcccttcgattttcctgcattcaacaaagcagatggtattcccattccctatggaaaacatcaagagaaatcctgaaaaatccctaatgtacctgatttacttggaaattataagtcttgcttgcacagagctatttgaaaggcttccatggagaaattaaaaatttctaaaatgttaatgtgtggtcttaaggaatctacatgaatgaaatgatctggcaatgtttccgttttcaaaggaatcaggcttgaaatgtaaaatttgtgttcagtcataagaaccttccagaagcaaaccccagaagtcaacctgagaaatacttttgtgaagatcaaacaatgtccagggatgaatcatccacagcatttcctaccaaagttgagaagccagaccttcagcaccaaggtggtctccatgctagacaagaatatttctctcacttttaaaagtataacgtttcatttcaaataaatcaagaggctggacaagatacttgcaaagagaagctatgaatgcttccatgaaattccctatcaatcaaatagtctatcgtttggtacaaaaattgatttttttttttctggaaacagtatacatagtacttagactgtgctggggcagagggtttggactgttccacaattttaaaaacttcaaatgaactttaaaaactgaactttactagagatgttgctgaatacaaatattcattaaatttcaacaatgtgtgtttttttttttttgagacaggaatctcactgtattgcacaggttggtctcaaactcttggcctcacgagatctacccctcagcttcccatgtagctgggattacaggcatgcaccgcctgcctgtaatcccaggcaatccccaacaatgtgatttttaaattgagcagttgtttctacctaagggtaaacttctcaacccaaaaatggatgtacttaccatacatcacatctgtctgtccttttgctggaaatacagtaagagtgtttttgacccaagactgctgaatacatttttgaaaggttaacaaagcatcttttctagatataaaagattaaagcagtgtgagggtaattattatattggccttgcaatctccagatataattatcacacagaatatttaaaatcttattttgatacattgtcagcagcagaaattgaaaacacacttaattagaaaatttgaacacatacaaaaagttgaatttctaaaatgagataaaataagtcagttttaatttttcttttttgctcaagctgatctgaaaataaaaagaagaaatgaaagaaatactagcacatcaccccaagaagcttccttcccatttttgaaagcagaagctccccaccaattgcaactgatgaggcaaaagatgtgaataggaagagggaatttaattccacttgattgtattcaactcaacaatagacactctttaggtattggaatgcacgtgttggaaatatcatcaaaaagagctaacattaaggatttggcatttcttgggggaaattttagaaattagcggattgtcaagggaaaagctaagttcagcaaccaatgagccaaaaactgaactggccaatggtgaggggaagagagacagcacaggctctttgataagttgtgcggggcgacagtccaggagtcagcaaggtgatcctgctgtgagtttttccacacccatttatctgtgcatctgacattgtgtttcattctcaaacgtggtgctgtgtgcatgaaagacacagggaaagaagggagggaggaaaggaagatgacgatttaagatgcttccagaagttgagaaaaacctttgcttccacataattggggattgatgtgaaacagtgaagaggttctaactgttagcatgatatggagaagccagcaaaatacacctccagaacactaatgttcaataaaatactcacgtgcctcactcctcccacctgagacctggccccagtacagcctcaaaaatcacatttctccttaatatgcaatgtccacactaaagttactgatgtggccttatcagtggcaccattttcgtgtcacatttgctgcttgattagccagctgatgaaccagaaaatttatcatattcttatattagattcatttctcaccatccattttttttgtccacaatgtcacttattctataataaattctgcatgacaattagtattatagttttgtccagaatttgacttccttcacatttgtaaagcactttatttgtaagactcatgaggaaaattgtcatagtctgaataaaaacaaaaccaaatgcatgcattataaccatttgcttacaattaggttattttgaaattaaaaaaaataaaatttcagactttccctccttttctttcttcttttctacttgctaccacagggttagtagcagatgtgtcatctagagtcaccaacagctgcactgaattgacaggggccttggggggagaccttgggtaaatccattgcaatctctaccatacctggctcactggtaaaatgggcccaaacctcatccactgcatgggaattaactctaaccggtagcctcagtgaaagtacagcaaacggagcttggcacaaagcaggcccttgataaacttctcatagattttcttaaacaagccacttacagaaggaatgatttccctgatcccgggcaatgctggcctggacagagtgccgatacactggcagcctcatatatatttaataaatacccaccaacgagtgataacaaagcaaaagcaaccaccaaaatgtgcccagaaaggacttagtattgtgtctgaaagtggcccctgcaagggtgatgaacagtaatgactgccgtcactcagatgactttgtcctgtttggagcatctttctactctagtatttcattgcaattgatgggcttccttgtcgtgctccaagcattcagggtaaacacagctcgtgggacacttcaagtcttggggctgagaaatgtgtgtttccacttgcctgcagggcctgcgagagagacagcttgacacaggaatcctttggcttctcactgcccctgctgacccagccctgataaataagccagctaattgaattaataaacaactcttttttttttaacagccagctggagtgcaatcaaaatgtgtgataaattatctgtcactgctttaaccacagcagggggaaagtggaaaaattagccactctaaccctttctcggggctccctccctcctgctcattttgcttagctataggatttttttttccccctcctggtcttctcactctggctgaggtccaacatagagttgaagtgagtggagaaacgtatctggctgccctgatgatggatccttaagccccagcacggcagtgggatgcagaaatttcgcgccagtgtgtgggaaagcaagatttgtctgctaccctggcaggaaaggttcggatatgagcctgtggtttaagcccacaggattcttgttaagggatgggggtgtgatgtggttgatgagcgaaacgaagggttatgatgtctgctttctctcgctcagcctctaatgccaaacagcttttgggcctttctggaatgagtgcaaaggcctcaccagagttgtggggaatcgaagcggctgcttgatgcactgtttgcttttcaccctgttttgcaccttagcaaccttcttcaatttctctctccaccctcttttctgtgtatcctagggcctcatttcaagtcacgattgttaaaggtattgatttttacaagccattcttcagcattgttcgtcagaatcatgcaacctattaatagtcctgtacaatttaaggaggcttttctttattcatttttctgatgatctccagtgcagtttctccaagttggaaaaataaacagtcaccatcaggctaaattcatgtgtagacatcattaggcttttctgtgtcaactcactctgtggtgtggagacctcccagggttcaccggggttgggaagcatctgggtcgtatgtcccagtttaacaccataattctctcagaggtgcttgcgttataggatgtcgccttgtgtaataatatacaaatcatctgcatggaacggcccagaactggcaagagatgtaggttgcgtgaatgcagggttctcgatttgtttgattcatgggcttctaaacacacttcgaaggagctcttctccagagcataggctcttcactgcctgtatggagcagaacttttcatccactgccctgaaatgggataaagcgatggttgttctttttgttttttccaggaaaacagagctctgggaaaacgtcatgtcattgctaaagtcagaccttgaccactatcaggcaaaacttgagaccacactccttgttaatgtttgattatattcttatactagaatgtttactgcagggttttgtgctttcattggcattttcagtcctggctgtgctaggcccctctgcagatccagggcttcttaatggggtgggagtgggtcagtggagagaggaattaaagtaattctgaaccaacaatgtgaagtattgtgcttgtgaagctccaggacattcacacctctgtggaactgtaaatgcctgccctgaagaatgcacttgaactccacgggatagaatccaaaaattccaataaggatcctgtttaaagggtcatatggaaacctctgagcagacttctacattatatctagaacgtggtcacgtgtcatcgtgcctccttcctccccttacccccatgcagcagatccaatggcatcaggggaacagatgatgatagtttcaagaaaactagtgatagtgtcagaggctgaaagaagatacagccaacttgtactcagtttcatggctgcccattttacaggcctttctccccaccttttcaaagaaaatgagtagcataaaacagaaaattaaaacttaaagttggctttgatgtgccctggatgatctaagtagagaaaagaagggaagttacctagatactttatttatttatttagagatggagtctcgctctgttacccaggctggagcgcagtgacacaatctcgggttactgcaacctccgccccctaggttcaagcaattctcctgcctcagcctcccaagtagctcagattacagtcatgcaccaccacacctggctgattttttggtatttttagtaaagatggattttgccatgttggccaggctggtctcaaactcctgacctcaggtgattcacccacctcagcctctcaaagtgctgggattacaggtgtgagccactgcgccaggcctatggcctacctaggtactttaatttgaatatttccaggcccctctcttgaaattctttatagataaaagatagggtggggatgggaggcaagtcctcctcccgactcttattgactaagaaaatgttgagtctgtcttctaaaaaggtttatgtgagtgttattggaatctctggattttggttgattgtttgaaaattgaagtattaaagccactacctaactcagggcccactatcattgttttcctgtgaacaagtggagtctgcgcctcttctcccaccccaccagccaaagtccatgtgcaaatctactgagtcactgacaagagaatgtcagggctaaagctttttatgtaattgcttttggagaacttcgtagggttggaattatttgacagataacagaatatagtgtaaaaaccatgttaggaagccagcagaagaaagctgagagaagttccccagctgccattggccagggagaatttagcgacggcctggataacactcctgaggtctagggtccgcccatacctgctgtgcaaatgagaaggttggcagatcctacctggacagcacctgtccccagctgagaagagacatctgcctgtgggtttaactaactctgcccctccccatgtggcccagtggctgacactgtctctgtggctcctgaaaagaagtggcccagcctcaaaacacattgactcaatgccacagaaattacatagcacatgggctgttagcactttcatacttcctccttgtttcttatttagtattctagatgcagctgagtgccagactagtccctagggcagcagagaaagcctggactggcagtcaggaggcatgggttctaatataccttcaactttaaacttgtcatgtgtcacagtggcttttaatctcactggctctcagttttctaatctgtgaaatgaagtattcttgggccaggtgggctccacatctctttcagttattagatcctatggttatagaaaactagattctcttttgtcgttgttttttgagacaaggttttgctctgttgccgaggctaaagcgcaggctgcactgcagcctcgacctccctggatcaagccatcctcccacgtcagcttcctgagtagcttggactacaggcatgtaccaccacacctggctaatgtctgtattttttatagagacagggtttgccttgttgcctcggctggtctcaaactcctaggctcaagcaatcttcgcaccttggccttccaaagtgctgggattacaggcatgaaccaccacgcctagcctgaaaactagattcttaactctgctatcatcattgccattcttgaaccacagagtgctttaatgagcttcattaagtacagagaggatatgtcacaaagacattttgttatttagctgaattttgataccagtcaattttaataccacatgatagtggtcctgtggtgtctccttcaaagtaataaaataagtaacattgataaatgtcatttagtcatggtttagttaacctggctgtcaggttaaggcaaggtttctcagctgtggcattattgacattctgggctggataattatttgctgtggggcgagggggctggtagtctgtccggtacattgtagaatgttgtttagcagtgtccctacccactagatgccagtatcacagcaccctcctcctcccccaagttgtgacaatcaaaagtgtctccagatgttgccaaatgtcacccaaagggaaaaactgccctcagttgagaacaactaggttaagccatgaccaggttaggccagggttaactacatagatttgatttgttaccaactgaaaacactagttagccccagagcaatagcaccatctatttaattcaagttagaacaatctaacctcattctaaaatctcaacagaaacaatccctttaatctatcatgttacagtgcatcgcaggcaatggaatctactgcattttgagtcttttggaaataggcagtatcatctttgtcttggtattcttaccgtgcacaaagtaaacgcttagcaaattattgaaagaataaacaacttgctccaaaacaccagagaagtgcagaatgaggagctgccatgctcaggcagtcattctgcatgattcttattctacaggaggaaatgaagcaagtgtttgccagttggaagggtagaaggaatctttgggagggaggctgccattaccctagctgaagtgaagccaggttaaaaccctcttctggtttaaaaaaaaaaaaaaagccatggaacatttaatgacgagcctcagtacatcacagcccacgctgtacatcacccaggctccctagagggaaataagagtaaaagattcagttgctttacgtcttctgtattcctacattgacgtatattttggtggcatgggactgtggaatctcagatgtgcatctgccatgttaatctccctaacatgggagtcctactggtttttctgatgtgcctgaagagtaagactttaagttgcatttgaaatgtttcactcagttgtcctgacaagataattttctcagaatacacagaaaccacctgtatttgtcactatagatgctagtactgcattgagtttgttttcatgcttgttgttttataggtattatatgaatcactgaatgcaagcattaggtctgattcatgaggttcgtggatttcatctgatattattttgtaatcattaagttccgaaatgaacaaagttgatttactgtgagagtgttcgcctcttagctgggtatttgtcatttaggaggaaatccaccagactagtgctgcaccgtatctttcagtcccctctccccatcctcactggggatgtcttagtttcaaaataggtctccccaagaggtccatttattgagtttgaatggcaagtgctttggaaacaccctgccttatcagcactctataaaatgttctcggttatagcatccttttgataatatagttaattaacaactgatgttacagagattttaattgtgagatcaaaattaagcaaagagcaatggaatagaaagagcacatttgtagggcttaccatctctgcacatgaaaccaaggctcaaaattaggattcaaagagaagtgtaactgttatttcagaaggtggattcatacagcaatgagtatcagtttcatcagcatgggtcatgaatacacattcctagagtcccagatttctatctagtgatacatactctatccttaaattaaaaaaaacaaaaatagatcaaaattttaaaacctggggtgagagaagaaagagacttaagagaatgagaatatgcctctgtttccatttactttccctctgtctgtgtctgtccaatcttccaccccaagaacaccaaggaaatcaatgttgtagacccagattgaatttaagatttttgaatggaaggaatgaaagcacttaggtgcattttctcttgttggaaactgattttaaaactttttattacttacgtttagggaaacatttggggttggttgcagaagggtataatatttatttatttctttgtttacaaattgaattttagtgcatatccctccttcttccaggaaggattttaagcttctaaataatacaaatcaattcagttcatttaaaaaatagtcctactcatagcaaatgttatccaaccataataaattgaatatttggctattgacagttgccctccttggcaaagcatgcaatatgtggtgtctcaccaaggaagctcagtgatgatctacttcccgtagtgaatgggctttggaacgaaatcaaaggatacattttagcagaagaaagaaagaaagagagagagagagagagagagagagagagagatagagagagagagaaagaaagaaagaaagagaaggaaaaagaaagaaaaataaagaaagaaagggaaaaactagcaggcactgaatcagtaccaagaaaaacaatccctcctctactttgaaaaagattcacattcagatgggcttggtcccatcagttagtcagaccagaaccaagtggtgagctcacttatcgtggacatgctgaaggaaacgtttcaatcgaaacccagagtagcaacatctgcctagcagaagcagtcactaaatgcagaaggcccttcccctggtaagttgagcttcacctttgtgagctctccagacacaaatatgctccttaagcatgatgctgttcgtattaagtcaggctggttggaatatgtcacagaaatgggagaactacccactgctagacctgccatcaccatttccacttggcttagtggttgacacatttggttaaccattttgttagcctctggttaaccacttatggtttgaaaaccttacagaagtgggaaaatttccatacacaatcttatgcatatgaaaacaaccgtataggatacaattccttccttatctaccacatcaaatccacaccaaatcttgctggcatatggtgaaaagaagaacccacttgataatacccctttggtgattaatttatctggaaactagggtggagtggacaattctccaaaaaaaggaattgagcttcttttgagtttggaatactttgactcaatcttgtattcacttctcttttggaatgattctgccttatcattatacatttataaataccagtgcccttggatcatgtacgttttctaccttcagctagagctgacttgctttctttcttgctactctcgcgcatcttccttctttctctctgtccttgtttctcaccttccttcttgccttccccatcttgctctttatcatctaccatctttcttttaaccaagaggctctccagctaagtaggtcacacccacaaagaaaagcaggaggttcaaattccttccctttactgactcctaagagatcacttaacatttcttcacaggaattttctatatctccaaaaggtagggaataatttttgtcgcctatttcatagcttaatatctgcaaggtactgatttagggcaagctactatatattattgtcagtccctggtgagcagttgcttaaaagaaatttggagtcagaaaagaaattgcttgagctggaaaagaagacagatcatgaaaatgatatcttaagcttgtaagaagataaatttttagagatgccattttcaattaataaatcaaccagaaagctttctatttggcatttttagaatggtactcagttgtgacaatgtgatttaaggagatggttccacactttcctcccaccacccccattacttgtgttgtaggcagtaaaaaagtagatttagatctctggttcattgaattgtacaccataaagacaatagaaatggagacgtaaaaagatagcttagcaagggccagtgattctaccgtcaaaaatgtgccaaataggatgggtgtggtggctcatgcctgtaatcccagcaccttggaaggctaaggcaggctgatcacttgaggccaggggttcgagaccagcctggtcaacatgatgaaatttcatctttactaaaaatacaaaaattagttggcatggttacaatcgcctgtaatcccagctacttgggaggctgaggcatgagacttgcttgaaactgggaggtggaggttgcagtgaggcaagatcacaccaccgcattccagcctggatgatagagcaagactctgtctcaaaaaaaaattgccaaataataagtgtcatatcacatggaaaaaaaaaaagcaaaactagagaaaactctgaaactagaagaaagtatagaaatgctcaatattttctaatacctgattattactgaaattttaacaatgtagttgagaaccagtatgatttggatgcgtatcagctcagaagaaagttgctcctcattttttggttggaaatgctgtgcactgtcatcttcttgggcataattcaaaagctcttcttaagcgtaactttctagacacacacacggccagattcttaatagattatgaatgactcttctttaaatgcctcgaatgtagacatgcaggggaaagaagaaaagattccgtattttttattctggcttccttgagcacagctttcttctccttggtgtggcttacctgaaatactgaagatcatgctgttatcagtgatgactggccttcatcctgtggccctcagagacttctacaggtctggctcagggagaccaggcagtggacaaatggcatcatggattctcagtgtgctcagagcccaggggctatttacaaatgtgctgtttgggtggtcaggtgactgctgggttgagtgccatatgacccagaccattcacaggcagacctcctctttagcaggatggtagaactgtcacagcaagttgatttggctattggtccgatgactttggaccactaatagcaagccaaaggaagtaaggcaggtgcttaagaatcagagagtattgcaatccctctctctctctcacttcccctaatccccaccaactcctcctccctctgaccactcctctcatatcggtggtgagtactgggagcccccacactttgaggtctcaggcaggggtgagattcagaggcaacagatggcaaggaggacccaaatacaccatcactattttcccaaggagaaaaagcaggactggacacccacagagcacattagacagcctcagatatggataccaagggacaagacaatctaaacttccatacagtcaacttaccctatcattagaaaaaccaggagacttcttactagaaaaagtttgaggccctgttggccagaacaccgaatgtctacgacagaggcccaatggtacacatcttgctatttcccaacaactggagggaagccagatgacagctgtctcgaggggtagacatgtgttgggagaaggttccatctccagtcccctgagggctttttagtcaaacttccagattccaaagtttaagcatcagttattgagatgccctctgggaatggagcaaaggacagtgtccatcaagcgagccgagcacagccgccctcccaagggcttgggggaggatctgctagagagctgggtgatgtggcagcgactggctgtcccgcccaagcagcacactgccaaatcctgcacctcctgcagcacacactgcaaaaggactgttgtcatgatggtcaccaagcacatacccaaggactactgtgcgttgaaaaggtgccatttgtgtagctagagttgctctctgtccagcttgcttgggatttggggatgtgtagcattgaagagaaatcactattcattgcacccctttttgccaaataattaggtcactcactcaggaaaggccctgtgatacatatgtggagtaaagtttgctgtgggaacttgaactctgaatttcctgacttctgtgcaattaaaatcccaaagttaatgctgcattagcatggattttccatggtgggttataaatgcaaagttctatgtttcatatgtatttttctaacatatgttactgcctgtgtttctgattaaaagttcatccaaaataaaataacaagggattacttttttccaatagaactttcttcttcgataaaagctggaaataagcccttacctaaagttacccaggtttgcaggtgctgagactttagaggtgagtagtgtttgttagcaagacaaagggcattattctccctgcaatcaccaacagaaagcgttctttctataaagaaaattataggccactgcttcaaagacattacatagttaggcactactactggagactttcaggcagcaggcaggctggcaatcaacaaatatttattctacttccattgtgcatttagtgactttaaaattcccagggaaactagcatataatattttctagggccaaattagtacctgaggtcatgacataatgcttaaggagctcggcagccggaaaggaacagcggatctctaatatctcacctgagtatggggacattgatggaataagaaaatcagacccccaaaaaggctttttaaaactgaacttgtcagggcatttcttccctttcgaactcctttaagagacacccagccttcattccctacatgtgcatacctgcacacacacacacacacactctgtcaccaccaccactgtctctgcccagaagttgaacccaactaaatggatcaattcatcagattttgttaaaaaactaatgaacactttttagaaatcatcaaacgtgccaagatgtatatatagggatgttcgtcccagtgttacagaggaaaaatagaaatagcatgcctgcccatcaattcagaattgggatactcccctagagaaaaatccaacactattagatatgatgtttagatctttggtgggggcaggcaggtgagggacctggacttgtatggctcacatcatggccctgcggagaacaggactctcactctcttgagttctctaatttagttttattgatacagctgaaaaatcacatcagctgttttgatgtgtgcattgcataatgatgctttgcgaagtcaaaatccccacacccttctgttacatatatgttagccccaagctatatctcctctaagctgctttggatagtagatgctttttgttttgtttttgttaaaccaagcataagatgttattctgattcctgctcaatttctcattagacaagatctttacggatactgattcttcatctggtgcgttaaacactctcgactagctttgtattatacacagttgatggctgtgacttctgcattttctctttggttctaagccagctggtagataatagaattgtaagaaaaggagggtaccagtatctggcagaggagccaaattctctgagaaaaatactaaaaccctggcattgactttggtcattgtagggcaaatatctttttggtcttcgttgtttcataatacagtgtttcgcataaggtggcatcataatgaatattagtaagtctcagatgaagtcaagagttctctatcagcccgctgtcagaagaaaagacattcttcttttgctttcttttttaaaatattgtttaaattgaggtagaatccacataaaataaaattaactgtttttctttctttttttttttttttgagacagtatcttgctctgttgcccaggctggagtgcagtggcatgatctcggctcactgcaacctccaccgcccggaattcaagcaattctcctgcctcagcctcccaagtagctgggattatgggcgcttgccaccacattccgctaatttttatatttttagtagagatggggtttcactatgttgacccgctagtctcaacctcctgacctcaagtgatctgcctgcctttacctcccaaagtgctgggattacaggtgtgaggcactgcactcagcccaaattaaccattttaaggtgtgcattttagtgccatttagtacattcgacgtgttgtgcaactatcatctttgtctagttccataatattttcattatctcaaaaggaaaccctggaaccattaagcagtgacttaatcctcccctcagcctccagcaataagtaatctgggttttttgtctctatgatttaagtatttctagatattttatgtaaatgtaatcatacaaaacatgaccttttgtgtctggcttgtttcatttagcataatgcttttgggattcatctatgttgtagaatatgtccgtgtttcattcctttgtacggacaaataatattccattgtgctttatttttcatcaaaagctgatattaacttcacccctacccacccactcctccctcatccacaaaacaactctactcagttccatcgactctgctgtatatctttatggtttacacagattctcatctcattatgtacccccatttcacagaagacgaatttgaagcttaaggtgatcaaccaaggtcctggagccaggctttaaaaccaagacttctcactctaagtcttctgttgtttttctgaagttctctgcaatgataacttttctttctttgttttagacattcacccaactcatttctccaatagatttctttacttagtaaacctcaacttggatcctttctctgatgaaatagggagtgaagaatcatgccctcctttgttaggtagatgaaggcacatggcgctaagtggtttacttctctaaggacctagagctgccttatgatggagctaagactagctctggctctcaggatagaagtttgttctgaaagctgctgaaatgcacagtctcttaaaatgctcaccctcctgctgaattataaaagacagccactgagtccaagagacgcagggaagtggtatctgcaataaaataattctataaatgtgcattcattaatttcttcattcagcaagaataaattaaaggctcactcttacagaactgtaattaatatatgatttagatattaatatggaaaaggctggcagggaaattgctaaaatttgtctctggggtttggctttttagacatcaaagtgcaatgtatcacctagcacttagtctgatcaagcaccaaattctttttcttgcttacattagatccgctgaaggtctacttttctgaaataccatccttactcatgagctaggatggtacttcatcctgtgatactcctggcatcatttcccaatggactagagtattgatttctaatacaactcctttgtgttatttactaattatatcctttctaatatcttcagttagtaagtttgaatgatgtaatgtgacaaatcataggaatatttatttttctaggtcttatggaatccttttcctcctgggtaatgtttccttccaacctggcggacttatttgaagttttattagcaaaccaaaatctaaatcagaatacttaaattgcggaaccatcaaagctgagttaccttatgaaagttttaaaaggaatagattttattccaagtgattaagccaagtatgatcttagttaatcccatgcacagcacggaactgttgtttttctgtctatcgccacatctccaagtttgaaagcatttggggatctaagctggccatttacagttgttaaattcagtggataagtatcaatttgggcttttttagtaattcagaaagaatttcagaaatctttgatacctagaggaagttggtaatcattgctattaaaagcaatgaagtgaaggcttcatgcagtgaaggcttttggtctcaaaccactgactggacccttcagaagcctgtgttgactgcttttgtggatcaactgtgtttggaaagtgaaaaaaaaaaggagaaattacagtaatgctttggagaggccacagaggccaattattttgtatttggaaggaaatatgaattcagattttgtcatatttgtatgtagagagcctcttacttctgtggtcaacccagaaacactacattttgatactttcacattttttttctggagcaaaaaccaacagccatttataattaaaacctttctggaaagaatactccaaccttcctcactctcactcaattgaatttcaattaacatttaataattcggctcggctttcagagtctataaagcataagcagtcagccttgttgaagatggagaagcgatgttttcacagttccacaaatgtttctaattggcatgaaccacttgctaatgggagataaattgcccagggtgggtgtgggtgggtgtgctgcgtgtgtgcacactcacgcaggcacacaagcatgcacgctcgtggcagtaatgacgtgtgggtgtacccaggcttcactcgacatgccaatgatgcaaacttgagctaaacgggaaattaaagagggaccagggctgggccatgacagcagcggccacactcggatgggaggaggcgaatagttggttccttaccaagaacccggcagcaggcccaccctcccgtcgcggatagtggacaggagctgagaaaatacatggaccaaatgaaaatgactccttttgactgaaactacctgtgcgtcaggcttctcgccgcctcccctaattttctctgatataaatgaacatggtagaagatgacagaaagtcgacaagaatcatttttctttctttcttgcagtcatgtcagtaatagccctgggttttatagctgaaaaatatatgtttatttgctcattaattttcctctctctcccttgccttttcttggcattaggtggaatgttatttaaaacaagacacagtccagcttcaaaaagaaaaatcattctgcaaaatacagcttagacccatttactggtcatttatcatccctaagagagtggagtagaaatttctatatttgggagatttgaatgatttacagtgcaactgtgactcttgttggcaccaggatccagggacgcagtaggttccttaggacttcgaagagtgtcccacactgtttcgaaatgacatggagaatattcactgtggcacatgcagagcagcttgataatcacttatcttcactgcattccttcaaatatgacacaggctgctgctcagagggtagactcaacccagaggcctatcattttctgaggggtgatcaaaagtcttcatctccacatctaagtgtgtatttcttctctctggtgttttaaaaagcttggttttatgcatcttccacttccttcaaatagtgggcaaataacaatgtgcctattatggtacctggcacatagttgaagcccaataaacatttgttgagtaaataaatagttaagtagaatgttaaaagcattgctagcattattgtcttggccttaacagtgcaagaatagacttgaggcaatcaagtaatttcccttaacagtataagctaattatttgagagatgaagatctggtgcatcgtatttatttgtcaggttccatttgctcctaattaaaggtggaaaagttgtttgtagctttgaagggatggcacaatgacccactcctacatagatttttttattttccttgccacgttttcaaggaaaatacatcaagataaaattaacaggcattcctcttacttacttctgttttcttttctctgttactgttttctagagggcaggcagggtgtggagcagtaaactgttttgactgtacttttacagcccatctgcctacatgacttctgtagttgattctgctaaccttggttgactaataaaatcatcctcccacataaataccagctacagtgatccaagattaaaatgctgcatttatcataagcctcagaaagtttaattcattcattccttcattcattccacaaatatgaattcagtgtatcatatgtatcaggctctgtgctaaagctgtgtatttaacactgagcaaactctaacatggtttctgctctaagcttacaatctgagatggttgatgaatattaattaaataatcatactcaaattatatcgctacaaactaaactattttttaaaagaaatatggttctactaggaccatataacaacaggaactgatttacactaggagaccagggagaagtttactaaggagaaggctggactgaagaaaggggatgtctgaagtacatctgaagaaagggaaagagcgtcctaggcaagaagattgtgaaacgcgaaggccccatgtctggagggtgcatgacgcgccctccagaaactgaaagttggccagtgtggctgggtgggaagagaaagggctgacgggaaggcaggcctacgccctgcagggaccacagctaggccatattaagggcttggaccttcatcccctgagcattagacagacttacaagggttaaagccaagggtgaggaagtagaggcagggagaagggatacatggcccttatcatgtctgtgttttggagtaggggaaatgtaagtgtcagttcttcacaaatacaacaagggagatgaagatgctgagccctggacaatcctttctttgctgcagatgaggttcctggaaattctttaccatccactctcccttccactaaatttcagaaagagtgcatccaggtccctagctgtgtgctgagtaacacttgcacgtggccattgctggaccattcggcaataacgtctcctcttgtcagctcttctagccccttctcgcgctttctgcttttccttttgatgatggggaggtggcaaaacacagttcatttctctctttggcaaagtgtgaatggcatggcttgtggcaccttctctcttggtttagagaacaggctttggagttagagtggctttgcctctcctttagccttacacggttgttctgaggattaggtagcttgatacttgtaaaacatatagaacaaggactggcacatagcatgtacttagttaatgttagccattattattacctatttttgcagatatagaaggctgtcaaagatatattgctaaagggacaaaaagcaagatacaaaactatgtattaaaacagcttgattttgtgcaaagcaaatgtctgaggatatgtggtggttacatctgaggaacaggactggggtttaggggagaaggctaggcaagtggcttttactttattatctaatatttttgtagtaattgattttttattataaaaagtatacttttatagtaatgaaattacaaggaatagtttagaaagtccatactttccatcatgtcatttttttaaaaaggcatgatgatttcaacataacctcttttcatattttttcatccttaaattcggaagtatcatccaaaaacttctcctgggggtaaagaaacatgtatctaaaacccagcaattccccagattttcatttctttgctgtgccatagtcaaataaaagtttttaaaattacatgctattttaattccacagttacaaaattattctagttattctttcatctctccatatacatatatagagttgtctggaatgctgttcacccaccagatataaacaacgcatttggcttcattgttgctgacttcattgcaaagcattgcttaaatttttataataagcatttttataaaaacaatgaaatcattgcttaaaattggagatgagaagtgttagttcacttttctgtttagaagtaaacatggccgggtgtggtggctcacgcctgtaatcccagctctttgggaggccgaggcaggtggatcacgaggtcaaaagatggagaccatcacagccaacatggtgaaaccctgtctctactaaaaatacaaaaattagctgggcatggtggcacacgcctgtagtcccagctactcaggaggctgaggcaggagaatcgcttgaacccgggaggcagaggttgcagtgagatcttgccactgcactccagcctggcgacacagcgagactccatctgaaaaaaaaaaaaaaaaaaaaaaaaaaaggaggaaacacagtacccagcatctaatctttcccagacatttaggatgctgaacttcttcaggattatgaaggtcagtagctgttgtgcagtatctgttgctcatgaaagaggtgagaagtagactatgtggctaccgaatcgggatgacaaaaatattttaaatgatgaccgcatattaacatacagtctaccatcctttcctcttgttttttatttattttttttcttagcaggtagaggctctttatgtttaattaaggattttgattaattgaattggtatttttcaatagtgtatgtaactggttgagaatcattaatattgtacagtgttagagcatagtagctttgatcgtcatttaaatacaactgtttccttgcccagcaattatacaccactatcatgaatcagataagaacacaaatctggaaagaacttgcagtcccctggtaaatacttcatgaaggcaatgggagcttgccaattagacaatcatctctgcataagatatatttccaacgagtaactgcattatacagtccttagcacattatgcccctcgggatatgatgataattgactgtgtcacagaagaaacaattttgaagaaactgggactaagctgattatcaactgaatctttagaacggggttagcaaatgatggcccaagggccaaatctggcccgctgcctaattttgtccagtgtatgagctaagaatggttttcaagttttaagtgactggggaaaaaaatcaaaagtagaataacatttctgacatgtaaaaattatatgaaattcagatttcctgtccctgaagttgtatcagaacatagcagattcattcatttatacattgtctgcagctgcttttgcaccacagtatcagagttgagtagttgtgacacagaagataagagaagaaaatactgactatctgactctttatagaaaaagtttgctgacccctcctttagactcaggtacaagttatttgtgtgcatgtctgcttatgaatggataatgcttttgtgttagaaatacatctggccagttgatgtggccatcaaaggaggtgcaatacttcatattcttctattttcctcactcccttctcaaagtcaaaagaaagctattgagtgagaaaaattaagagtattggaagggaccataagaaaaatcatggtaacagaaaagacctacacattacctccgaagcttgtaaattactaactctaattttaagccctaaaatcagattagctctctactttttaaaatttgaaattatttattctctgtgtctgagaaatattttgagaggcaagagcatttgttcttgtgactcttacaagatacagtggctggccgggcacggtggctcacgcctgtaatcccagcactttaggaggccgaggcagatggatcacgaggtcaggagttcaagaccagcctggccaagatgatgaaaccccatctctactaaaaatacaaaaattagctgggcatggtggcagatgcctgtaatcccagctactcagaaggctgaggcagagaattgcttgaagctgggaggcggaggttgcagtgagccgagatcgcaccactgcactccagcctgagtgacagagcaagactccatctcaaaaaaaaaaaaaaaaaaaaaaattaaatacagtagcacaccagatggagtctctttgttcagtgctatcaccatattgaatggtgctctttggtgtatgcttgcattcagttgtagatacgatataatgcatgattggataataggaaataccttttagtagaatgtatgattcttgataggatatcctgcccattggctttgacagttgaattaacctatttggctgacattgaccctcctactgaccacgatatataagaaaatatgaaattaatataaaagctatcttgtactggtagcaagatagctactggtaggaaacattaacaatagcatcgtaaaatatagaattgaaaatgtgagtcattttgcttttaaatctctatcatgtacatgactgacttcagttgttctctctcctcccttttgttctgtttcagaggttgaaggctgcattgactcaccaccctgctgccatgtcaaatgggaacatgaacaccatgggacacatgatggagatgatgggctcccggcaggaccagacgccacaccatcacatgcactcgcacccgcatcagcaccagacactgccaccccatcacccttacccacaccagcaccagcacccagcacaccatcctcaccctcaaccccatcaccagcagaaccatccacatcaccactcccattcccaccttcatgcacacccagcacatcaccagacctcgccacatccgcccctgcacaccggcaaccaagcacaggtagaccttttccgtgatctctttccccttcttattctccttcttaacagtgcaagctctaatgctggggtcatttgcagcaatcttgtttgacaagcccaggtgttctatctcacattctaggggctctgtttatctcctaggaggcaagccttacccataagaccctaccagatcataatttctataaataatacactaaaaaatatcaggtctagtctctaagggcaagcataaactttaagttctccaaaatctatttttgcagtgtgtcagaaagttagcccctctcaaaagtaatatgaatcaatggattaggaagaacttaagcttgtgaagaaagatgtgaattaagaatgagaaaaacgagttaattctaaccctggttctagctgctatgttttaaaacatcatagagactcaattttgtcacctgtaaaatggaagttaaatacaacaggcaatcttctgagtaacagtgaatgttaaaaatctaaagagtaacaattcaaggcagacaaagaagctccatcatggatgctagggcgtaaggtgctgtgtaaatggtgaagagaggtgactcatccccctgaatgagaaatgcgttggagggaacagaaagagagccaagttctgtagatgatcagaccaagagaaaggccaaatcccagtgggtgagagtcaccaggagtggctgcaaagaaagccagcatttagacaaaactgaaagagggttgggggaccaggcagacattatgtcacccacggccaagaagagaggcgagtcctgtactggagtgagttttagtaagtggatgaagggcatgtccaggagcatggctgggcctagacactttggatcctcaagcagaatgactttcatccataccttccacccagtccacactgccagcttccaaccagctgaatcagaagggtgtcggaagcatggaaccgccaaaaaacacttattcactgtctcctctgtcatctgcctctggagacgtgactttatacccggcagctttttgaactcttgagcccccctccattaacatgcaccaaacctggacagccatccacagaatgggtcaggcacaagcaactctcgaagctattcattagataaactgtcttttgcaaggttcttagaggtgttctacattgtgaataagaattgagcattagaatgagataaccttaatttttttcctgccttcctcactgtgtgattgtgaacagaaacaacctctctacccctcagttttcccatctgtaaaatggggctgggtaatagtagactaaactcctaggctcttatgagtattaaataagagaatctctgtaaagcccttgacacagtgttcaaaatatgttattccaaaccagtagaagtttagcaaattgtatagcaatcaaatgctatccagagaacatttttagtcacatttttagtcaaacgccatactagaacatgtatttagaaagaaaaaaaaaaactacaaagtcaatgatgggcaaattgattcacatttgtacttagtttataaggaaacgagaacatcaaggtttggttgcctttatgggcaagttatttcacagagcaagttatataacaattctttgaatataaaagccattcactagctaattaccaattagccaattgccctctgtttcaagtcagtaagtggccaatagtatatgcaattagttaattgctattataattagctttatgaacagttgctttttttaattgtatgctaaaaagaaagagcccaggttggtcttgctaaaatttgaaccagatcatttaggcagtatcccaaaataccactcttaaattgtattaacttggctgattactgagatcttgccattttgcttaattgtatgattatctgaaagtaggaatagaatcctttgaactctgagattctaaggtgatttggaataaaatctgcctttttgaaattataatttattacttttgatcaaaattttcagagcatctatgccaagagaattctgctttaaaaataaaattacaagcgacaataattaccaggtatacaaattctggttttagggttgtatttgcattttctcctggcttcttgtgctcctcctgcatgtaaggatgtgattgtagagtgctggtttcaaggaatttctcttaatcaatcctgaacctaattacacctgaaaccacgtcacttatgcctttgggtgaaggcacaggaaaagtatcatgggttacaggttgattaaacttagggtaggaggatacagaattgaaagataagtccctgcaatggagattaaaaatcaattttttcctatttgagggttttgtctggggctggcaataagagattataattcacaaaaggaaacagttaaaggcaaaaatatccgagcagttagcacattccctcttaatgcttttctttgcagtagttagctcaggaattagcatctggaatgacaagtgctaagcccctgccaataacaaggatgacgccttcactagcaactctgatgagtaagaccttagacagttaatttattttgttattcctctataatcgggaggaaaagagtcaccaacaaacaaacagttctagaaaatgtctttgctggcctggtgcggtggctcacgcctgtaatctcagcactttgggaggctgaggcgggtggatcacgaggtcaggagttcaagacctgcctggccaagatggtgaaaccctgtgtctactaaaaaactacaaaaattagccaggcatggtggcaggcacctgtaatcccagctacttgggaggctgaggcaggagaatcgcttgaacctgggcagcaaaggttgcagtgaaccgaaatcgcgccactgcactccaggctgggcgacagagagagactccgtctcaagaaaaaaagaaaatgtctttgctttgcataaaattactaagatgcagttcaacctcaaccctgggcctgattcttttacagttagtcatagatggtttgatagagttttggattaaaatacatcaccatcagtcaactgatgtcaaccagtagccattattagtgcaattacagtcattctgattgatttcaatcatagtgctgcaatgtggtagaaaagattgttgagcttcatttttaaaacttttggcctgttatttctgcaggttaaatgtctcttgtaaaacaactttataggtattaccgtcataaacctgagtgactaagaaatgggagaggaaaaaaaaaaacaccttttattgagaatgaagaaggaggaaggagtgaagtgcatgagggaaagcattaggtgtccagacatataaagaaaagagtcaggtgtagaaatttcacaaggtgctgtgtgtctgccttatgaatagaaataaagctctatgtgtgggggtctccaagccttagatgttgctgagtcccacacagaccttgcaaggactctataagcatagtaaaactttttaataaagtgctttgccactcaggatttccttctaatgtaactgtatggtaatgcacaagcaactctcactatctcacacacacacagtgtgacagggctcagtgctgcttcaggcatcaatttaatgctttcaaaggcccagcttcccaatcacctagaaagctctcctggatctcctttcaccctggtgagcgctctgaggggcaggcaggcccggctggagtatgcaggtccagctagtcctctgcattaagaactgtgtaatagtcaaaataggatttcatctgctttcctggcttcatgggcttcttttcataggagtcacagtggcaacgatgtcccagaggtatgttaggaacacaattttaccactattagaatgaaaggagcccacaacctgctcagaggttttctgtagatgacagatgagtcatccatattgtgataataaccctgacctttctgttttcaccctgtagccatacattggctattttaaagttgttcatttgtttttgtttttgttttagagacaaggtcttgctctgttgcccaggctggagtgcagtggcacgatcatagctcatggcaacctcaacctcctgggctcaagcaagcctcccacctcagcctcctgagtagctaggactacaggcatgcgccaccatgcctggccaatttttcctttttttttttttttttttttttttttttgtagagacagggtcttgctatgttacctaggctggtctcaaactcctggcctcaagtgatcctcccgccacacctggcccttactttaaagtttttaaacacaccgtcagtaaaacatttttaatagttgaaggagaaaaataaatgtttcctctaccatgattcggccaaatgcctgtcagggaaaaatccatctgactacatcttttcacgagtcattcctatatcttgccaacacatcatagaatataggtcagtgatgcttttccttttctttcatgagtgtgatttcatcgtctgtttcattcataggaggcaagtctcatatgctgactgaaacgatagactttctgtgctttgctttttaacatcagcttgggtttcttcccttacctaaccacgtccttccctatccccatcacctcctccctctctggcccagcaggtttcaccagcaacacaacagatgcagccaacccagacaatacagccaccccagcccacaggggggcgccggcgaagggtggtagacgaggatccggacgagaggcggcggaaatttctggaacggaaccgggcagctgccacccgctgcagacagaagaggaaggtctgggtgatgtcattggaaaagaaagcagaagaactcacccagacaaacatgcagcttcaggtgcagcccacggtgtctttccccgcgactcaaaggccctctgctccacgggcatttccggccctgacaggcacttgttgacctaagcagtgataccacacacttagtccacagaggagccgcagccccactcctcgagttttattaattccaggacaccctgcaaaacaaaattaaccattcagttttcaatcaatttgcccacaaagctctgagaaggggggacctaccccactaagttgtaggggtgggagaacaggctttaatccgacagagatccaaaccatggttcagcaattacttgctaggcttaactctctggctctcagtttcttcctctacagaatgggaataataactttatagagttgttacgttaggagcaataaacaaactaatgtctccaaagcagttgcccagtgcctggcccataacaaaccttcagctgaaaaggagcttttcattaattatattcactaggttgagggggttgccttggcttatacttgattatctctatttttgtttcatggaagaaagaaaggttgatggtcattatgtagctctgaaagaaaaggcatgttttcatctcatttgccaactcaccaagatttgaatcttgcttaatttttgctttttatgaatgtcttaactggggagattttataatgaggcccagaagtgtctgggagtgtctaagaggaaaggaaggaactctagtacccaggcttctccaatagactttatagattataatgatgcagttcagagcatttgttctaatgttaaaaatatgtgcactatttatcagcagaaaaaaaaaaaggcaagtaaatagacatgtatgcaacccacagtccagggatagcattaagagttgtggattatactccagtgcttccagaagctgagagaatggccaaagagagtggggcagggaggaaattaccctacatagtgagactgcattttaagagttcatggggtccgggcgcagtggcctacacctgtaatcccagcactctgggaggctgatcactttgggaggtggctggatcacttgaggtcaggagtttgagaccagcctggccaaggtgcagaaaccccgtctctactaaaaacacaaaaaaaaattgccaggtgtggtggtgcattcctgtagtcccagctactcaggaggctgaagcaggagaatggcttgaatgcaggagggagaggctgtagtgagccaagatcgcaccacggtactccagcctgggcaacagggtgagactgtctcaaaaaaataaataaaaagagttaatgactaggcattggtaggtcacttttatcttcttcccacacctagttctctgtgcatccttagaaaggaacagttagggtgccaaaccccaaagcctttgcatatccagtttcattaaatggagatggcttggggtttccagtgtacaaattgaaagtatataaggaaagcatgtgttgtatgagggcctgaatttcataatttatggatgttcatttttccccctaaatgtgtcattctttttgtgatagacatgatgagaaagaaactgggaaacatatagcagatgtgaggaaaataagataatgattcccccactaacttgtatgccgcgggaagattgggactgtctcttactactccctccgcccactatctatctatctgctgtttatagtgtagtgtctacactcagtaacttatttgttgaataaatgaatgggttcccctgtttatagtatagtgtctacactcagtaaccatttgttaaataaatgaatgaattcctcatagctggagtgtctaagaattggctgcttgaccacttggcaaggatgtgattgcagggagtcaagccaccagagaaatggctggactcaaccacctttaaagccacttgtagaatctgacaggcacagtagtatctgaaaaacttttaggtagaatgtggttaagcatttttcttttttgagacttgtctcaaaaaagacagacctcactccattgcccaggctggagggcagcttactgcaaccttgacctcctggactcaagtgttcctcccacctcagcctcccaaggtgcacaccgccatgcctggctaattttttttctctagagacaaggtcttattatcttgcccaggctggtctcaaactcccaggctcaagcaaccctcccacctcggcctacaaaagtgttgggattataggtgtgagccactatgcccagccaagcatttttaacattaataatcatattttaattttgatgtgtattgaaaaatataattagaagatcaaatctgcagtttcaaagatattagtaagaaggctaaatcattcaaaattgagttaatttgcacaaacatgttaagtaaataaaagttcttgtatatgtgaacctagtaaatattaccgcagtggttctgcaataactgaagtggggggaatcccaggaatttgccaccatctctgaggtctgcagaaggatgatgcaaacatgtaggttttctcaatcttggccctattgacttccgggcttgatcattctttgttgtgccctgtgcattgcaggctatttagcagcatccttggcctttacccactatatgtcaggagcacatcttccaactatgacaaccaaagagtctccagacattgccaaatgtcccctggtggtggttgggaagggaggttgggtggcaaagtcagccttagttgtaaaccactgcttagatgaaggagccaaaaatagccagctggcacatatcagctgccaaggctttaaatcagttttaactaaaatgagtctttgcagaattccttcagggtattgactgtgatcctaatgcatgcaaacatggaaggatcatagcagagagccaggaaagtaaagatgtccacagactttgaggccagaggtgttcgtgacttggcatatgcgtatttatgattgcttttacagaacatacaaggtaaatttacccttcgctagaccctaatgcactgattttttttcacatttctttagagccaaatggctaaggaaaaaaagaaactagaactctagctcccaaaaccagaaaaaaagatcctactgagttcatgtaacaggcaccaatatcttttggtagttaaaacagtacccaaaaaagggacagtctctgaacagactaaattgttgatattttccaaccactgctttgccttggagggacagaagccacaaccacccagtgttctctgtgaagctgagtgtcctgcatcaggccccgggatgctggagaggatgctgcagattccgctacctttgaatgaccctttccctctcactggacctttgtcaaaagaaaaaggtgtctctcttgaggctggaccagtgagccaaattttaagtaaacagaaatggaaggtgctaagcaaacaaactccagccaaatggaatatccaaggtctggatggccagctgccacttttgagttgttttccagcgtagaaccctctagttaggctgcagcatttcagattggaaaaaccagacctaagaaaacaaaatcaaactcccagacttcatttcctagtctcacaacacatctctgcccaagaggtcaaaaaaggtataggaattggggaaaatattagaaaccacctaatctgacattttgtggagaaagaaactgaggttagggaaatggggggtcttccctaatgtcacacaacaagtaggtggcagaatgaggactcagggaagtctcctgttgacctaacccacttctttgtgatcttctattttagaaactccgtaagccaaagaaatccatgttcttttttctgataccaagggactaagatcagctctaaattcatcgactgctgatgtggtactcagtagaacgtctgtgttcagtagaggatatggaaatcatctggtcacccatggaaataattgcttttcttttttagtgcaaagacacatggtctaagttgctgctgaaattttggacacatgagcccaggtctgggacttggcaagcgaataggccagatgggaactgttgcttgacaaattgaaagttctttgtttcagagtgaaccaaacctggtctcagctaatctaccaaaacaaaaaagctgggggagggtatattgtagagcccattttgataattatttttttggcacaaactactgcttacaccaaaaagcattgtggatttatcatataaataatgacatccccaaagctgaacactgcaaatgtagctattagggacttgttggagtgcttgctgaaagtatgtttttgtagtattgaatatctctgtggcgtgctgcttcatcccaaggcaaactatgggtttaaaaatagatcagtccaactggatcttacagtcgctaaacagctaactgctttagaggagcaaactcaaattcgtttagaaaaatgaaaaaatgaagagttgatttccaccagacaatcaatacatattattaataccttgtatttacaaaatacttttatattaagacctaaaactctgattataaccttcataggggaatacaaaatggtgattttcctcaatttataaagcaaggtaattcagagtaagaaaatgcctccagaaggcctggtttttatttccctactagacttccaggccacatttgatttcttgtatgcattttgaaacatttgctatctggttgttctcttccaaaatgaattcaaggtgattccacttacgttcccttgaaaagcgtttttacttaaaatatagtctagtatttgtgcatttcctacactaatcagtctttcactatggaatccttaagatgattatgcatgtgcacagcacacaattcattcttctttctctaggatagtgattcttgacctttcttaagccaaaggccccttatgaaatataatgaaggctccgtagatgctctctcagtaatatggacacataaatggacatagaaaattttgctctaaaatgaaactataaatgttgctttggaatctgccctactaagatttagaagcataagaggtgctagaactggctcccttatgaaagataagacctgaattataagcatatttgagcatattgaaagtagctaagtaatgaataaaagtcaagatggactctttcattggataattgggtaatttgctttctcaatagaaggtgacacagaattgcttgtagaataaaaaaaaattctttctggaaggaactttctggaagtagttcaaccatcgtgttttatacttggttggcatggcagcttgggaactcaaaccctattattctcaactctcaagtgagagttccttttcctactggatgctgccccatgaatttctatggcttatgtggttattaggcctttatttagtccttgcagcatcatagttatatgtatatggataaacaagaagctgattgcccttctctactgaggacattaattggtgttcattttcccacaataacatggctaaataagtattaacatgttacattaagaaatatgtcctgccaggcacagtggctcatgcctgtaatcccagcacttggggaggctgaggctggagaatcacttgaggccaggagttcaagagcagcctgggcaaaatagctacaccccatctttgcaaaacattttttaaaattaggtgggcattgtggcacatgtctctagtccctgctactcagaaggctgaggtgggaggattgcttgagcccaggaggtagaggctgcagtgaactatgatggtgccactgtagtccagcctggacgacatagcaagaccctgtctctataacaataaaaaagaaaaaaagaatatgttcatattcacatatatctttaaatgatggtcagttgtctcaatattctcagggttctgcatttttacagatcctcacaacactcaggcctttggtctctgtacttacaacatattgctttattaataaagtgttttgctgttcatagactaaatgccaccaaagtcatatactttgtatggggttttggtgataggccagggcaccacatgtgctgactagtgctctttttatagtaaaacagacttatgaaagcaaaaatttattgtgaaactgtttggggcatgccaaatatcataggcagttagctctttgctaactgtagaaacccagagaatagaattgagtgttttcttagggaaggggcaatgaacactttgtgcctgggagatcgaatgctgccaagaaagggtttcattgcccaggacatagtgggggaagaaatggagactaaattcaacctctccaagatggccacaggcaggggtgttttttcttccaaaagtataagaaagcaagagaacccagttttgtttttaatacttttcttgtttgttttctaggtagaaaagtgtggattcactagaaattagaacttgattccattttctaagatccattgtctacattatctgcagctgagagcttctactcagggggcaaggtgtctagcagtttcgatttcagaaaagtgttatttctgtagtctaaatgcaaataatatgacatttccttctgaagcaaatatatacgcacacacacacacacacacacacacacacataaacacatctctgtttcctttcttggtttttgtttggttgtttttttttaaccagagattgccttcatttgatggtctagaagtgactttcttttatatgtgctattttgagcagaaggagaactgagaaaaagaaggaaggccatctgaatttagataggtgtaaagtcaaagaggaagaagttagtgtttaaggctaaaataaattgtcctgtaagttatcccactgaccttggaattgacagggtcacttttggtttccacagagccccttatcaatcacattcatttggagttgggaggtacaatttgccttcttgtatgttctgagatgtaagagcaattttcttgtttgattaagtgatttattcatcattaaggctaatttcccaaatagtcatttttattttgtaaaaataaagtttggaagagaaagggaatgagatgagatttgtagatgagatttttattattttgtcattgttttattttattatttttgttattaatgttactcaatatgtggttgcttataatttatttcaccaagaaatttagaaatgggagatattccttaaaacagatttcaattttttttagcgcaacttctagaatcccaaacatactttcctaggtgataaatacatggctgaaaagccaagttcatattgaaagtgtaggtacaacttaatgacagcaatgttaatcgtccttttcggtgtgcatgcattttttaagtctcctacatgtgaggtataatgcctggcagccacaaataaaccttgaccaaagagaggatattattgatcacaatttttaagtggcttattcaagatagtgctacatttacgttcacttttatcaagtggaagcatctcggagctaccatctattttatgtttatatttgtagacaatgggtgccaagttcattattctacaaagctatgagcatgcctttgtgaattaatattaacagataaagtagagatccgaggcacttacatgagtaaataagaagaaaaccccacaccatccacaatatcctgatattgaggggggaaagagtattttatagaccgaaattgaccaaataatcaatgaactcaatcaaattaattcaatcatggcccaaaacttcattgcctccttgccaccctgagctgacatcatccacctgcagctgaccaacatgtgtactgtatgcttccatacctcctgctcagtgggcatcaggcaggtagatgtgctctgctcaacagtatcccatgaacagtaattgagtaggagatggtggggagagcagggattcatgactgaaggtcaatttattttcagatattctttttagattgagcaacacagacttcttttggaaaatctgatggtagatgagtcagcttattctgattgcatttcaggtggaagccacaaatcctaccacataattctgcccaatgtgcgcctcatattcacattctcaattggatgtaaacctgagcttgtgaaggttacaatagttaaatgtattaagtccttattatgtgctgggtattgttctgtttcccatctattactgtatttaatcctcatagtaacacaaataatgtactcttcttatccccatcttataacgaggttgctggagctcagctgggttatgtaatctacctagggtcacacagtcagtgtggagtaaggattctcacctggcttcggttcccatcacctaagggtgtggtctagccttttaataaggttcagctcttgagttaaaacctaagctctgcagaaagcccctgggaaatgtgagggccaaattaaaggtaagctacaaactttcaggtgaaccacattaaataatattcttaatgtcatttagacataatggaagagtttgccagttttgttgttgaaagtgcacagggctgtgggtttgtatcctctggtcttctcaacatggttttaatacatatctcttttagaatgaagtgtctatgttgaaaaatgaggtggcccagctgaaacagttgttgttaacacataaagactgcccaataacagccatgcagaaagaatcacaaggatatctaagtaagtcgccgactttttcacttttctttagtgtccaatattttttgccactaagtttgcactgaatttgattgaaagagcaaaagtaaagtgtagattgtacttccaggcagatatacaagaattcttgagtggcttccagactattcttccaaggggatcccttttttctgacccctgtgcaacaccatgcccaccacctcctgataatttctggccactccttccctagcatttcaaagtatcaaaagaaataccaaattccaattttgcagccagtaagaaaagagccagctgaagcccaagtaccagtggcctagcagtcgccttcagaaatctgtggtctgggaaccaggccttgggtgaatcatatccagtgcctccagaaacactgcatgttactcactgggctgaaaagctagtgactggcctcagtttaccaatatgtaaaatgatcccttccttcagaccccagtttctgcatctggaatgccagttggttaaatgatagttgagtagggatggtgggaggagcagggattcatggctgaaggtcaatttattttcaaataattttttagattgagcaacacagattctcccaccacatgtgagtatttttccacatttgatatacggatggctatttaaaaagacaaaatggggaagttcacatatccatgactgaaacacatcaaatcattttactgatacagaaagcatggctttgctcgtagatataaactggaaaggcatagcattgtgacaacagttgaaaataaagttttgaaattaactttcagaagaaaatgtgtgaaacttctatttcaagtaaatatctagtacagtttctctgaggagtccacaagtccatacaaaaaagacctatattggtgtgtgtgtatgtgtgtgtgttgtctttttttttctccctaggtccagagagtagccctcctgctagtcctgtcccagcttgctcccagcaacaagtcatccagcataataccatcactacttcctcatcggtcagcgaggtggtaggaagctccaccctcagccagctcaccactcacagaacagacctgaatccgattctttaaaatgcaccatcagacctggcctccaagaagagctgtagcgtaccatgcgtcctttcttttaagggcatttttagaattaactcagacctggaagactcctcagttcttcaaagactggctttcatttttatagttattatggaaatgttgtcttttatacttagttatataagaaaaaagggagttatgcaattaatatctatcagcttgggaaacgctttggtgcttttctccagttttctggtaccagttacttgtttataaactgaaccttttctgtatatagccatggtttcattcttatcagtccaaccctttgcctgaaacattgaatcttgttaaaccacagcttttagctaaaatgaggtatacctagatgtcaagtaagacagatccaaggtaactgggtaggaaatcttttgacatcttaactcatgttgagtttgtgctgtggtgtcaccagaattccagataaacacacagcctttcccatacctttttttttcttactataaaatattataagatccattgatgtccaaataataccaccaagcatctcttcacctctcctcctcttggtccacttgctaatgcccagttttcttctccatttccactttttcttaggctccctatttactattcattttgacttccttctgttttatttttttccctttagcattgcatgtgaataagaaaataatgtttaaagaaaaaaaaaaaaaagcaaacctccaaaacgtggacctaaccattgcttcacttacacttcacccacagctggagttcattcaactcttgcttttcacaaaatagtaaccaggagatgtttaatgtgcctgatttaatgtttttaataatcacagcaaatgaaaggtggtttagttataagtgaagcatggttgaataccagctggggagacactagggaagggagctttgtaagccttgattgcgaaagtccaaattttgatgtggggctataacatgacacccttggattgcgactggttttatacggcctgcctataacgttgaaaatccatgtactacataataattcagaagggctctattcactacacagattacattgttcaatcatcagctgctaatagcctaagatttatttttttttttttcttaagcctatggaaccggctttgctgttctggggggtgaaaatagactaactactggagaaacaaagagagaaagaaaacccagtgtttccataggggcacttttagccttcccacaacagttaagcactctttgactgctgaaggaaccccatggatgaggtgcaggctacttcactctttttttttcttttttgagacagagtctcacctattgcccagactgaagtgcagtggtgcgatcatggatcactgcagcagcatcctccgagttcaagctatccttccacctccgcctcctgagtagctgggaccacaggttcacataaccatgcctggctaatttatttttacttttattttaaaataaaagatgaggtctgtcttatgttgcccaggctggtctcaaactatcctacttcttcctcccaaagtgttgggattataggtgtgagccactgcacccagcctacttcactcttctgaattattctgatttattttcaacaacttttgtgaacttgcccgtgatacaaagcagatagtccctgaaccacagtcgtgcctccttgaaacaagccattctactgtgctaatgttttaatatcacatctcacaaataacaggggtgaatgtttctctctagcaatctaggcaggtgctggtgtttcatctccatttgaatgcttgacctcttaatgtgtgtgtgtgtgtgtgtgtgtgtgtgtgtgttcatgggttttaaaagaacagtattttacaaaaggtgtagcttttataagagtgcagaaaagggaaggatgtgtttttttctctcactatagtataagaatctattttggagaaaaaaagaaaatatgagggtctcgaagcatgatttttatataactagtttcagttttatctaataacttactttttaaatcaatatttatcaacaatctttccttgtatgcagtgctttcaaaagatggttttgagtgtccagtgaaacttatgacttggatatatggttgaagaatcaaaacaaaagcaaaaaaaaaaagcaaaaaaagaaaagagaaaaaaagaaaaaatgcaaatggaataattttctattatattttagacaaacatatcattttcgagtattttaaatactgaattcatagttgttgttttttaaattccaacagtaacagctgaatggtttaatctgactggcttcctaagaaatgtttaagactcagctttaaaaagaagttaacattcatatctctgttttgaaatcaaaaatcatatttcaaaattctttcctaggaccatctatgtgtctcccctcccctccacaaaaaggagaaagagtgcattaaaatgtttagttgggttttttaatttttaatttttatgttatgttttgctttgttttaagtaaacaaaaatttttctttctttactgcatgcatagcacttaataaaatggatttttaaaaaatccactagtaatatcagaatgtccagggagtgactgtcactacaatgatggtttagtttacttctgttccaccttttgattgaaatatttagttgttaggctgaaagcctcggcagttaagaacttgcctgagttttcttcgttcagcaacttgacagtttgactgatgtgcattatatatagctcaattatgtctgttttttatgctaagtaggaaaaccaaccacacacattagcaaaccggcctcaacatataattagaataaactgtcttcttgttctactcagggcctttaggtgtgttcattcacggtatggaaatacagtaaatgaaagattccaactagttgtcagtgcttcttgaaattccaaacagaaagatacattggtcaaatccaacacttggcttatcaatattaagtcttttacctaaaggcccagccgtcaccagacaacagaataatcaatctgcctgaaaatccctcctccttgtcctacactttttgcctgtttgggagaatatctttgtactccattctcctccctcagccagttactgggtcacccatccatgtgttcatgaatcaatcatcacggcctgcagagcacctgtcctaaggagggaaaatcctgtcacactgcctctccccattcgtgtgtggttttcttgatcggtgagatctgtctctgaagtcactgccagcctccctgggaacgtctatagtgcctcccctgccttatgtgatgggagttaacaactcagataagtacacctgagagcatttctatcaggtaaactgtcacttaaatggaggtgtccacatcttaattgtttctccttgacacatttctcaatccacgaagccaggagaggtagagtgaaaatcccagccatggatgaatgtactaatttgaaagccaagtgttaagtcggatgttttcccgttacactactactcagccctctcctgcggccacatcaacggatgcaagtcacagtcttaacacagcctgtgggagacaagcagtttgtgtgctcacagtatatattatagtaattagggtgacttagagcaaatactcttcagatcctatgtagtcagtgaaacaaaatggagagcgtattctgatagaaggacgtcgacggtgaatgttctggtggttgttgcctgttaagtaaactttagtgtgtaagttgagtttgtcattaaaatcataaaccagctgcggtaacagacaagcctttggctggggagttttaagcctcggtaactgctataaaactagccatccagttaggatagaatgtgtttctttctggttaaaaaaaggaaaaaccatctaagaaaatatatatgtatgtatgtgtgtatacagtggaattcaaaggaccaaagcaaaatttgaacaggaatctattaatttagaattttataagatatttattaataaatgttatttttaaacattccatttgaacagtattctgtaggatctacttgtttttaaagtgttagtccataataaactactatagttatgtgtattttcatttttcagggtttcaaatggctattctccatcatttggtggaaatgtttgcttagatctctgtgcatagacatttcaaggatttttattgctctgtgagttattttttaatcaacattctgaacagttttttttaaacatttatttctgtgtgttcatttttaaagtaagctctttcatttaggaagcagagttcagctaaagggaatcagtaactctaactggaacagctttcttgtagaagtgtaaaaacagcttcatctctgcctctctccaccccaccccaatttcctagaaagccttgcactattcagctcccttagtgctttttgtcccttcccgaacaatatgcagtagctttaagccattcaagctccattatgcagtatatctgagaagggaaaggaaacaacccatttaaatttgaataaaaccgtgcctatgcgaacagtagcaatttagaatctcttttctgcttttaaaataatttatatttaaaaattgcactttagctttttgatccctttgtatttctcttattctctttctaacctcttctctgtcctcaaacttgcctttgctctcctttacaataccccccacccctcctccaaggctctgagcggcatcatttaaaatactttacagatatttgcaccaggtacatttatgtgcgtccattggtagcacagctgagacctgtgtctcacatcagcctaggtgaagcctactacaagaatgccaaggagaagagccagtacactatatggtttatactctttatccctttattcatagcatgttttttaaaaatgttatattatgcaacagatgtgaggcagcagctaagctatacttaagaattttctctcaccttccaaaccaaagtgtcctgaataagccaggagacttattcttttgtgcaccctggtgcacatctgactgttgtcctagccatagactctctgaggccactgaaagaacagtggccctatcgatttcattcctaggtctcaaaaatacaatgttgccttgtaacataattagggacagcacctctatttcacaattataatctaaggtaggataagacgacacagcagcaataaacttacaagtaaaattcaataccaaaacaaacacaaagaaatttaaaaaacaaaaaacctagctcatcatgttgtgaaaatgaaaaagtgaatgtccattcaaaatattttactatttcttgtggagtttttcagtgatgtaatgcttgtagccaaattgcttaaagagtgtttatatatttttttccttataaattgtctattttttaaaaaagctatttaaccacagctgaagtggggggtaaggccaaattgccaacacttgttaaaagattaatactcttaagtggcactctgatacctttccaacttgtcatcagaaaggaatcaataattaccaactgttgtatttagaccaacttacaatatctagctcattagaagccaggatctagaaagctccttctaagccatttaagatattcttacattgagcttcatattatagaactttataggattggatattttacaatagaataatttagcctcaggactgagaatgtggaagctgaataaattagctttaaatacatcattaaaatcttatgcacaataagctcattagattctagttttctcctttagaataccaatgccacagacactacaggagataatgaaaggtatcagttgtgttgagtggagggagtttaagagaaaggacccttcccaaccagcagccagtagaaaatacaacctactcacctttttcccttctaagttctgctaaatcacatctgcctcatagagaaaggaatgttgcctttgagaactgtcttggagaacagataagcttgaaatgttctctctagagaggacatagggtttgggatcctctgaaaaggcccagaaaaatagctcagttcaaatacaatgttctaggacaattggaatataaatattgtccaaaaatataattaaaagaaaaaagtttagcactgtgtaaagtaagtgttaactgaggaagtcccaaaaaggtgctgtcactttaagttctggacttggggttctttgtatttgtaaacagcaaagcatttgtgtttgtttgtctatttgtaaagcaaccaccttccttattggaaggagaaaaaaaggggtacatacatgtaaatacttgctgcagcatttaatatgtttaattttgtgttaagctttttgttgcatcgtgaacacatttattgttaccaatggacaatgagttcattaagactgttcaactaggtcagatttttacatctctttctagcaagaagagacaagattttgtgcatttgtacaaatgttaatatcactgcaattccaatataataaagcactcaaatgcaaataatatatgtcacctttgtatgatgaaatttggggttgggggtaatgacatctattcctcacatagtcttgtcagaggcatgtgaaccagagcaactccatcttgaataggagctgggtaaaataaggctgagacctactgggctgcattcccagaaggttaaggcattctaagtcagtggatgagataggttggcccaagatacaggtcataaagacctttctgataaaacggtttgcagtaatgaagccagctaaatcccaccaaaaccaagatggtgacaagagtgacctctggtcgtcctcactgctacactcccaccagcgccatgacagtttacgaatgccatggcaacgacaggaagttaccctatatggtctaaaaaggggaggcatgaataatccaccccttgtttagcatatcatcaagaaataaccacaaaaacgggcaaccagcagccctcggggctgctctgtctatggagtagccattctttctttcctttactttcttaataaacttgctttcactttacggatttgccctgaattctttcttgcaggagctcaagaacccactcttggggtctggaccgggacccctttccgataacagtctcattcatgacttataaaccaaggcttaccttttcagggtcaccattatctagggacaaaaggagatcagattttctccttcccagaccagcactacattcccactgcctcttccatccaacttcccaactgaggtcactaatccagcatattcacagtgggttggccatacaacttaatttcactttaagtgagtttggaattagcagattttaacagtcaagaaataaaggcagcctaaggtcatgttccagccgtgtctaggaaccaagaatcacgtgctggcttctcggacaatcaaatcctggggttctttgcttgatctccagaggagtcccaagggtagtcttagtccttttatgtgttcctttagatattgcccttcctttcttcctcctcttgcttttatttctttttctttttttagtcattctccttttcctctaacactcgatatctgatccatcagcaagatcagaatccaaccatcatgtagcaccaatcttaaagttatgccctgaccaagccatcaacatctcccacctggattattacaataatcttctaactggcaaccagagggaggctttgaaaatggatgtcagaccacgtcccctcactgctaaaaactctgcaaggacttctcacttcattcaaatcaggtaaaagcaaaaattcttccaccacccactttaagttctgtaacaacccgacgtgacccacccccacctcattcattgcctgagctcatctcctatcatttctcttccctctccccctctccagcttcactaatgtctttgcaattccacaaacctcagaagcaccatccacctgagagccttttcacaacctgtgaagaatattcttcaccccaatatcagcatagctcactacctctagcatctccctatcagtaaagccttttcttagcttcctatacaaaattacatcacttgtctgccttgcccagactatcttttctatagtgtttagcaccacctaccataatttatatttgttgtttttgttgccaccacaagagcaaaggtatttcctattttgtttgaatttgtcactaagatctaaaacagtggacacacaatgggcacacaacaaacatttctggaatggatgacctgtccttttctatcttcctcctattctcagaacattccaacccttccacctgttccttcagccaaagcagctgttttgttttgttttgttttgtttttgagattgagtctcactctgctgcccaggttggagtgcagtggagcgatctcggctcaccacaacctctgcctcctggattcaagctattctcctgccttagcctcccaagtagctgggactacaggcacatgccaccatgcctggctaatttttgtatttttagtagaaacggggtttcactatgttgcaggctggtctcgaactcttgacctcgtcatgatccacccacctcagcttcctacagtgctgggattacaggcatgagccaccacgcccggccaaagcagctgtattttaaaaccagtaccaagacatgtcactggacacatggcagtgggagatgatatttgtaatcagtacagaaacaactgggggaaatgatcgctgttctaatggcgatcccatctgttacatttacatttagaccactcagtattctcatagttcccaggagagtctttctaatgcccattccacactcatttgcaatttcaaaagccattactattggttaaaaaaattgttatgatcctacatttgtacttcaaatgcagccaattctaatctctatcctacctctcatccctgtgtgtccctggagctttgtagtgttctttatcttacacttgctgatgtggctggtaactggttgatgactagatcacgttttacttttgcattacatattctcttatccaacaaaaataattttttatcaagtcaacctgccttgtgttttgagacctaagtatgtttattaagagactgtaaaaatttggagcaacgatgggccctctttttaaagtcattgaaaacaagccactttgataggcctgctcccatggcagtaatgttgattttatcaaaccagctataaaaattaggctgccaaagaatgtggggggaaagactaagtttaaatctataaagatagagtctggattcagacttgcatccttcagaagatatttctttttggcaactatagatggcttttcaaaatggctgaaaggatggataaattataacatctgaaaatagttgtctgttagctagtagacctagcaaaacattattattattgaaaattattatatttaaacccagaaataaagccatgaagcttttagtaaccataaagtttcatcttatatgttgtcaaatactgtatcttcaccaacattatatttccttgtacccaactggaggctgaatcatagcaattgtcatcaatcttctataaatctttttactacaatattactccaatatatagacccaacaggctataaaaggtctcccataagtcacttgcacttctactttcttggaaggagagctgcctacatgttcatttaaatgaatcaaataggaagattctagttcattcataacacgttcttatttttcaatactcttacagcaagaaaattgttccaaccatctaagattgattgttttattccatatacacagcacacatccttgatctactattattacatttgggttattctaaatagagcattctctgtttaagtctagtccaccaactttgatcttgattgattcacctcctagtcaaagtagatttgctttaagaaagagaaaccttatcaagtaggctcaaatgataggagatttcttataagggtataaggggtagctagtggagctcaaccaggcactgtggcaattataggaggcttccggaaggtcattaaatggctaatctcctggcttgtctttggctctgaggccacatggtttttcattctgctctgtgcctgcttctctctctgtgtaaattgatttgtacactcactcaactgcttctatgttggcccataatttcttctccaaaacaacagcgtcacctccacaccctagcatatctatgggcttccaattcaagcacccgaccaactcataatgcctccatctttctattccaatttcccaggagagagaatctgattggccatatcggatgaggcctgcatccctactccaatcagctatgtgtggggaagcagggttacatgctcctacttctggagacagcaggatttccagaaagggagtgaggagaaaatgattgctaaaaagaaataattggtggttctaaagctacctcataagaatctagtcactttccattaaaacctaccgagggattaaagtacggtgaggagactagcacaaaattagacatctagtaggtggtagcaaatgtttgttgaatgaatgaatggttaatgaattcttggtttttttgttttttggggaggttggtgatggagtttctctcttgtcgcccaggctgaagtgcagtggtgctatcttggctcactggatcctctgcctcccgagttcaagtgattctcatgcctcagcctcccaagtagctgggattacaggcgcccgccacaatacccagctaatttttgtatttttagtagagacaaggtttcaccatgttggccaggctggtctctagctcctgacctcaggttatctgcctgcctcagcctcccaaagtgttgggattactggcgtgagccaccactcctggccctactaattcttgttttattgaaagctttgaagtgaagcaaatagaatattcattgaagattagataagtaacttcacaaagttaaagattctgtgtatgtaatagcttagcttgtattccataaaatccaaaatataaaagttaaccatcagcaagagtgagattttattttgccatgttttataatgatttaccgctctcttactttaaactgattttatacatatgctttcccagaaagactactgctatgttgttcttataaactcataggtgactccaacgtgttagtgtttttaagaatgttggcgtaatgtctctctaggatggggtcaggaaacactcttgtcccaaaactccctccaagtattatattaactatcttaataaatctttgtgacaaggaaacaggacagttcccatcaataagcctccaagaaagcaatgagtattgctacaaagaagagtagaacaagcgcttaatgaagaatctaaaaacctggagtaagaactaatagttctgtattttaataccaaattatctattgatttcctatatgacctaaacaaacacaaatcttggttctttgtctcctttgtcagtataaacatactcagggtgaagtgggcataatttctatagtggttttctatggaactctgcccaataccacaactacctccttctctggagagtttctcttcccccaactccatccagctggcttctgcaagagattccataaccatgcctccaggcttatgttcttagtctaatactcagcccttagctcacaacggaatcatcaatcccagcaactagatattgggacagggaacctagagagttgggttttctttctggcaggtgagtccaaaagatataaaacttaggagctgccagaagccatgtttctgtcagggaaaggaactcagttgcaagagagagaggtcaagtcaacacagcagatacagaagaaagaggcagaaagagggttctggaaatgctcatttcctgtttaaatagttctttttatcaactctttgtttttttttgagagacaagctgccactctgttgctcaggctggaatgcagtgacatgatcatggtcactgtggcctcagcctcaagcagtcctcccgcctcagtctcaagtagctgggactacaggtgcaccgccatgcctggctaatttttcattttttaatttttttctttttttggtagatacagggtcttactgtgttacccaggatggtctcaaactcctgagctcaagcaatcctcccgctgtggcctcctaaagtgttgagattacagacatgagccatggagtccagccttgcttaagcaattcataatagctcactgcaaccacaaccctcctcaaagcaaggttttaccatcagatagcccgaggtccttctaataaatgcctccttttgcttacattagttcaggtgggtttctgtcacttagaagcaatagaggtctattcttaaagtgaccataagaagccaattgaagactatcttcggtccttcgagtctatgttacactgccataggagaagagatgtgaagttgcccaatcaacacaaggacatgcagctccatacatcagagtgttaccatacttgaagagaacatgccctagaggtggctccctggaccaacaagctgtatttattctagaatatccacacctatttcgcagacaatgagttaagttattcttcttaaggaatgtttgcaaaattagcattatacctgcctactttgatgaatggataaaggactccaaggtaatgcttttcattccctatgtgtccttaggcatataatataatggaaaaaaatgtatgaggaatacttttgactacaaatacaagacaatccaatttccagtggcttaaacaaacaggagcttactcttcctgcaaagtaggaaatctggagatagggcatttggcattgatttggaaactgtatcagcagctctgtggtgctattaacctttcagtgatgcttgtcatctcctaatggcatgatggctgttgaagctctacaacacacctccagtgaaggcagaagagaaggggaagaatcagtaccagacacatcctgttttgtcctcttttatcaataaaacaaagattttcctagaactactctcacccctggccagaatggggtaatttggccactctttgctttaaaaacaggcggaaatcatgggtaacaggcttattatgcttccttcaacccatgcttctcaactagtgtgctatgttgaggaaggcctatgggttacagttattccatgtaaaactgatctgctcatttcttgggatggctggagcctcctggcaggttgtttatggctataagcacactcttctagagctccttagaaggtggcctgagtaagtggcatccaatgacatcccctgtggtctcttcagatgacgagcacagggagaaacatctggtacttgttggccacatgggagcatgtcccacctgggcatgcactggggcagccagcttcagggcctgcagtgatgcgtggggacacgtggcctgtggtgccaccaaagaggtttctatagtgtccaaggaggagactgtaccaaccaaggtgtactcattagaggttggggatcagggaatttaaatgggggttctgggaggccaacctctgattgaccacctctgatttcagccttcacctgtgtcagaaacttttgtccatgtgcaattgatgtgttgttttagtagcatccaatctacctgcaggctgaggacacattctgcaaattagagcttcactgcaattttttaaagtagatacaaggtctcacaaagttgcccaggcaggtctcaaacttgtggcttcaagcaatcttcctacattggcctcccaaagtgctgggattacaggcatgagctagcgtgcccagcctcatcatgatttttaaacacttaacataaaaatttgactggatttgaaacacattatcacatgaaactttatatcacatttgtcaaggaatgttaaacattttaaaaataatttctactactacaaattttcaatggttataaatatggttctaactttttagccactgattttggtgagcaaaagtgcaataattatcaagaatttgaagaagtcataattaaaaatctgtatgagaaattatatttaaccatttcaagcctaaaagctgattaggaagcttttttttaatcagccatcttgagtttctcatttaaatatttagaaaatatttcatgtgaaattttatccaaattcaataattcatatatttcaaaatatttatatttatttttcctgttgtaattagatgatatgaagataatataataggttattttttttctccaaacctcatattgatatctccaaatccccccgtgccaggttagtagagagtactatgcaaatataatcattttctatgtggcaagtcataaaaaaaagtttggaaacactggctgagaccatccgccatccatccgtagaggctgggcatgtgacaatcccaaacacattgaggttcctttggcaaagaagatttagaaatggacggcagcccaacagcatctgccacaatgggttataagcgtccactccactgaattcagggcactgattaattgtgtatgcttttctcttcagctctcatttaaaggtatgtgaagactagacctcctgtataaagcaattaaatagagcttctccttgcatagccccttccaccagggatatgtcttggagaatggcccaattacaattaccttcaaaacaatgttacaaaataaatccattttcaaccaaattctttgccaaccataagccaaatgttctggctaaactgggagagctacgctctttcctgtttctttgccattttccagcctctgagaacagagattgtaagagcaaaacatctcatgcaaaaccatgctacctgcatcatggggacagctgagtcagctttgatcaccttaaattctgtattatttatggtcctcactttttgacctttggtgtaaattgccaagcatttatttagcactgactgtgtgctagaactatcaagggtacaaaggtgatttagacctactgctggcctaggatgcagggaaatgatgtactgaaactggacagacaaaaggccatgaatattggggtcttattctgggaaggtgatttgtctagtagggtagggtgtgagaaagagtgaagaaggaaacaagcaagatggtaaaggtccaaagaacttaaaactctgtattgtagacaacagacaacaggaagccaacagagattttaaggctgggaatagtttaacttttttttccaaactgatctgatatagctgattttggggatgtgtttgattttttgtttttttttaaccaaactgatctgggagtagtgtgaaaaagcaacatgtcatgtcacattataatgttttccagtttgcaaagtgctttcacacatccactttcaggtgttctttagttttcagctaattaatttgggcaggtaccaagaaagatacagctagatgaactgtcactctagtcaggcacatgctttcagagcaacaggtaagagtgtgaactctggcttcaaactacctgcatttggagcttggctttgccgctttctagctgtctgatcctgggcaaggtatttaaactctgtctcatttactaatatgcaaaatggggatattaatagcatctactgcatagaattgctcaaggattaataaaaaaatatatatatataaagcccttaaaatgatgcttagtctatagcaagttcttaaaatgttattacttgtgatattatttttaatctcagagttcatatagatattttagaaatagattacatacatacatattcatgtacatatacacatgcatatacacatacacactagccacatgatttcccccactagaatttagatccgtaggaagagagtaggttgccatactccagtgccagctacagtgaaatggtatagagtagccctcaataaatatttgttgaattaatgaactgtggatgagaccatgctatgcaaacctttttgtcttccttctgggcaatcgcagatggattatggttcctaagcccaccatatccaggtggcatcacatgacatgttatagccaatggagtctgctctggcccctaacacctctgcgagatgccccagactcacatcactcccctgataaggattttgcagaggattcagaggacccacagaaggacaaaggagcaccagatgaaaggtgcctggatccctgagtcactgaatgtaggagggatgcccaagagagctgaccaacatgttggagtttgtagaagcaagaagttaacttccattttgttaatccattaaggtttttgtttcttttgtttttaatagcagttaacctagtttgagtaatgcagaagatagggaaaaacatttactttcatgcttttttctagtataaataagcaataatagcaaagtcagatttaaaactggaaggaagcttcagagagcagctagttcaaatttctccttctaccatgaggaatcagaggcccaatgtggttaaatgactcagtcaaggtcacacaattgaaactggacaccaggcctcctgatttctaggccaatgttttgttttgttttgttttgttttgtctattggccccaggaattaaaagtattattgctttccaaattgagttcataaaaacaaaataagaatattgtcttttaaaataaaacagaaaagggaaagaaaatgacatttaactaaacctcaagtaaattaaaactggctgcagattgatttaattcattgaaataaaaatctcccaatattgtccaaatcacatggcctaatttgtctatttgggtaagcagcctgcctctcaaatcctgggaactttgaaatgggaggcccagttactacaacaatagtctaaatccaagctctgtgcactaagcattaatgatggaatgatggtacttaactccattgcacctggccagttcttgattaaatcaaatagcattaactaataaaagattaaaatatttagattcaaattagagagtttccaaaaacaatctcccaaagccacttagttttattcattttctaaacaattttaaagttcttccaaacagcaaagtagagtgcaaattcattaggaacaataaaaataaaaattggaaatgaacaatacattaaggaacattctttaaatgcacaaatcccacgagtcagtagaaagtataatggacctgaagtcagcacttccaggcctacatgctggttctatcattggctgtttaacctgcaaattaacctctcaaagcctcagttactgcatttgtaaaatcaggaaaacaatacatatctcatgagatgcctatgagacgttacatgaatgccagtgcagtgcttagaaaatgtttgttttgcaacagtgaggaaaagcctgcagattaagaaactcggacttcccccatgttagctacaaaacataatcactgagtatgttgactgtaggaaaatttcaaaaaagtcgacaatttcatggaagtagccagatctgtctttggctaacatggatgctgaaaacccaagctgaagggattcagaaaggatcaggaagaagacacttatctgtactcctgattcctgcaaggctattgtcaatacaccagcatcatttccttacttgttgaatcaccactctgtagaacactctgtcagtcttcacctaaataaatttcccttccatccaagtttttctgctggattatgaccaacttgataacctagtttagtatcctatgagtgccttaaatacagaggatgcttaatgaaaatttattagactgcccgctcagcagctcactgggattgaatatgcatctggcattgaaaagaattgaaattatacaaatgaaggtagctgacatattcatgtaaaaagaaccaccagatatcatccattccttgggctgggagctacttatccctgacacagtggtgattcagaggcagccatgggggtcactgcctgctttttcctaatcatcttcagggcccagaggcaaggggaaggttcagaaaactacagttgacttcaaaacccaaaactcagttaatgagatttatctgaaaaatgaaaacaaactaacaatttagcacaggagaaagaagcctgtctcagagagagatctgaaaaatagcaaagcagagcatttgctaaataatctccagctacaaactagcaagtgtcaggatcacttagatcaaggggagagaaacataaaacccctagcttagtatgtggcagtagttatacaagccgaccaaatatttgatgtcatggctgtaagataagaggataaagcaatgatcagaagaaattaatgtgatggtttaggacccaattctgcacaactgcactggtgcatgcccatgaagctggtcctggtggtcatggaccagcctcactggcatcacctaggagctggttagccatgcagagtctcaggccctgccccagacgtaatgtaccagaatctgcattttaataagaacccaggtcatccatgagcactttcaagtttgatatcctttagagtttctccatcaggtggccttggtttggaaaccttaattatacaaaggacgtagtagaaacaggaccgaagggcctaagaagaccacagatattcactgatgcggtacatgtttcatccactcataaacatactgcttctacagactcgttcttttaacattgctaatttaatataacccaacccccctctgatgccgagccgaagctggactgtactgctgccatctcggctcactgcaacctccctgcctgattctcctgcctcagcctgccgagtgcctgcgattgcaggcgcgcgccgccacgcctgactggttttcgtattttttgggtggagatggggtttcgctgtgttggccgggctggtctccagctcctaaccgcgagtgatccgccagcctcggcctcccgaggtgccgggattgcagacggagtctccttcactcagtgctcaatggtgcccaggctggagtgcattggcgtgatctcggctcgctacaacctccacctcccagccgcctgccttggcctcccaaagtgccgagattgcagcctctgcccggccgccaccccgtctgggaagtgaggagcgtctctgcctggccgcccatcgcctgggacgtgaggagcccctctgcctggctgcccagtctggaaagtgaggagcgtctctgcccggccgccatcccatctaggaagtgaggagcgtctctgcccggccgcccatcgtctgagatgtggggagcgcctctgccctgtcgccccgtccgggatgtgaggagcgtctctgcccggccgccccgtctgagaagtgaggagaccgtctgcccggccagccgccccgtccgggagggaggttggggggtcagccccccgcccggccagccgccccgtccgggaggtgaggggcgcctctgcccggccgcccctactgggaagtgaggagcccctctgcccggccaccaccccgtctgggaggtgtacccaacagctcattgagaacgggccatgatgacaatggcagttttgtggaatagaaaggggggaaaggtggggaaaagattgagaaatcggatggttgccgtgtctgtgtagaaagaggtagacatgggagacttttcattttgttctgtactaagaaaaattcttctgccttgggatcctgttgatctgtgaccttacccccaaccctgtgctctctgaaacatgtgctgtgtccactcagggttaaatggattaagggcggtgcaagatgtgctttgttaaacagacgcttgaaggcagcatgctcgttaagagtcatcaccactccctaatctcaagtacccagggacacaaacactgcggaaggccgcagggtcctctgcctaggaaaaccagagacctttgttcacttgtttatctgctgaccttccctccactattgtcctgtgaccctgccaaatccccctctgcgagaaacacccaagaatgatcaataaaaaaaaataataataaataaataaataaataaaaagaaaaaaaaaatttaatataacccatcaagaagacgaacagcaaagtagccaaggagctttcatagaaaaaactatgtagtaggcagtatctactattagttctaattcagcctttctctgctcctttttgactcctctcttcaacacttgcctcagaccttctttttacccagtaacactgcttggccctaacttatgcctctggtctccatcaggtagaaatattttacatgttgaatgcttactttaaattttctataaagtagcaactcattccattcataaacaaaactcataaatagaaatttcaacagtcaattcacctttcccttgggaaaagaatccaacatttcagcttgcatttgtctaccacttactctaattaaatacacctaagattctaagattgttgtaaaaagtctactttctggtagagatta

SEQ ID NO: 5663 - DNA, 516507 bp, Homo sapiens
  B1 gene - 32942414 - 33418920 of chr7; NCBI Entrez Gene ID: 27241; Build 35; sequence includes 20,000 bases upstream of initiation codon and 20,000 bases downstream of termination codon of the gene
cctccccgcgtcgggccccaagtcaggggctccgggtctcgggcccagccgccaggcgggctgctgcgggtgggtggggagcgccgcctagctggagccgaagcggggcgaggcgctagttgggagcctggaggttcccgcccggccacacccacctcaggtatactagcaacagtcacatagggatgagcagatgaaatgtattcataaaaaaatgttcaaattagccaggcgtggtggcgggcgccagtagtcccagctacttgggtggctgaggcaggagaattgcttgaacccaggaggcagaggttgcagtgagccgagatggtgcccctgcactccagtctgggcgaaaaagcgagattgtctctcagaaaaaaaaaaaaaaaagtgttcaaaaagtgaaatgtataaacatataattatgttcggtaatagtgtgcacccagctttataactgcggtcatctgatataccatgagagacaacctaactcttttgacaggatgggtcaccatgacgtcaccactgtgccagtcacccgaggagccaagatcctgagaaatttcatctttcacaaatgcagatgtacagaaaagacacttatttatttatcgaggaaatttctacatttttgcatatatgtagaatgcttacacagtcaccattgtaataatgagctttgattgagtcatatttgcaaaaaatgcataaaacaaatttgaactctctaaaagtctttatatagttgatgcctccagtattagaaatgatgttaagatgtaatacatagcatagtgaattgtaaaacataatgctgacaatttacaataatgaaaaagctaaaagagaaaatagaaaaacgaaagcaaactaaaaagaaaattcaacatagaaaaagtgtattgcagggatagattatgggcaattgcatggcgattgtccacatgaactgcccaacttttatgatgattaacatattttgaagtcttgcatcatgatgaatagcttttttttttttcttttaggacatggctctcctcgatgatacagtctcattaattttctatgtgatactgctctttccaaaattctttttaactttttaaagttttttattttgtagagacggggtctcgctatgctgcttaggctggccttgaactcctggcctcaagcaatcctcctgccatagcctcccaaaacactgggattacaggtgggaatcactgcacctgactatgaaattattttgtgatttgatattctctgacttctctttgtgctttctttctgttgtaccctcctgtccatgaacccctctgtttttcattttattcttctgccccctcctaagacaccagagattcattcttgaggccagtcaagcagccttggtgttggcccactggtggggcagctgcagttggtccttagtctgtgctactggacaggttttaaacctttcagaatggagcaactaaaaaaagaatagattttctcctgcttgtattgatcacccttcacagtgtaatcttgacaccattgttttgctgctaaggtgtatttttacaagctcttatcttaccagtgacctttccccactggggagatgaggagaggaaaaaagtaggagaagggaaagatcacatggctagattagagagtacaatgcaaaatctttctttttttcctacccaaaatacaagtcttcaaggaactctcatggtgaagtggaccctcaggcgtgcatgtctatggtcttctgcagcgcagtagaaacatgagaatccctttggtcatgcactaaaaacagctgttaaaattacttctagggccaggcatggtggcttgtgcctgttgtcctaggtatttgtggagcttaggtgggaggattgcatgaacccaggaggtggaggctacagtgagccatgatcgtgtcactgcactccagcctgagtgacagagtgagcccctgtctcaaaaaaagaaaaattatttctatccatcaatagttgctaaccagtaggatcggagggaaaattgcaacgtgctttactttaggcttgcaggtacgaaagactgagggaggaaggtcagacaccaaacttaattggtattctggggcaaatatttggcaactgagttgacatttctccttctcttccttgctaccagctttgattttgttcaggaatcatacaggaagctggttagagagtggaggcctcttcatgcctctctagaggtgagtcttgacttgtcttaagccagtcattagtaattttgttctcgtttccactgattgttttagcaatggacctgtggtgcaattttagccaatgaggtatgaggagaggtcggatggaggtggctttcagggtaaggttgtctttgctcttaataaatgatgcttgggagtgtcaaagatcccctttctgcctccagatgttgttgcctgcaacccccagaggatggcagaggacagaaggagacccctgggtccttggggatgtgatagagacatttgatcaaccagtcctggtgttgctacctatccatacttctcattctgggagatagtacatttctttattattgaagtgattttgagttgggtcttctattactcacagataaatatgattctttacatttatatagtgccatgcagatctccccctgcccccatatgttctcccagttgattttacagaaaccctatgggggcatgcaagacaatgtaagataaggaaattgaggctcagaaggagagtgtggccctgcaaccaaaatggtctgatttctagtccagagtttttcatcaaccctcatgaatttaggtgtgtgggaatagtgggagtgggagaatctcttggaaacccttggagaatctcttggtaaagaagaggataggaagctgctggaaacaaatttccctgatgtcccattggcctcaaatcggctcagatggacttttggggatgttttttcattcaatttatttatttaataattaaaaacaatacagatggggccctgctatgttgatgggggtgaggaggtatttttcctcagctggccttttccctcccctcccctccccttcccttcatttttttgagacagggtctcactctattggccaggctggagtgcagtggtacgatctctgctcactgcaacctccgcctcccaggttcaagggactctcgtgtctcagcctttcaggtagctgggaccacaggcgtgcgccaccacgctgggctaatttttgtatttttagcagagacggggtttcaccatgttggccaggctagtctcgaactcctgacctcaactgatctgactaaggctggtcatttctttagccatcctgtgtgtgccaagcaaaagttaacaactggcatagcttagcctccagggtttactgttctcaaaaccacagtagttttctgattcacaaaactgcctttatttcagactcaatgaaaggtggaaaccttttttttagggcctggccttagtggattacgttggattttaccattaacacttgaggttcctgtactgtctgaggggcatttgacagaacctggtttactgactttgattcagaccagtccttttttcagatccctttctccccgctcttccatgctgcttcccatgcccaccttggcctcagattttgctgttcctctcattgtgtccttctgtctgattttaccacattttctggtccctgcctctgcattctctcactgattgttatcttgtttttctctccctgccatctttctctctcatttcccctctttttcttattccgataacctttcattccttctagtccctgtctcacgtttgtgtgaaagttagttatacaaattgggtaatttttgtcatactcaagtaaaagagaatcaaggggtcaggggggaaaagcacttgtggtcacaggacctgctccaagaattaaattttccagaagcccagccgctaaaatggactgctgtaactctaagatcagttttacctggtagctgctgaaacggcctgccctggctctgcgactggttttaactgctgcagtcactcgtctatcagagcttgccggctcccaaaagcttgtttagtgccaatgagcttccttccttccttccttcctgcctccctccttctctccctctctccctccctttctctctcctttctttccttcctttcctttttttgacagagtctcactctgtcaccaggctggagtgcagtggcgcaatcttggctcactgcaacctctgcctcttgggttaaagtgattctcttgccccagcctcccgagtagctgggactacaggcgcgtgtcaccatgcccagctaatttttgtgttttttgtagagatggggttttaccatgttggccaggctggtcttgaactcctgacctcgtgatccgcctgcctcaggctcccaaagtgctgggattacagatgtgagccaccacgcccggcctgagatttctttcaaaacactacataacatttgtctttctttcttatttatttattttttaattatttatttatttttatttttttgagatggagtcttgctctgttgcccaggctggagtgcagtggcgcaatctcggctcactgcaagctctgcctcccaggttcacgccattctcctgcctcagcctcccgagtagctgggactacaggcgacccgctaccaagcccggctcattttctgtgtttttagtagggacggggtttcaccgtattagccagggtggtctggatctcctgacctcgtgatctgcccgcctcagcctcccaaagttctgggattacatgcatgagacaccatgcctggtcaacatttctctttctgataaaactttcaaccttctctttgttcatctcacataccaaagaccacctggtctatgtgtatgccccgaattgtgattattgcttccctaataaaacgttttaaccttagagattcatctgtctataatatttgacttaaacatacttggtgtcagaagcatggatccaaagctgccttgccttggggaaaatcccagcctctggactatgatgagatgtgcctacactcgaacccctggagcctcctgcttccctaagctgcctcttttccctttggtgagtctctctttgaccagacttctgactttggtcaaatggtgttttatttggaatttggttgaagagagccttccccgctttttttccgagaggcatctttcctcctctgtttgggagctctcctgctgggaggggtcatcatcttcctgtcagtctcagctgggaggtttaggtgtagggatttccccttatttggagaaggcggcttattgtccttcttggtaagtatgtattttattttctgtctgtgtggctttggtgtattcagtccttgtgttttaatttgtttttgtgcatttggcaataaaatgaatcatctagatcaatttagttagaaatgggaagtcagagtttcacagcatgccaaaatattatctgggactccagctggtaacatgttgaaacattatgggatcattcagacagtctattattcttcaaactaaactaagacaccagcaataaaatcatacacttcaaataatacttatatctcaattgatatcttgaggctcaaaaaattctcatgactcaaagattgcctttttataaaacactggcacaaaactggcagagactttttttttcaggatctttttctacaattgcttctatccttctctaaactaaactgtttcttccaaaactcctcagctattgtgacatactatttaagtaacaacacaagaaaaccaacagattcaaaagaaaatcattttgacccttgtgctgtttcttaagaacaaaagatggaattcccatataaaggaagtcttccctatactaaaaggaatggcaacatttttttttttaaaacctcagactggcaacgggtggcacatctcacacacctgtgtgagcacgcaatcatcatgaactacaaaaaggttgaggaatggcagcattctcatcttcaaggacaaataatatgctgtgcagaccttgttagaataactcttatcttttgggcctctgacataatccagtcacagtttcacagctaatttttatttgtccaatctggtaattgacttaaactgctctacgcaaaatttggttctccaccttcatattattacctatttaaaaagtcttaaaggttagccttatctgattttttcagaaacatgatttggatccaactgtcttttataaacttgtgagtccatatatatatatatatatatataatttttatttttaatttttgtgggcacataatatgtgttaatatttatggggtacatgttttgatacaggcatgcaaaacttaataattaaatcatggagaatggggtatccatacccataagcatttatcttttgtgttacaaactcttttaaagtgcacaaataagttgttattgactatactcaccatgttatggcgtcaaatggtaggtcttattcattttttctatttttttttgttttttatttttcttaccctttaactatctccaccacctcactgtgcttcccagcctctggtaaccttccctcctctctatatccatgagttctattgctttgatttttagatcctacaaataagtgagaacatgcgatgtttgtctttctgtgcctggcttatttcacttaacataatggtccccagttccatctatgttgttgcaaatgacaggatctcattcttcctttatggttgaatagtactccattgtgtatatgtaccacattttctttatccattcatctgttgatggacacttaggttacttccaaatcttggctattgcaaaccaacatgcaagtgcagatatctcttcgacatactgatttcgtctcttttgggtatatagccagcagtgggattgctggatcatatggtaactctatttttagtttcttgaagaacctccaaagtgttttccatagtggctatattaatttacatcccttccaacagtatatgagggttcccttttttcccacatcctcgccaacatttattattgcctgtcttttgagcataagccatttaactggggtgagatgatatctcattgtagttttgatttgcatttctctgatgatcatatgcctgattgccatttgcatgtcttctttttagaaatgtctattcaaatcttttgcccatttttaattggattattagattttttcctatagagttgtttgaactccttatatattctgcttattaatcccttgtcaaaagggtagtttgcaaatattttctccctttctgtgggttgtctcttcactttgttaattgtttccttctctgtgcagaagttttttttaacttaatgtgttcctgtttctccattttggctttggttgcctgtacttatgggagttaactcaagaaatttttgcccaatgtcctaggtatgttccccaatgttctgtgtagtagtttcatagtttgaggtcttagatttaagtctttaatctattttaatttgatttttgtatatggcaagagacaggagtctagtttcattcttctgcatatggatattcagtttaccaaacaccattcattaaagagatggtcttttccccagtatatgtttttgccacctttgtcgaaaatgagttcactgtgtatgagtttatttctgggttctctattctgttccattgtctgtgtgtctctgggccagtaccatgatgttttggttactatagctctgtaatttaatttgaagtcaggtaatgtgatttttccagttttgttcttcttgctctggatagctttggccattgtggtcttttgtggatccacgtaaattgtaggattgtttttctatctctgtaaagaattacattggtattttgatagggattgcattgattctgtagaatgctttgagtaatatgaacgtttaaacgatattgagtcttccaatacatgaatgtggaatatctttccattttttttctgtcctcttcaatttcttgcctcaatgttttatagttttctttttcttttctttttttcctttttctttctttctttcttttttttttttttttttttttttttttgagacagtcttgttctgtcgcccaggctggagtccagtgtcacaatctcggctcactgcaacctccacctcctggattcaagtgattctcctgcctcagcctcttaagtagctggaactgtaggcatacaccaccatgcctggttaatttttgtatttttagtagagatggggtttcaccatgttggccaggctgatctcaaactcctgacctcaggtgatccacttcccttggcctcccaaagtgatgggattacaggcataagccaccacgcctggcccatagttttcattgcagagatctttcactttgggtaagttaattcctaagtatttaattttatgtgtgctattataaatggaattcctttttgaatttatttttcagtgttcactgttggcatatagaaatcctactgatttttgtatgtcgattttgtatcttacaactttactgaatatatcagttctaatagtttttggtggagtgtttaggtttttccaaatataaggtcatatcatttgcaaacaagagtaatttgacttctttctttctaatttggatgccttttatttctttctcttgtctggttgctttatctaggactttcaatactatgttgaataatagtgggcatccttgctgttttccagataatagaggaaaggctttccatttttccccattcagtatgatactagctatgggtctgccgtatacggctttaattatgtttaggtatgtttcttccttgcctagttttttgagggtttttatcatgaatggatgttgaattttatcaaatgctttttcagcatcaattgaaatgatcatatggttcttgtccttcattctgttgatatgatgtatcacattgttttacttgcatatgttgaaccatccttgcatgctagggatgaatcccatttggtcgtgatgaatatcttttaatatattcttgaatttgatttgctagtattttgatgaggatttttacatcaatattcatcagatatattggcctgtagttttctttttttgatgtgtttttgtctggttatcatatcagggtactggcctcatagaatgagtttggaagtatttcctcctcctctatttttcagaataccttgagtaggattgttattatttcttccttaaatgtttggtagaattcagcagtgaagccactgggtcttgggcttttccttactgggagacttttttattatggcttaaatctcgttacttgttattggtctgtttaggttttggagttcttcatggttcaatcttgatagattgtatgtgtctagcaatttgtacatttcttctaggttttcctacttattggcatatatagttgctcacagtagccactaatgatctttttttttgcttttaaggagtggagagtttaataggcaagaaagaagggagaagaaagaagccccactaatgatcttttgaatttctgcagcatcagttgtaatgtcttgtttatcctctctgattttatttatttgggtctaatctcttttttctttttctttttctttttttttttttttgagacagtgtctcgctctgtctcccaggttgaagtgcagtagtgttatcttggctcactgctacctctgcctcccaggttcacgccattctcctgccccagcctcctgagtagctgggactacaggtgcctgccaccatgcccggctaattttttttttcgtatttttagtagagacggggtttcaccatgttagcgaggatggctctctttttttcttaatctggctaaaggattttcaatttcatttatctttttgaaaaaccaacttttcatttcattgattgcattgttttcttcatttcaaaatcatttatttctcctctaatctttattatttcttttcttctactaattttgggggtggtttgctcctgtttttctagttctttaagatgcatcattaggttttttatttgaagtttttctacttttttgatgtaggcactttttattgtaaacttccctcttagtactgcttttgctgtatcctataggttttggtatgctgtgttcccattttcatttgtttcaaaaaatttttcagtttccttcttaatttcttcattgacccactggtcattcaggagcatattggttaattttcatgtattcatctagtttccaaaattcctcattattattattattattgttattattattatttttttgagatggagtctcgctctgtcacccaggctggatggagtgcagtggagtgatctctgctcactgcaagctccgcctcctggattcatgcctttctcctgcctcagcctcccaagtagctgggactacaggtgcctgccaccacacccggctaattttttgtatttttagtagagacagggtttcactgtgttaaccaggacggtcttgatcttctgactttgtgatccgcccgccttggcctcccaaagtgctgggattacaggtgtgagccaccacacccagcctcctcattactgatttctagttttattccattgtgttgagagaagatatttgatacattttcaattttttgaaatgttttaagacttgttttgtggtttaacatgtggtctatgcttgaaaataatccttatgttgaggaggagaatgtgtattctggagctattggatgaaatgttctgtaggtatctgttaggttcatttgtctgtagtgcagattaagtacaatgtttctttgttggctttctgtctggatgatctgtctaatgctaaaagtggggtgttgatgtctccagctgttatttttggggaatctacctctctttttagctctaatatttgctttatatatctgggtgctccagtgtggggcatatatatatttacaaattattatatcctcttgtcaaatttacccctgtatcattatatgatgaacttctttttcttttttaatagtttttgttttgaaatctattttgtctgatatataaatctattttgtctaatgtaatagacaaaatagtatagctactcttgtttttttttggtttccattggcgtggaatatctttttccctatcttaattttcagtcttcgtgtgtctttacaggtgaagactatttcctgtaggcaacagatcaatgtatcttgattttttaatccattcagccactctatatcttttgattggagagtttagtacatttacattcaatgttacttttttctacttctttcccaatatttgtacaatgttatgattgataagtgataagttactgctgccattttgtcatttgttttctggttgttttatgatcttttcttccatctttctctctttcttgtattacttttagtaggtatctttgatctttgggagttcgaatattaaatgccttgaagtagtcttctttgggttaaatctacttggtgttctataatcttcttgtacttgatattgttatctttctctaggtttgggaagttctttgttattatccctttaataagctctctacccctgtccctctgtctacctcttctttaaggccaataactcttaaatttgctcttttgaggccattttctggattctgtaggcgtcctttttttttcttttctctcactgactgtattttcaaatagcctgtcttcaagctcactaattctttcttctgcttgatcaattctgctataaaaagacataaattcttttgtatgccaattgcattttttcagctccagaatttatgcttaatcttttttaattatttcaatctctttgtaacatttatctgataggattctgaattccttctctgttttcttgaatttttttgagtttcctcaacacagccattttgaattctctgtccaaaagttcacatatccatttttctccaggataggtccctggtgccttatttagttcttttggtgagttcatattttcctggatggtgttgatgcttgtagatgttctttagtatctgggcattgaagaattaggtatttcttatagtctttatagtctggacttgtttgtacccatcttttttgggaaggctttccagatatttgaaaggacttgggtgtgttgtgatcttaagctttatttgctttaggcggcaactcatgcacagtaatcctgtggttcttgaagacttgtagaggtactgccttgatggacttgggcaagatccaggagatttctctggattaccaggcagagactcttattctcttcccttactttttcccaaacaaatgaagtctctctctctgttaactgagccacctgaagctggaggtagagtgacacaaacactcttgtggccaccaccactgtgactgcactgggtcagacctgaagtcaggacagcactgggtctcacccaaggcctgctataaccactgcctgtctacttacctatgttcacgcaagaccctagagctctacagtcagcatgtagcaaagccagccaggcttatgtccttcccttcagagcaatgagttctcccagattcttgtgagggtgctgtcagggagatagggactacagtcaaaaatctcagagtctacttggtgttctattgtactgtggctgagctgcatcaaaccacaagatgcagtccttcccactctttcctcctctttccaaaggcagatgagcctcaccctgtggccaccaccaccacaggcccgtggagagtattgccagactaccgctgatgttcccttaaggcccaagggctcttaagtcagcttgtggtgaatttgcctggcctgggtctcacccttcagggcagtgggttctcctttgacccagggcaggtgcagaaataccatccaagagccaagtcttggaattggggaccccatgagcccgctttgggttctactcacctctggctgagctggtacctaaggtgcaagacagagtccctttactcttccctctgcttttctcaagcatgaagactcttgctccatagtaaccacatctgcaatgtgctgagtctcacctcagccaataatgaagccatataagtctcagagtatcaccgaaggccctcaatgtagtacatgtgtattactgctggttgtttagtgcccaagggctcttcagttagcaggtgatgaatcctgccagaactaggtccttcccttcaaggcagcaggttccctactggcccacgttgtgtgtagaaacaccatctgggaactagggcctgaaatggggggtggcctcatgactctgaccagtgccttatcctgctgtgactgagctagtatacagggtgcaagacaaagtcctccccatccttccctctcctctcctaaagtggaaggaaggagtctcttttgaagccacaagctgtgcagcctggactaggtgagagttgatgccagcactcccacaactgccctggctggtgtctcagtaggccatgtgccccctgagtccactggctctgggcccatttcagccctaggactcacctaggagttgtggtccttgtggcctagactgcctttcaagtttacttacagccccaaagtactttagatcattgtcatgatacttgagggaactcaacttctgactgctgggattggtgatttcctgttggctagggctgctttaagtattttctccacgggcaggtgtcagctgagttttgtccagttttcctttctgctataacagggcagcactgagttcagcgccttaaatttgctgcattcccccttccccagtgcacagaaatgctctttacaccatgcaaccattgctggggagtgtgggaggagtggtgttggcaattcaagacttttttctacttcttctgtgcctctttcagcaatattaagttaaaaccaggtactggctgggtgtggtgctcacgcctgtaatctcagcactttgggaggccaaggtgggaggatcacttgagttcaggagtttgagaccagcctggccaacatggtgaaacctcgtctctaccaaaaatacaaaaaattagtggggcgtggtggcatgtgcctgtaattccagctactcaggagactgaggcaggagagtcgcttcaacctgggagatgaatgtagcagtgagcctagcttgtgccactgcactccagcctgggtgacagagtgagactctgtctcaaaaacaaaacaaaacaaaaacaaaaccaggtactgtgactgttcacctgattttgcttctcgtgaaggtgcttttttctgtgtagggagttttaaattgctgtccttgttgggggatgcttggtgcaggcttctattttgccatcttgctccacctctcatctgagtttatataatttactatgtcatgattaaaaatctaaaataaaagctataagaactttatttctacttatggaaacatgtttaaatgtgtttatgcatgtctacatgtgttatgtggtgtgtttacataataaagtctgtcatagccaaaaatccatgaacattttattaagtgagaaaaatgagggctcatataaaatatatagcaaataaccctccctttttagtttatgtgacttaactaaatatttcattaattaatttgttttaaaattgtcaacatacatttttgcctaggtttactggtcagatcttttttttgagaaggagtctcgctctttcacccaggctggagtgcagtggcgcaatctcggctgactgcaggctctgccccccagggttcacgccattctcctgcctcagcctcccttgtagctgggactacaggcgcccgccacctagcccggctaattttttgtgtttttagtagagaggcggtttcaccgtgttagccaggatggtctcgatctcctgaccttgtgatccgcccgcctcggcctcccaaaatgctgggattacaggcgtgagccaccgtgcccggcctggtcagatcattttatatttgtttttgctagacgttttaaggtcatgatgctataaacccagtctaaaacagaatgaccttgttgtgaaattccttaatatataagattaatttaatgttgttgatatacttaaaacagctatatcttctgagttatcaacaggatacccatgtatttaactttaaagtttttacttagataaatacttgatattaacagatatgaaacttgttaataaacacaacaatgactagctttgtcttatatttcagttttaagaagtaatctagatgtaattgataaaaaataaattagttaattgtaaatagaataaatatttataaataaaatttttatgtaatttaaaatcctgaagttatattatgttaaatagtagatacgatgtctggatcacatccaaataagataaaaatggaaacaaaccactgaataaatataagttcatttttggctttttaaagtttataaaattataaatatatttatatctattaatcaaaaatgaatttaggaaaaaatacttttgtatgataaataatcttgaatagtaaattttagtcctataaaataattggcttttttaaaaaatgaaaaatggtaggacaaagacttgggggttaaaaaaatgagaaaatgtctaagcaagtcaaagagcatttatgaataataggcctgtgagaaaacttttatgaatgatcaggttggccagaattaaaaataaatagtttataagtggttttctaaaatttaaacattaatgttggaggtgcactgatacaggaccagagcctggtcctccatttttaaaacaacattttcttgaagtattgatctgctcctgataaaattgtaagaagctttcattttgaattctaaaatctatttctttaactgctatcccctaaactgcaggcagtttctatttctgccaccttttttcactgagattcatttaatttccctagtttcacattaaaaatgctgtcttcttcatttaaaataataatttctttgcttttttttttgagatagggtttcactctgtcatgcaggctggagtgtagttgcacgatcatggctcactgcagtcttgacctactgggctcaagcagtcctccaacttcagcccccttagtagctgagattaaaggcacacgtaaccacgcccggctaatttttgtattttttgtagagacaggattttgtcatgttgcccaggctggtctcgaactcctgggctcaaacgatctgcccacctcggcctcccaaagtgcttggattatggacattgcacccgtctggtaatatcatttcttgaggtagagttttgcttttgaaatttctcagatttcgtatctcagtggttcaaatttgccatgtcttgctatttgatttccaggtcatatatcattgcattcaggttttctcctctttagaaagcctgggatggtaactctctccttcaattttttcatcagttgctatacaattttttttttttggttctaattgctggtatggcctgacactaaaggtttatcctgaaggcctagaaatcaatgctctttttcaatataacttgattctgtactcttggcttttcttgatacatgtgaattgttataatcatgacctgggacacatcttcctgtatctgattaaattcaagtacccttttcatcagattcgacctccaggttatctaaatgagctccccaaaaggagaaacaatcacattgcagaaagtttttctttacttttttggtacctggcctaaggaagattatacattttatcaacataatttcctgtgttgcttttattagatttgatttttttttaacctgaagtttaaaatggttaagatagttttaatgtaattatttgtatggctttttaagccttttgattatcactctggttatataaatgacttatttcacaagtaacttgtgattctgtattgatacagtgttttgagccctttaaaaacttcctcaaaatcaaattccaatttaagttttttaaatgtagaattaactttggaattttccagttggactcctggaaagcattaaaacatatctttctcatcttttagaggtattaaatgatttgggttatttggtaaattttataagaaatattgtcaaacgataactgatactagatttttcttttatttgcatttatgggaatattgtttatatgaatgtttgaaaaattatataagtccatacaagtatgctgggaatgatggctcatgcctataatcccaacactttgggaggctgaggtcagaggattacttatagccaggaatttgtgtccagcttgggcaacaaaacaagaccctgtctctattaaaacaaaacaaaacaaaacaaaaacaaaaaaaaccaaaaaaaaaccaagcatggtggtacaaacgtgtagtcccagctacttgagaggctgaggcagaaggattgcttgagtccaggagtttgagattgcagtcagctatgaatgtgccactgcactctagcctgggcaatagagcaagaccccatctttaaaaaaaattcgtacaaatgtattatattaccagtcataattctggttatcttaaaatactgtatataatagcaataaataaatgttcttctcagttgttaacttcatcagatttttaaccatggctattttaagtttttgtcatccatattattgttttgaattcttttttaaaaaacagactcctggaaaatattctaacaagtactcttttatttttatttatttatttttgagacaatcttgctctgatgcccaggctggggtgcagtggcacgatcctggttcattgcaacctctgcctccctggttccagtgattctcatgcctcagcctcctgagtagctgggattacaggcatgcgctaccacgctgggttaattttttgtatttttagtagagatggggtttcactatattggccaggcttttctccaactcctggcctcaaatgatcctcccgccttggcctcccaaattgctgggattaccggcatgaaccattgtgcctggccctaaaatatactcttagatttgggtttctaacaacttgaagatcaatggacaatataacaatttccagaactgtaataaaaaagtgggttcatgaaactattaatcaagatcaggcagaacaagaattaattacgtgagtttaactaatgaagacaatgtttttatgatattatttcaaatgttgttggttctttactcaaatagttttttccagatttaagaaaatcttgtcttttaagctatttataatttacagcaatttgatagagtatacttgtgtaaaaaaagataaaaactttttttctctttacttgattcctccataattagaaaaccatttgtgagtcttcttatggtaatatggtcatttcaataagtctaataaaaatctgctctctctgtatagcagaatacaattggaaactggttatattaccaaggctttgactgaaaggtcatttttaaaaatattgaggccggacgcggtggctcacgccagcaatcccagcactttgggggactgaggtgggtggatcgtttgaacccaggagttcgagagcaacctggacatggcgaaactccatctctacaaaaaatacaaaaattagccaggtgtggtggtctgtgcctgtagtcccagcttactaggaaggctaaggtgggagaatcgtttgagcccgggaggctgaggcttcagtgcttcagtgagcagtgatcctgtcactgcactccagtctaggcgaccctgtcagggagacccagtctcagttaaaaaaaaaaaaaaaacccaaaacccaaaaaactaaaactagaatggtattttctactgggaatgtggatttgtggattgatggtgaaatactggaaatttaaagcctacactagaatccattgaaaaaagcaaacaagaaaaacttcaaggttggctacattgaatttgaatgtaaagattaaaaaaaaataagtaaaaaacaaaagaagacatagatccaatcccatataccaggaaatgcactctaaggtatatacggaaaatatatttaacacatgtgtatcaggacgcaggcacaagtaacttcaaagcagcgctgtttcaaatagtaaaaaaaggaaaaactggaaactgttcaaaagcttcatcatctcgatgatcttggtcttccgcctcgccttcttctccaaggtgaatatgtactgggccagcaccacccccgccaccagggcgcacacgctggcgctcgctaccgcgaccaccctcgccacggtcgcgcggtgcatggacggggccctcatgagtgtcccggcaggaaaaaaacaccgcgattgggactctcagaagcgcaggatcccagagcaccatggacaagccagtgacgccccgcccccactaggccccacccacacgcaccgaggggagagggcggtcacgcggccgggggggcgtggcctgcccccggagcccaggcaggaggagggtcttccttaaggaactgctgccaggacagggcagaggattgcagtaattatcactctctgctaatgaggaccaggccgtggttcactcgagccccgccccagtagcaatctaattccaaccgcggccctctcagaagtcggtccccgcctttgcgcctcagcctctctggactccagcccccagaagtcggcgcggcacggcgtgacctgcgcagtggcgtccgttgtaagtgctatgacaacagggcgaagatggctcagagttaggctggagaggggaggtgtcccttccgctgcggccgtcgggtttctgctacatcccattcaccgcctcctccatcctttcctcctcggtgtgagcagcaggacttgcatttgttctcgcctgcctagtgtcttccaagggatagatgccgtttcctctgctggtctctgggggtgacggggggcgcaggggagcttcttgggggaatcactccaactctgtggagctggtggtgctgcctggtggggctctctctttgcccgggacgtggaacaactttcagctggaggacgagagggaatagtgaagctaaaggttgcttttctctgcaccgtccgttcttgctccctctgctccatcactgggaccttgtcaggcgttcataaagcaaaatttgccgaacgagggttcgcagaaaggtggggcagagctcatctgacgtggcatcaggtaagatggtatgtctgttgttaaacttcgggtacatgaataccctttccatgttttattttgtgaacaagattctctaatgcagtataatggtttggagtctgtaaggtgattgatttcttagatgtttgcactgaaataaacaaacactaggagcacaaagtgtatgagattctgtgagtacttttgagaaaaaagggatgagaatttttaaggattccattgaggaatgtcacttggagcatgagcatcctcctgagacacttcaacaggtctgtgagtaaatgggcaaagcagttcccagcctacgactgaagtaggatgcatgtactaatacccccaatccttctagtaataggattattgtttctcctcttgttacttggagaccacaacagtttagatgagctgcgctgattttatcagcacctcctgccagtcaaatcctgcctttgacttcaatttcctggagaaatgtatttttttgggtatctcacttttactttaaaaatgaaaccgtatcttacaggtatacacatcttacatgtcctcattgataaacaacttgaaagatgctgcaggataagctatgggtcttaagttggccagcattcagagaaagattttctaacttattagcattttataaagaaaacaattactgagatttttttcatgaatatacggaagaattaaaaaaaaaactagaaaacccagaagtttttaaagaagaattttaaaaaactttattttgaaaataagttacaagttatttgtcagagtttaagggatttttccttgtgtgtaattgtcgtggttaaattacaactatacacttatatttatggtacaacttcttgatagaaatgctcactgaagggaaaaaatccaacagcaatagtatatatagtaattttaaaacttttacaccttttgagggatgtagtaagtcttacgctttagaatactttgaaatatttttgaaaattattaaaatacatgaaattattataaaacatccctgctggttaataacatttccattagtgattactatcagtctttgtgagtcccatttaaaatttcggtccagagggtgagtttggcattcgtaattgtgtcttgcacagaacacactaccaccgtctctttcaactaccactactaccactgtctctcctactagcactgtttctactgttgggttattactgacatctattgagtacttgctatgggttgagccattttatcctcctccaccctagaacaattgagatactagaggataagggacttgtttaagatcatgtagtgtaacgtggtcagaaagtgcacccagagctgtcctactccaaattttgtgttattttgccctttgagtcttttgttgaaaattccaacagtgagcccttgtattattgccttcaaaagcagtatacttcttttgaacactacatgcatttgtcatctttctttgactggaagacctgatttctactttcttaaatttggtgtgacactggcataacctggagaaagcaaagctctgaaaatgaacaacagctgcaaggtctgtttccagaactgaccttcaaacctgtatgttttttccacagcattctttggggttattgttttcacagctgatcatattgtaggactaggtcaatgaggtgttcaagaccagcctgggcaacatagtgagacctcgtctttgccgagcatggcagaaaaaataaaaattattaaaactttttaaaatattaaaaaaagaacaatagcaaattaaattcagaaggtcagcaaaaaaaggtcagccacctcttaaatgaaacctaaatctgagtaaacttgttgtagaaaaaaaagtattcaaaacaaaaaagtgtcaagtgaagagtatagaagagaatttctggagtttaggggataaggagattatctcccatttattattctaataaggcattagaaactaatctgttatgcctgtttataggactgcacctgttacaaccttcaaattattgtcttctaatcatcctttaacaatttaatcaaatttatgacatacttgcctgtagtttgaacttgtagtgtttagaattagtgtgaatagagctattgcttttatagtctacatggaggggcgtgtgcataggccgtttgtttagggttctggagtagacagtctgggtttaggtaccgcacatcacttaactagtgagaccactggcacggatttcttaacttctctgtattcaaggatacctgaataatagtatctacaatttactttgtagttttgttatgaatatcaaaatagaatgcttgcaaagcatttagaatcctgactggctttagtaaatgattagtagatactttcctttaaggcgaagtcattaaaaacctggtttttattttccaattacttaaagacaaatcagtgagcaactggaaatcaacactgaatgaaaaggggataaaatgcaaacctcggttccttattcaagacagttaactaaactgaattaaaaaaacattgtatacatattttattttttgttatttaaaacactttttgtttattttgtaacccaaaagccaggtttcatgaccaaaaaatgttttattactattgttccttaccatctttcctaacctgtcagtaccagacctcccacacctacctgcttatcttaatatctcaatgtcaaggcctatatctttcctagattggaatacagattagcattttatttgtgtctcaatttatggctaatttttcattttcttgatgacttgggatgtcttccaggagaaagggcagaatttattttgctgaccttctgaatttaatttgctattgttctttttttaatatttaaaaaagttgtaataatttttattttttctgccatgcttggcaaagatgaggtctcactatgttgcgcaggctggtcctgaactccttagctcaagtgatcaatccgccttggcctcccaaagtgctgggattacaggtgtgtgccaccacacctggcctaatggtaaatgtggccaaaatacaggagtgttctgctttaaaaaaaaatgaaagtttatggggaatttgaagcataaccaaaagcatgaagaataacaaaatgaacccccatgtatccatcatcatttgttatctttaaaaaaaaacagctttgttgaaatacaattcaaataccatacaattcacccatttaacacataaaattcagttccttttttgtatattcacagatacatgtaaccattaccacagccaagtttggaatatttttatcaactcaaaaagaaacctcgcatcccttagctataactctccttctctcttccttctcccctacccccagacctaagcaactaagaatctactttctgtctttatgaatttgcctatcctggatattttatataaacagaatcatataataggtggccttttgttactggcttctttaacttagcatgtttttaagagccagatatgtctgattctaaaacctatatgcttttatttatttatgttgtaacatatatcagtattttgttcttttcttttttatggccaaataatattccactgtatggatgcttccttttgtttatatattcatcagctgatggacatttgggttgtttccaaattttagatattatgaataatgctactataaacatttatgtgtaagtttttttgtatgcacatatgttttcattgcccttggatagatacttcagtgtcagattgctgggtcatatggtaattctgtgtttaagtgttagaggaacttctagattcctttccaaagtggttgcatcgttttgcattctcactagcagtatatgagggctctgatttctttacatcctcaccaatgcttattactatctgacttcgattctgtcatagtaggtgtgaagtcatatctcatagttttgatttgtgtttccctaatgactaattatgctgagcattttttttttgaaacggagttttgctcttgttccctaggctggagtgcaatggtgtggttttggcccactgcaacccctgcctccaggttcaagcaattctcctgcctcagcctcccaagtaattgggcttacaggcacctgccatcacgcctggctatttttttttttttttttttttgtatttttagtggagatggggtttcaccatgttggccaggctggtctcgaacttctggcctcaggtgatccacccaccttggcctcccaacgtgctgggattacaggcgtgagccactgcgcctggccttgagcatctttttatgttcttattggccatttgtatatcttacttggaaaaatacctattcagacccattgttcatttttaattgacttttttaaattactgagttgtatgagttcttgtatattatcagatacatgatttgcaaatattttctcccatcatttcatcttcttgatggtgacctttgaaacctaaaagtttttagttttgataaagtctactttattcatttattttgtttttttgagatagagtctcactctgctgcccaagctgagaggtgtggtggcatgattttagctcacagcaacctcaaactcttgggctcaatcctcaaactcctgcctcagcctctcaagtagctgggattataggcacacacaaccatgcccagcttattttttcttttttgtatagatgcggtctcgctttgttgcccaggctcttctcaatctctcaggcttaagcagtttccttgcctcagcctcccaaagtgttgggattacaggcgtcagccactgcacctggctttatttatttattttgagacagggtcttgctctgtcatccaggctggagtgcagtggtgcaatcatggctctctgtagcctcagccttccagtgtcaagcaattctcccaccttagcctccccagtagctgggactacaggcacacaccactgcacctggctaatttttatattttttgtagtgatggggtctcatcatgttgcacaggctgggctcagacttctggctcaagcagtcctcctgccttggcctctcaaagtattggaattacaggcattagccaccatgccttgcccttatttattttttattgctcacgtttctggtgtcaaatctaagaatccattgccaaatctgaggtcataaagatttatttatatagtcttctaagagtttcaagagtttatagttttagctatacattagcttatacttagatctttgacatattttgagttaattttaaaaatattattcgaggtaagtgtccgatttcattcttctgcatgtcactattcggtcatcttagacccatttgttgcaattactctttgaatgatcgtggcacctttgttgaaaatcagttgatcatagatgtatgggtttatttctggactctcagtattttccatttatgtttatgtctatccttatgctagtgccatactggcttaattattgttgctttagtaagttttgatatggggaagtgtgagttctctacctttgttcttttttaattttgagattgtttttgctattctgggtccctggaaattccatacaaattttagaataaccttgttgatttctacagagaagccatctgggaatctgatagggattgcattgaatctgtagattgatttgggaagtattgccgtcctaacaatattgagtcttcagatccatgaacatgagatgttttccatttatttagatcttctttaatttctataacaatgttttcatagttttcagagtataagttttacacttcttttgttaaatttattcctaagtattctttttttttttgttttttgagatggggtctttctctgttgcccaggctggagtgtagtggtgtgatcacagctcactgtaatcttgaactcctgagctgaagtgatcctcttgcctcagcctcctgtgtagctagtattacaggtgcgcaccagcatacctggctaacttatgtattttactcttttgggtgctattgtaaatgtaattatttttaaaatttcattttggattgttcattgcaagaatatagaaatatcatggatatttgtatatttattttatatcctgcaaccttgcttaactcatttattagttctaatagttttttcccaaattccttaggattttctatatacaagattatgtcatctgtgagtaaagatagttttacttctttttttccaatttggaagccttttatttccttttcttacctaattgctatagttgagagcatccagtatgattttgaatagaagtggtgaatgcagacatccttgtcttgtgcctgatcttaggaggaaagtgttcggtttacactattaagtatgatgtaagctgtggattttgcatagatgtcttttatcagtgtgaggaaccttctattcctagtgttttgagtgtttttttataatggaagagttggatttatggaggtgatcaagtggcttttgatttagattgtattgattttacattaactcatttctggatgttaaggatgcctaccttgcattcctcaggcaacaccatttagtcatgttatataatactttttatatattattggattcaattagctagtagtattttgttgaggatttttgcatccatatgcataagggatattggtctattgttttcttgtgatgtgtttggttttggctcagggtaattagatttataaaatgaggtgggaagtatcctctcctcttttattttttggagtggtttttgaagaattgggataattttgctttaattgtttagtagagtccaccagtggatctgtcttggcctggccttttctttgtggatagttttttgattactaattcaatttctttatttattatggatctatttagattttttatttcttcttgagtcagcagagggtctcctctgttcttgggtgtatcagtggattatacccaagccctcagctcctcctgggtgtccttcctgtgctgtcggtgcccagagtccggaggggaccgaggtgttaggggactggtgtatcagcactgccctgagcgcacacacacctggccgggttgcgacagcacctgggctcggcttcaactttggttcgaaattggagtgggcactgggagttgggagaggccagggagcgggagtgggcacttccaaactgcaggggcaggggtgcttcccgggcccccgacagtgcagggatgcttgggtctggagctgtgattgggtagctgcagatgtgcccaggagcgcagggctcctggccctccaacctggtagggggcggggctcctgcctgttcccagcccccactggctccgcagagtgggcagcccctgccatgcctcccccgctgcagccagtgtcttcgcagtggctgccatcactgctgcctaagttgtcttttgaaatccacccatttttttatcaaaggaaattagtggtatcccaactttgtactgatgagagtttgtggtttcttaatttcttgggagtgggcagtgctccttctctgcttctacctttgaaactggagagacgcacttgggaaacaaatgatgactattgattatcagcccaaattgttgtttttttctattgttcattaattctttaaagatgtaagtccttattgttcaataaattatcgtctacaatggtgcatgataacacttcggacattgggggaacaaacatacaagatgtttatgtaatggaatttatgaaattctgctatgcatgaccttatgtttgccctggcatgaaagtcattgttgttgctctgaaatattgttgttctgaaataattaaggtagccatggtcttgtgaggaagagccatttgttggacataggtttaaaaattagcccttcctccacagtctttaaagattaaaataaagcaaacaaacaacacaaaaatcattctatccacatgctttttcagttttttgatattaaattgcagattattggcagcctaatgaggcaggggactagagacgagggagagagtatgcagaagcaaggtcctgcaattagctgtgtgaggtatgggaatcatgtaacttatctgggcctctcctataaaatgagaggaccagctgattgatggatactttccagctgttttaggtctttgatttgaaaaatgattttttttaagccctcaaaaggtaacggacggcagaggtcctctgaaaaagaaggggaaaactggagctctgctgtaagaaaatatccacttaggcaatcaggtatcagttacatcagtgcctcttcaaccttaaggtgcatgtgattcacctggagatactgtttggggaggatgagattcaacatttctcataagcttttgagtgatacagatgctgctgatccagggattacacctggagtagcaagggaccaaactctgtgaaaagggggatttcaggagctaacgaagtggtgggtgaataaggaaaaattgatagagcaggagaaacaataatgatatatatatttttaagagacagggtctggctttgttgtccaggctggagtgcaggggtgcaatcatggctcactgtagcctcaactcctgggctctagtggagactggctaatattttttttttggtgggggggaaagatggggtcttgctatgttgcccaggctcgtctcaaactcctggcctgaactgattctcctgccttggcctctcaaagtgctggcattacagacatgaaccactgtgccttgccaagaaggatgtaaatgatgcctttgttattttgtcagtacaagtagatttctaattttcggttagaagttaatgagaaatgaggccaggtgtggtggctcatgcctgtaatcccagcactttgggaggctgaggtcggcggatcacctaagttcaggagttcaagaccagcctgaccaacatggagaaaccccgtctctactaaaaatacaaaattagctgggcgtggtggcgcatgcctgtaataccagctattcaggaggctgaggcaggagaattgcttgaacccaggaagtggaggttgcggtgagctgagattgtgccattgcactccagcctgggcaacaagagtgaaactctgtctcaaaaacaaaaacaaaaaacaaaacaaaacaaaaaaacaagttaatgagaaatgaatgtcttctataggcattcctatttgtagacattgttggaaagttctttcatattggaggattcttttgattctttttttgtcttttttattttaacagcccactagatcataatattggaggattttttgtattcattctagcaagctgaaaaaatttattgactcacaggtttttaaggccattttcataggatagctactttgacttgatgcagtatttatattcaaactccagctttgtctcttgtggtcacttatctgaggattttgactttttaaaaatgtatcattcattatcattgacagaaaaatctcttctctttctcctttacttggtttagtatgttctctaggcaggccccatgaagttttcttttctgtctgtgttaggcaaaggtaagaccccctttgagtgttgtatagttcttactttcttattttctctccttgagacttttgaaccggctgatgcaggagtgagcagaggatcacttactctttggttggttactactaatttctgtccttagctatgtctcccaatagagcttatgcctccaagtcttcatcctttatggtgtatcaggagcacttgatacagttggtcactccctttttctagatacattttttttttccacttccttcgagataactcacttctggctttgttttgatctcagtgaatgcccctgttaagcttctggtagattcctcttctttttcttttttttggagatggagtctcactctgtcacccaggctgaagtgcagtggcgtgatcttggctcactgcaagctccacctcctggttcatgccgttctcctgcctcagcctcccgagtagctgggactacaggcacccgccaccacacccggctaattttttgtatttttagtagagatggggtttcaccgtgttagccaggatggtctcgatctcctgacctcgtgatctgcctgcctcggcctcccaaagtgctgggattacaggcatgagccaccgcacccagccggattcctcctcttcttaacctctgtaccactcctttgtcttctaagcttgtgtctggttttcttcagatatcccatcatgcaccttttccctttcctgattatgcttttcatccttttatcgtagccatccttcatagccatgaagatgactatgctgtgtcctgtgagtcctcctagggaatcattggcatttcaagtgtgaatttgggtaatattttgctctgagctgcaagtgaatgatgtatcctcattctcatagtccagtaatatggcatattacaattctcctaggtacttggcatatatagtgagaatatatgggatttattgaatactgttactttcctctcaaaaatccaataaaagtgtaatacagatattattatgttttttgaatgcttgctaccagatttgaaatttagtaatctgacaatttgtatggttatataatgtcattagtaataacaaatggtgcaaatatttttcagaaagtctcccacatattttgaaactcatgataaatttgtttacctgttagatatttgttcacttccatcaactcccagtgtttatctaacttctttcttagcataagcagagtactatggatggaattttctttcttttttctcctggtatttgtttttttaaactaatcattttgaaataattttagactcacttagaagttgcaaaaataatggtttcccaatgaaaacagtacagtgatcaaaaccatcaaatttgtttttttcgtagagactgggtctctgttacataggctggagtgctgtgtcttgatcaaagctcactgcaggctggcatggtggttcacgcctataattccaccactttgggaggccgagatgggtggattgcttgaggtcaggagttggagaccagcctggtcaacatggggaaactccatctctactaaaatacaaaaattagctgggcgtgttggcaggtgtctgtaatcccagctacttgagaggctgaggcaggagatcgcctgaacttgggaggtagaggttgcagtgagttgggattgtgccactatactccagcctgggtgacagagcaagactccattcctcactccccaaaaaagctcactgcagcctcgaactcctgggctcaattgatcctctcacctcagactcctgacagtagttgggactacaggcatggaccactatgcccatctaatttttttattccttgtagagatggggtctccctatgttgcccaggctaattatagatgttagccaccgtgcccagcccaccattaaattgatgttagtataatactaaagttaaactatagatttgatttggattttaccaggttttatgttagatgcactttttttttgtagatagttctaagaaattaatcccaaagaaattgccttttattattagctcctcatagttacaccctcctgtaaacctagcaaccacctatctgttctacattagtatgattttgtcattttgagagttagaaatgtaattatttaatattttagctttttggatttttttttcattcagcataatgctcttgcagtctatccaagttgcaagtgtcagttatgttttaaattctttttttttttctcgagatggagtctcgctcttttgcccaggccggactgcagtggtgctatctcggctcactgcaagctctgcctcccgggttcatgccattctcctgcctcagcttcccgagtaactgggactacccgcccggctaattttttgtattcttagtagagacggggtttcaccgtgttagccaagatggttttgatctcctgacctcgtgatccgcccgcctcggcctcccaaagtgctgggattacaggtgtgagccaccgcgcctggcctaaattctcaagttatattggtatggtgtagatgtaccatagtgtgtttaaccagaacactgagtttttttctttaatgtaagtttaaaacatcataaaaggggatcaaaaccagagcaatggctaacacttattgagtgcttattatgtgccaggtattgtactaagtggtctactgtattcctttttgtaaaaaactaaaactgtatattttttatttttaattgtggtaaaataatgtgacataaaattgaacatctaaccatttttaactatatagttcagtaatggtaagtaaattgacattattgtgcaaccaatctccagaacttctcatcttgcgaagtcaacactatatacctattaacagttctcctttctccctagcccctgacaatcaccattcttaatgtttctgtgactattctaggtacctcacataagtggaatcatatggtatttgtctttttgtgactggcttattttacttaacatgatgtcctcaaggttcatctacatagcagatgtcagtttccttcctttttaaggctgcataatattccattgtatgggtataccacattttctttatccatttatccattgatggatgtttaggttggttctgcctcttggttattgtgaattatgatacagtaaatccgtgtgtaaaaatatctctctgagattgtctttaattcttttggatatccaccaagaagtgggatggctggatcaaaatttctaggtttaacttttttttttttgagatggagtctcgctctgtcgcccaggcaggagtgcagtggcgcgatctcggctcactgcaacctctgcctcccaggttcatggcattctcttgccttagcctcccgagtagctgggactacaggcgcctgccaccacacctggctaagtttttatatttttagtagagacggggtatcactgtgttagccaggatggtctcgatctcctgacctcatgatccacccgccttggcatcccaaagtgctgggattacaggcctgagccactgtgcccggccctatgtttaattttttgtgggacctacccactgttttccatagtagctacaccattttatattcccaccaacagcgtacagagattccaatttctccatgtccttgccaacacttgttattttgtgtttttttcttcttgcaatcatcattcttaggtcgaatatatttttgttttttttgataatggatgtgaggtgatattgttttgatatgcaaatcaaaaattttgaactgattttcagttcaaaattagtgattttgagcatcttttcatatgctccttggccatttgtatatcttttttgttgttgtttgagacagagcctcactccgtaacccaggctggagtacagtggcatgaccttggctcactgcaacctccgcctcctgggttcaagcagttcttttgccttagcctcctgagtggctgggattacaggtgcccactaccatgcctggctaatttttgtattttagtagagatgaggtttcactatgttggccaggctggtcttgaactcttggccccaagtgatcctcctgcctctgcctcccaagatgctgggattacaagtatgagccaccgcacccagctcatttgtgtatcttctttggagatgtgtctgttcaggttcttttgcccattttttaatgggatggtttgtttttgttgttgttgttgagttgtaggagttctttatgtatcctggatattaattccttatcatatatatgacttgcacatattttttccagttctgtaggaaactgcattcttatttaatcatcacaacaccactcttacctttattttgtaaatgagaaagcgaaagtacagagatgttcagtaacttttagtaaccttccactggttgcatggttaacatgtggtggcacaggaattcaaactcacacaggttgcctctagaggctatactttcccaccacattatttacagccaatttcttggccaactttgtataaaaacaaatgaccttggtttctatgattagctcatgtggaatgcttactttaagaggcaggttggtctacattttaaaaaagtagagctgatcctcattattggcagactctgtatcatttgtgaatttgcctacttgctaaaatttatttgtaacccccaaatcagtgcttgcgatgcttttgtggtcatttgtgatcaagtgcaaaggagtaaaaattgagtcacctgatgcacatgttcccagctgatgttaaacaatggctttcttgtttcagttctcataccgtaaacaagtgtcctttcatggtctacagtatttagtgtcatgttttctcccacattttcgtaggttgtttttggagggggatgtggtgttttcactgtttaaaatggtctgcaaatgtaatactgaagtgctgtctaatgttcctaaaagcaagaaggctgtgatgtatcttgtggagaacagacagatggtccctgacttaccatggtttgacttatgatttttcaactttaggatgttgtgagagtgatacacattcaatagaaaccatacttcaaattttgaattttgattttttccctggtatattaaatgtgtttttgacttaaaatattttcaatttatgatggatctattgagatgtaatcccatcataaattgaaaagcatctgtacatgaaattagataaggttagttcagcctgagttctagtgctggtgggcatgattcccatagtaatgaatcagcaatacatattaaataaggtatctttaaatagaaacacacaaaaaactacattatgtattgattggttgaagaaaatgttgttactagaagcttgcaggaatctgtctaaccctgtgtttctcctaggagcaatggttcagtatttgctaattcattgtttatggcggccttatacagaataactttcgtgaataaggagaattgactgcacttcgtagctaccatttaaatcggtgtaacatgaaggaaaacctcatttatgttaaataaatgaactgttgtagagtcccagggcatgtgatgctgtgttgtaattcaaaaggtccaagtgctttcacatctgccatatcagcaactcagtggtaggtagggctggtatatgctcattctagataagaaatcaaagtaaggagaggttgtttgggttgcccaaggacacacggatagttagtggtataaatggtcctgcagcccaattttcctgcttcttttttggtgtgaatttccctcttctatcttgcctttctataactaacatagcaagaggaagtgaatgctttttgagtacctatagcataccagttccagggctagtcactaatgcatttgatctcatttgtctcagcaactctttgtaataggagatggagttggccctccgtgtccccgggtttcacatccatggattcaaccaactgcagattgaaacctgtggatatggaagactgactgtactaggtatactaggtcattatatataataagggacttgagcatctggggatttttcatctgtggggtcttggaaccaatcttccacaggtacaaagggccaactctagtgcagtctcgccaatgactagactgaaaggaagttaggtatttcactgaagacttacatgttaaatagtgctgatggaatttgaatcttgatcctccaaagaatctgttcttttgttattttctgcagttctctcctaaatgttttagaagagagaattagcacaacataaatgtataatttctcagcccaatttactaacggtgttgcaaaatatctgattaatgcttccagccatttggatttgtggtttcaaatatgtgtacaaaatattaaaaagttaatatagaaatgtccttctcagatctgtccaagtttaatttgctatgccttaagacataattattagttcatagtgtgaagtagattattataaatgttttctttttagtgtgaaagaaaatgtctttatttaaagcccgtgattggtggtctactattctgggagataaagaagaatttgatcaaggctgtttgtgtctggctaatgttgacaatagtggaaatggacaaggtaagcaacttacaaccatacatcttggatgaaagttttaaagagatcaaataagactgggcacggtggccgactgctgtaatctcagttcttttgggaggccgacgtgggcagatcacgaggtcaggagtacgagaccagcctggccaacatggtgaaacactgtctctactaaaaatacaaaattagctgggcttggtggtgggcatctgtaatcccagctacctgggaggctgaggcaggagaatcgcttgaacccagaaggcagaggttgcggtgagctgagatagtgccactacactccaacctgggcaacagagcaaggctccatctcaaaaaaaaaaaaaaaaaaaagagataaaaatgacttgcttttgaaaatgtgtactttttagaacttaattgaactatcataattgtacctaattttgaaggtagttttttttaataatatttaggtatcagactgataactatagtctttctgttttgtttatgttctggtttgtactgattctgtcatattgtttgctggaatttagtaaaaattatatgacatcacttcatttgtatcaaaatttggtcttgtaggggacagttagtaaaatattttgtattttgaaaaatttccttttgtagaaattctttacaagaaaaataaatttattggacctggaaaccattcataccataatgaaattacactagctctatttggtggtagaaaacaattgttaaatccttgctttcattatcatattataatactaaaacctacattctagcttattcttatgcatcttcatgttttttaagtgacctttcaaacagtttaattctgtattattgtatcattgctatttgaaatttgtatttggtttatagtcatgggctttttttttgtgatctagtcattaccctcttaaaaagaaaacttattataactattcttttgtttactgcatataaatattatccccttacattttttaaaaattgtttttcttgcctataattaaaacagtgggatctgcaggaaaatgtgaaaggagaaaattgtattggtaaagcagaagagtgggagtactaaactgcacagagcacctactaagttgttttgaaggaaaatttggtccctgattttccactgataggagatgggaaggccttctattcagaggatattggaaggttcctcaaccctgcctctgcccccgctatttgttaaagcatgtgatgccccagttatttggccatgtaagagtcatgccacagaaatacctgccagagagaacaatttcaaacccacttctgcctaaactatctaaagttcagcttggttggaaactatacttactgattatctgaataacatactgtacactcattcatttctattagagctcactactggggtgctaccagtaggttacgaatatgctgagatactgcttccctcacagtttgtggtgagctgtgagcagcttcctctgttttccgaagcttgctatacaaaaatcattacatatgtgtgttccacatagacaacactcatcattgtgttccaaagcctgtgtcataatattgtggggtgattattatatatggagattttctatcccagacacatgagatgctataagattgtattctccaggggtaggtggggtgatgtgacttaggtttcctaatttttgataagttccaaaattgaatgctggcattctcaagtttgagaattatttttgttgatcttatagaatggaaagttaacaagagcagttttggatatgctctgtttaagataggaatgtctagtttacagaatagaggtagagatttggggatgaacaatatggtgtttatatttggagctctgagaacaggtgaaaatgcacagggagagaagttgaaataagaggggaggaggtataggactgtaacctggagaatatgaggatcaacaggggaagtgtgggaagagtagtagattctgaaaagagcaggcagagaggcaggaaaactaattaggctggtaactgggaagcagtgcagtggtgtgatcttggctcactgcaacctccacctcccgggttcaagcaattctcctgccttagcctcccaagtagctgggattacaggtgcctgccaccacacccagctaatttttgtatttttagtagagacagggttttgccatgttggccaggctggtcgcgaactcctgaccttgggtgatccacctgcctcggcctcacaaagtgctgggattacaggcatgagccactgcacctggcctttttttttttttttttaatggagacaggtcttgctctgctgcccaggatggagtgcagtggcatgatcatggctcactgcagcctcaacctcccaggtgtgccccaccatgcctggctaatttttatttttattttttttgtacagacagtgtctccttgtgttgcccaggctggtcttgaacttcctgggctcaagtgatcctcctgccttggcctcccaaagtgctgggattattggcgtgagccactgagcctggcctaaaagttttcatgctctttagcagcaagtggttcattagtgtccatgacaagagtggatgtgtgggcacaatggtaatgagatctagatttgcaatgtatgaatggggagtgagtgggaggtggggagactatttatggctctttaaagaaacttagctgtgaattgaagaagggaggatgatgatttggagaccatggagggtcaagggaagtgggaaaaattcaatgtgtagaatagaggctttcattgatggagcagggacccagagaggacagtcagagatgggatcaggtgtgcagatggaaggattaaccttggacagatgtggaagcttttttccacagtgccagaggaaagaaggtaagaatgtataccgatgtagagaaatttgcaggtcaagttgggaggttgaaacagtaatgtcagttgacctctacttttttttaggtgatcagacagtgagagaagagttacagggatcctgaaattctttagaagaagccgagtaaaacacagaaggattccttgttaatcttgatagtacaattgaaattgaacaccccatgcatttaaatggcacttactttcctaattctctcaactcaagattcagactcttgagagagatagtgagaatgagggagagagagaggatctgaataatacaatttagattacatgccaacctgtggcctggagggaaagtttatttctagaattggagtagagagcaaataagactgactaatggcttttcatttaatgcctgcatgttcattaattcctggggaatcccatatttaattgtagcttgaaatctgtgagagtcagacttatctgagatctggttactatactagtcctgcaaagtattttaatagtcgtacatatacattttgtttcagtgggttagcttgttaccatgtggacttggccatcctgacctcctcttatccctgaagatagggctatattgacctatccatgaatcttggttatttagtgagtaaaagtggggatttagggcatgacaggatacatgggaagctcagcggggaatgttttaggaaggtttaaaggtttaagtcttctccaacccttctggactccattataacagtataattccattcttcctgatcagtgcctttacttttacttaagaaggctggagagatttgtcaggtcatttgttattgtaatttaaaacttaaagaatcagtctctgaatgagcttctcagtgattaagccccactatctgagtagtaagtggtgagaaatgtttctgcagagtaccaaagaccctgagttttattctttacccttagatgacaattttgagatttaaacctatcattcttttattttaaattatccaatttaatttaaataaagctatcttcgataaagctatcttacatgtggtttggtgttcctccttgttcagctggctatggcagcagctgtccagtctactagagtttcacctgcaatgggcacagggtcccagatgactagagatgataacttgattaattgttctgttacaatgtaaagtgatacttaaccccacctagaacatgaatgggagtgttctgtgaaagggcatatacgcaaagtggccctcaaatactgaaggagctgagaaccaaagattgaggcagacaaatccagtttgtcagtatacagtgatttattaggtgaacttatgggcagaaatgtcctgggcagttgcaagacaggcagctctccacaccacaacccccagacccagggcttgtatcttggggaaaaaaagtatacatgctctgagaagaatgtgtaggtggctatgagtgtcacagcctatgatgtatgcagcaacatcaagtgctgttttggaggaaaggcaaaacttaaaatgaatagatgtttctgcataaagagtaatacatcaactagagatcttagaggagttcttggacttgagtttagtcaggagtcacatggcagattagcatttaaaataaagttactcttgtccccacaaggaatcttactgttttgtaccgcatttcaggtcaagaaccaattcccatactttggaggccaaggcaggtagattgcttgagtccagaagtttgagaccagcccagacaacatggcaaaaccacatccctacaaaaaatacaaaaattagctgggcatgaaggcatatgcctgtattcccagccactcaggaggctgaggtgggaggatcaattgagcctgggaggttgaggctgcaacaagctgtgattgcatcactgtactcaagcctgggcaacagagtgagaccctgtctcaaaggaaaaaaaaaaagaagaaccaattccaaatatgcttgcatgtttgcatgcctgcagtttattttctagtgctcatttctatatcagttatctttttttttggccacaagtgacaggaaactgatagatttaagtacagaaggtgctggaatgaatgtaagatagctttcccaatgcaggcagagttgaactgaacaagcctttagtggggacaggaatgggcatggctccagagaccttgtaagcctccagtattgaagttcccaggattatacctctctcatagggttattatgaggattttttttttcttgagatggagtcttgctgtgtcacccaggctggagtacagtggcactgtctcggctcaatgcagcctccacttcccggattccagcgattctcctgcctcagcctcctgggtagctgggattacgggcatgcgccaccacacctagctaattttttctatttttagtagagatagggtttcaacatgttggccaggctggtctcgaactcctgatctcaagtgatctgcctgcctcggcttcccaaggtgctaggattacaggcatgagccactgcacccagcctttttttttttttttttttttttcagtgacaaggtcttgttctttcgcccaggctagagtacagtggcacgattagagctcactgcagccttgaactccttggctcaagcagtccttccacctcagcctcccaagtagctgggactacaggggcatgccactgcactcagctttgcatgccattccctccatgtctctgttctgtcctcttaaaggacactaattgagtttgatcacacatctaattaactggacctcattttaacttgattacatgtgcaaagactctgtttccaaatcaggtcacattcagaggtacctggggttatgactttaacgtatctttttttggggggacacaatttaacttacaacacccattctatcatttcccctgcttgtacttaagatgaaacattgcttatcaaggcactctatctagtgacgactcagaatcctttttaatacagtgttttcgacagccacaagcagttatagagttggcctctatgatggaatcagtttacaacattgtactagtcctttgataaaggggcttgctttgattgagttaaattatgactttgataccaaataaaggtttaggaaaaaatgcaatatgttagtacatttgactatagggatgtaaagctatttatgaaagctgtgtgttattaaaataagtactctttaattacaccttttttgacagagtggcctttgtgtataaagcaagactgaattcttttaatttttagatttctcttttacacattagaaagcttatttcctaagagatttgctaatgtttgtttctccctctatctttttttttttaaattctctacagataaaataattgtgggtagctttatgggatacctaaggatctttagcccccatcctgcaaaaacaggagatggagctcaagccgaagatttgcttctagaagtggatctacgagatccagtacttcaagtggaagtaggaaagtttgtttcgtaagtaagcccactaattctggtattttacttggagtatgtcaatcctttacagtgtcacttttgtgtattcttcaaagaagactatccatgaattaaatatattttctggatattgtcacctaggggtttctcacgtatggaatgctttttatgtggaaactgtacatttaagatataataatttagggccttttaatagtaatagacttaagatgcctgacattatcagaagcttaaaaacaaagagataagcttttgaaaataaccaaataaagaaataaataagaagtatctacttatttaaagttatataagtgtccatttataattagatgaagtagcagataaccattactttttggttcatagctttgaggttttaaaatgaatagttatttggggtagagatgccctatcgtttcttgaaagaagtcagttcaacccacaaagtaagtcttccccctacaagagctttgtttcaaagtactttattcttaaatctaatttattttagaaaactgtttattagtttgaactttgggtaatatgtctgctttttatttactgatgatattgctgatcctcttattttcatacacaaactttcttaaaattaagcttgtatttcttcatcatttagaagtacgatgaacacttatcaagtagccagagtcagtttgcctcctctttttgagctcccttttgcctttttaaatctgggcagtaccctaagctctggattttggcattctacatttgtttatcataatttattggccccaggggccatttagtcagggccctaactcctgcttgaaaaccaaacaaccactcatgagcattcacattcttctagtgatatgttttattctgttgggaagctgtagcttagatgctttaggctgggatatgagatgagacttttatgctttgtgacaggctggattgcggagattttgtgaccgaagtggttggtaaatatctactccatctaaaagcagatggtgattaggttcccatcatgtgcctaggacatattaggtgtgatggatttacaaagtaaggagacaaaagcatccttcctgctaaaaagtgtttttaccttaccattaaaaaagtgaaacacagccaataatcattctgtatagtagtccttaagtatagccctcatctatgtgctcacattggaaggggaggaagttaacgttgttaagtagatagtatactaggcctttctatgacatcatgctcttttcctgagcatggtggaaaacttgttttgaatgtccagggtacatatacaaaatttccaaaggtgatactgattatgtgatagtcatgtatatttgcattttctactagtagagcaaatgatgagtatatattaattgtaacaatgttttgcagatgttatctaataagattcttatttgtaaataagatactaacactctgaaagtttaaatgatcatacatatagtaaggtgcagagtcagaacccccacctaggtctgcagacttcaattatagtccttgcagtttagaacagtctgttctaaacaggcgttgtacactggaggcctgcttgtacatgtgagcctgttcagtattttattttgttttattttgaggcggagtttcactctcgtcgcccagactggagtgcaatggcgtgatctcagcttgctgcaacctccgcctcccagattcaagcaattctcctgcctcagcctcccaagtagctgggactacaggcacgtgccaccatgcctggctaatttttgtatttttagtagagacagggtttcaccatgttggccaggctggtctcgaacttctgatctcaggagatccaccgccccctcccacctcagcctcccaaaatgctggattacaggtgtgagccattacacctggccgcctgctcagtattttaaatttaaaagagctgtcaacatttaagaaccaagagatttcacataaaacccaatgctttctggcttttcttgaaaaatgtggggctctggccccaagcccagaaccaagtaatagccacctcctttagtctggttcagtctccagttaatcacagccatttacactctttactcattaacaacccctggcttgatccttgaaaactgaatttaggatctctagactgtgccatgctagtttctggaaaccacttgagataggctgggaattgttgtggtgatattggtagtttatttctatttgagatttagtccaaacagaaatattttcaatacttgtaataaaatttcagatatggaagtgatatatgctacttgtaataatgattggtgttttgtgatgttttaacctttccaagatggtttcacattattttatttcatttcattgaacctcttatttttcatgagaaataggctcagggagattttagtgacttgcccaaagtcacggatgaattagtcagaaagccaggactagaacttggatttctttattgaaagaaatagcacttagggaaggacctcagatctgactttttcttggaagctctgttggcttcaatctgaaggcagtgccttgaggcagagtacttgagcctctggggttgtcacattggctgtttattgttatatttatttttcagtttagaatgttatctaatgaattgttttgtttactcacagtggctgtggttatgagatctttttgaaattattttacaactttttggttacgtctaaagctaatattggaaaactttaaaaactttctctgtttttcagaggtaccgaaatgctacatttggctgtgttacattctagaaaactttgtgtctactctgtctcaggtaagaaatatttttaccaatgtagaatttatattacaaattgggcttaatgttatatgagaatagatattccctagtgctgacttggtagagaacacaaaacatttagttgaatgttttcttgtcttggttaacattttcccatttttcatttattctttcagatacttaggctattacattttcatggtctactatttctgtgtatatgtatctttctagcagaggattcctcttaatcacctgcctctccagaattgtttccgggattgcctgtgactaatagaggccaattctgggtacttaagacacttgagtcttaagaaatgttctacaataacaaaattgattagatgctaagtcatagtggtttgaagtacattttctttggtgaacctcaagtattttctctttaccgttccaatttcttggtttttggttgtcttcactcagtcaggcttcatcaggtttcattctctgacatggttctgtgggtacaagtatagtgtgcggtttggtttttattaaaattatagtatgtggtttggtttttattatattttattttggcctttattaaatgtaagatataacttaaaaatttttatttcaattattagataagtttagttcaagttgagagttattttaatggatgtcagtgttgggggcattttttttatgggtatgagaaaactaagtgtctgtgaggctgttccttttaccagagatcctctcctttggagcttgctgtaaatgttaccttctaggatttggatttctcagacttattctcttcatttgggctttctttgtattttgctttcaatttgagtaatgatgcatatttactgactgagttggatattcttaggcagtctcttttcagggtgaagatcttttagatttccaaggcaggcttggtaacctggcgtggtatatggtagacatccagtaaatacttgttgaatgaatgaatgaacaaatttctgggtagtgctgaggcaattgacagtggctttctttattactcttcaccatgttctgttttcgtccccttctctgttaccactatcattttatttcccactctgtttatgtcagaggcctgataaagtgtgctctcattgattttatggtaaaggacatggtttcatgttgctcctcctagtgtcagggcatttatttagtatgccagagtaaatggagaaggtattatcatacgatataggctactttattgcatggatctagttgttcttctgtttttgaccgtaagcctgttattttactaagtgggttacacaagccatggaggagaatttgcctacagttatagttacccagaatacttctttggcaattagttccttctgaagctccatgggggctctaagcagggcagagaggagggtatcttagaagctagaaattcgattagacactaggccttccctggtcctgctcgaactatgggccaaaaagacagatgcctctggagttccactggggcttagagcacagacaagggataaaaagtgtacttatcagaaaaacgtactgaaagaaactggcatattaggtgacaatttgtttatggcatattgatatccttcaagtaagtgttgaaaatgaaagttatttgctatgggaatggtgattttatagctcttttattctttgtgttcatttaaaagctttgtattctctggggactaggagttgtccaaactacattctcttaggccccacctcacttcccttctgtctttcatttcttcagcctcttgtgatgtgggctgacaatttgtatatttttcctggcttgggcttaaattgagaagcatgggaatgtttttgttctcttgaatatgtttcttgaagttccagattgaacttttacctagcttttactgtcacaggggaagcacaaacattttctaatttaagtgaaaccactagtgtcagcagacaaacgtgtgagctgaacttgacatccttttcttcaactgctcccttctcaaatattttcaaactagaggagcctttctaaggtcagtctcctggacatacctaacaacccttaatagtcagaggctattttgctaacttctttttggtgggttatgtgtcatcaaatgtatgcttaatatagagaaaaaaacagggtcttgctgacctgaagttggcctatcttatcatactctggtaaagagaaagcatcacatggcatctcagatttctttctgatgggcttcagtttctgaataaatggttacagatgtgtgagtgtgagccgtactgattatgttgttttaaatattattttccaaaagatgtgtacttctcaagaggcatttactaaacatctgacatatttatagaattttaatggtttccatgaggagggcaaaaaagatgtggttctttacttttgacagtcttacgtaatctgatttacttaatatgtaatggctttgagtttaacatccttagattgctcagcagttacctaaaattgcaccgaaaactgttgtcaaagtgacctctgattttccagagaattttttggtttaaatcagatcttgtttaagtaaggcctgttgcataaatgtttgaatattcatgtattttctaattgatgaaactttataatgtatgtagactataatcatatatgctatattcagtccatatatcccagggcaaaacctatgcaaataattttaatattatgtcactgatgcttttttagggagaaaatggtcagaaatattagattcccaaatacttcttttattccaaggtagttatctaaggaaaattgtctttttctccatagttgcattattaaattttaaagtgctattacctgacatttaagatgtatcagtgcatttggagtttttacacaaagcctagtgtcgtttcatgccaagtttaaatattggctgctgacacctatgttcattgacatgagttcctaatgttcctgcttgcattttggctagcaggcatgtataggtgcttttcttattcagagggattgatctggttgtagatgttgttaaaagaaaaaccttagtcaaatgaaatttaacagagtttaattgagcaaagaatgatttgtgaattgggcagtctcttgagccagagtaggctgagagagactccagcacagccacatggtaaaagacgatttatagacagaaaaaggaaagtgacagacagaaaaaggaaagagatgtacagaaaatagaatgaggtacagaaacggtcaggttggttacagcttgaggtttaccttatttgaacatagtttgaacaactggcctcctttgattggccaaaactcagtgattggcacaagagtaggttacagtctatttccacctccatttaggttatagttcactatgtacagagaaacctttaggctgagcttaaaagatgtaaggaggcagctttaggctaaacttgatttaacaattttcctcttttggtcatcctctcaattttgagagattgaccacaactagtcattgatgtcactatcaccattgtaaatgtgcttatttcatctcaaaacccactgagaaatagcagaacagtggattttgtaaggtaggaacaaggaatttagtttattttttgtaaaggttagagtagagggtacttccttatgctggaatgtcctgtttagaggagaaaaacaaaacctggtctgttctaggagctttgtgtttccttaagatcttagtttgattatgtcacatttaacatgagtgacttcattttggcttggtcttgtctgttgggacctagtgcatgagttcagtccaaaacaatggccttccataattttattttaaaacttcccccttttagtcaggttctcacataggtgagagtgtgaccaaaacttagggccttagttccactctcttttaacatcaattttgggtttctggtctcaggatgtcattcataggttacagtgccctcatggtcacacatctttttaagctcttgtccttctagttgaagagagatcatgtggcactctagagatggctgcatgcaaacatttaaaacttttgagagaatatagcacactagggagattactattttgactatcaggaggataataccaagagtttggagcatgcttcttagccagggtccccatgaaccaaaccaactaaaattaaatagatcaaagaatgagctagataaagagtctgttcgttttaaataagcagtctctttgttagttccctgtaactgaatctctataatgctcaatgtgatgcatttctccatggccaacaagaagtgccagcaagtgcacagatactgctgtttagccagtaagtaatctagagcagttctattatttagcataactttcataagagaatacaaagtctgttgtgtgaccatagcctttagggtagaatcttctataaagcctatcatgagggatacatttctaattattgcctcatttacttcaaaccatggaaaaggagacctaacaaatgatgtctatttagaagaatgaagacttcttggaaatgttctctttaacctgtgacgtaggttaagaggagtggaccaatgtcctgtttctaactgattatgaggcaacaaatgtgtcattaaaatttctcacctgcattgggccttcgtcttttatctattgaggcataaggtattccatgtataaggctggctgcaaaatccttcacaaattaaagtatactctatgaatacacacaatagaccctcttttcacttctattgttcatggaagcataagcaagaaaaaataggtaagagtctcctgatagcagagaagtcttgatctgtgatcttgagaaaaagctgtctatatcatggataccatcttcttctggggagaaactttcctgtttagctttactttaaggttgccaatgggtgtacagttccaagagtggaggggcccttttgagttgtgagattattaactcaaaatttcaaggtcccaaagtgttgctgcaatgtagatggcaagggcagtctttctctggtattctcagaagattcaatctttgtgttctagattttgaaggggttgattgtcctcagtcagcagactgtgaaaagctttcttcaccaggtggaaatatactttgacaaatagagctaatgttataacatcagccctcttgcatgggaaagcttttatacaaccagaagacatgcattgaaaatgacaattgaatgaaatctttctataaatgtttaaatggctcatcagctagcagaaatgtacctgaaattttggttgtctttccaggaatatgggtttgaaaagcaaacattggttgtaaactcttttagcaacatggaacagtcactacactaattaatacttttttttttattatactttaagttctagggtacatgtacaacgtgcaggtttgttacataggtatacttgtgctatgtcggtttgctgccaccattaactcgtcatttacattaggtatttcttctaatgctatccctgcccctgcaccccaccccacgacaggccctgttatgtgatgttccccaccctgtgtccaagtgttctcattgttcagttcccacctatgagtgagaacatgcagtgtttggttttctgtccttgtgatcgtttgctcagaatgatggtttccagcttcatccatgtccctgcaaaggacatgaactcatccttttttatggctgcatagtattccatggtgtatatgggctacattttcttaatccagtctatcattgatggacatttgggttggttccaagtctttgctattgtgaatagtgccataaaaaacatacgtatacatgtgtctttatagtagcatgatttataatcctttgggtgtatacccagtaatgggattgctgggttaaatggtatttctggttacagatccttgaggaattgccacactgccttccacgatggttgaactagtttacactcccaccaacagtgtgaaagcattcctatttctcctcatcctctccagcatctgttgcttcctgactttttaatgattgccattctaactgatgtgagatggtatctcattgtggttttgatttgcatttctctgatgaccagtgatgatgagcattttttcatgtgtctgttgggtgcatagatgtcttcttttgagaagtgtctgttcatatcctttgcccacttgttgatggaattgtttgtttttttcttgtaaatttgtttaagttctttgtagattctggatattagccctttgtcagatgggtagattgcaaaaactttctcccattctgtaggttgcctgttcacgctgctggtagttttctttttttgctcatgaagtccttgcccatgcctgtgtcctgaatgatattgcctaggttttcttctagggtttttatggttttaggtctaacatttaagtctttaatctatcttgaattaattttgtataaggtgtaaggaagggatccagtttcagctttctacatatggctagccagttttcccagcaccatttattaaatagggtatcttttccccatttcttgtttttgtcagctttgtaaagatcagatggttgtagacgtgtggtgttattggttatatgccattggtaatggcattgaatctataaattaccttgggcagtatggccattttcactgtatggattcttcctatccatgagcatggaatgttcttccatttgtttgtgtcctcttttattttgttgagcagtggtttgtagttctccttgaagaggtccttcacatcccttgtaagttggattcttaggtattttattctctttgtaacagttgtgaatgggagttcactcatgatttggctctgtttgtctgttgttgatgtataggagtgcttgtgatttttgcacattgattttgtatactgagactttgctaaactttcttatcagcttaaggagattttgggctgagacgatggggttttctagatttacaatcatgtcatttgcacacagggacaatttgatttccctttttcctaattgaataccctttatttctttctcttgcctgattgccctggccagaacttccaacactatgttgaataggagtcgtgagagagggcatctctgtcttgtgcctgttttcaaagggaatgcttccagtttttgcccattcagtatgatattggctgtgggtttctcataagtagctcttattattttgagatacgttccatcaatacctagtttattgagagttgttagcatgaagggttcttgaattttgtagaggcgttttctgcatctattgagataatcatgtggtttttgtcattggttctgtttatatgatggattatgtttattgatttgcatatgttaaaccagccttgcatcccagggatgaagctgacttgatcgtggtggataaactttttgatgtgctgctggatttggtatgccagtattctattgaggattttcgtgtcagtgttcctcagggatattggtctaaaattctcttttttttgctgtgtctctgccagcctttggtatcaggatgatgctggcctcataaaaacagttagggaagattccctctttttctattgattggaatagtttcagaaggtatggtaccacctcctctttgtacctctggtagaattcggctgtgagtccatctggtcttggactttttttggttggtatgctattaattattgcctcaatttcagaacctgttatttgtctattcagagatccaacttcttcctggtttagtcttgggcgggtgtatgtgtccaggaatttatccatttcttctagattttctagtttttttgcatagaggtgtttatagtattctctgatggtagtttgtatttctgtgagatcagtggtgatatcccctttatcattttttgttgcgtctatttgattcttctctgttttcttctctattagtcttgctagaggtctatcaattttgttgatcttttcaaaaaaccagctcctggattcactgattttttgaagggttttttgtgtctctatttccttcagttcttctctgatcttagttatttcttgccttctgctagcttttgaatatgttttctcttgcttctctagttcttttaattgtgatgttagggtgtctattttagatctttcctgctttctcttgtgggcttttagtgctataagtttccctctacacactgctttaaatgtgtcccagagattttggtacgttgtgtctttgttcccattggtttcaaagaacatctttatttctgccttcatttcgttatgtacccagtagtcattcaggagcaggttgttcagtttccatgtagttgtgcagttttgaatgagtttcttaatcctgagttctaatttgattgcactgtggtctgagagacagtttgttatgatttctgttcttttgcatttgctgaggagtgttttacttccaatcatgtggtcaatttttgaataagtgcgatgtggtgctgagaagaatgtatactctgttgatttggatggagagttctgtagatgtctattaggtacgcttggtgcacagctgagttcaagtcctggatatccttgttaactttctgtctcgttgatctgtctaatgttgacagtggggtgttaaagtctcccattattattgtgtgggagtctaagtctctttgtaagtctctaaaaacttgctttatgaatctgggtgctccagtattgggtgcatatatatttaggacagttagctcttcttgttgaattgatccctttaccattatgtaatggccttctttgtctcttttgatctttgttggtttaaagtctgttttatcagagactaggattgcaacccctgcttttttttgttttccatttgcttggtagatcttcctttatccttttattttgagcctatgtgtgtctctgcatgtgagatgggtctcctgaatacagtacactgatgggtctggactctatccaatttgccagtctgtgtcttttaactggggcatttaggccatttacatttaaggttaatattgttatgtgtgaatttgatcctgtcattatgatgttagctggttattttgcccgttggttgatgcagtttcttcctagcatcgatggtctttacaatttggcgtgtttttgcggtggctgataccggtctttcctttccatgtttagtgcttccttgaggagctcttgtaaggcaggtctggtggtgacgaaatctctcagcatttgcttgtctgtaaagaattttatttctccttcacttattaagcttagtttggctggatatgagattctgggttgaaaattgttttctttaagaatgttgaatattgtcccccactctcttctggcttgtagagtttctgccgagagatccgctgttagtctgatgggcttccctttgtgggtaacctgacctttctttctggctgcccttaacattttttccttcatttcaaccttggtgaatctgacaattatgtgtcttgggtttgctcttcttgaggagtgtctttgtggcattatctgtatttcctgaatttgaatgttggcctgccttgctaggttggggaagttctcctggataatatccagcagagtgttttccaacttggttccattctccccatcactttcaggtacaccagtcaaacgtagatttggtcttttcacatagttccatatttcttggaggctttgttcgtttttttttttactcttttttctctaaacttctcttctcgctttatgtcattaatttgattttcaatcaacgatagcctttcttccacttgattgaatcagctattgaagcttgtgcatgtgtcttgtagttcttgtgccatggtttcagctccatcaggtcatttaaggtcttcttctctacactgtttattctagttagccattcatctaatcttttttcaaggtttttagcttcgttgtgatgggttcgaacatcctcctttagcttggagaagtttgttattaccgaccttctgaagcctacttctgtcagctcgtcaaactcattctccgtcaagctttgttccgttgctggcaaggagctgcaatcctttggaggagaagaggtgctctggtttttagaattttcagcttttctgctctggtttctccccatctttgtggttttatctgcctttggtctttgatgttggtgacctacagatggggtttgggtgtggatgtcctttttgttgatgttgatgctattcctttttgtttgttagttttccttctaacagtcaggtccctcagctgcaggtctgttcgagtgtgctggaggtccactccagacactgtttgtctgggtatcagcagcagaggctgcagaacagcaaatatcgcagaagagcaaatattgctgcctgatccttcctctggaagcttcttcccagaagggcaccctcctgtatgaggtgtcagtcaacccctactgggaggtatctcccagttaggctactcagggttcagggacccacttgaggaggcagtctgtctgttctcagagctaaaacaccatgctgggagaaccattggtcttttcagagctgtcagatagggaggtttaagtctgcagaagtttctgctgccttttgttcagctatgccctgcctccagaggtggagtctacagaggcagatggccttgctaagctgcggtgggctccgccaagtttgagcttcctccagccgctttgtttacctactcaagcctcagcaatggcggatgcccctccccctgccaggctgctgcctcacaggttgatctcagactgctgcgctagtagtgagcaaggctccatgggcgtgggacccacctagccaggcgtgggatccacctagccaggcgtgggatataatctcctggtgtgccatttgctgagactgttggaaaagggcagtatttgggcaggagtgtcccgtttttccacgtacagtctgtcacggcttcccttggctaggaaagggatatcccccaaccccttgcacttcctgggtgaggtgatgccccaccctgctttacctcaccctccgtgggctgcacccactgtccaaccagtcccaatgagatgaaccaggtagctcagttggaaatgcaaaaatcacccgtcttctgtgtcagtcacgctgggagctgcagatcagagctgttcctatgtgaccaccttccaattaatacatttttaatttggataattttatctcttccatgatgagtcatagaatgcagagcttttaataacaaaagctttaaggactcaggaagcacaaggtggctgtccaggttctccatgagtccatgcttaatgttggacttaatgtcctcttaaataacagttgtttctccaatttaggttcacagcactgataactgaaagttataggtattttgacttggatcatggagttcgttcacattgtatatataaacaatttcagtactgtctggtttagcataaaaatctgacaaagtattttcttggtattgaatatttttgtcctgcttgggttagcagttttataaactagtcagtctgttcattaaagttctgagaattctttttttttttttttttgaaatggagtctagctctgttgcccaggctggagtgcagtggtacaatctcagctcattgcaacctctgcctcccgggttcaagcgactctcctgcctcagcctcctgggtggctgggattgcaggtgcccaccaccatgtccagctaatttttgtattttagtagagatggggttcactgtgttggccaggctgttcttgaactcctgaccttgtgatccaccctcctcagcctcccaaagtgctgggagtacaagcatgagccaccacgatcagccttaaattctgggaattcttaccccatccaaattatatgatcctaaagttaccagaaacctgtattcaagagtgcttgtcggggtcctttctatcctttcatgaacctccttaaagataccatactctaggattttggatgcttgtaaagttttcaggaactgcgttaaaattaagcaattaactgtggaaataactttaaatgattataaagacataattgacaaggaaatgttgtcatttatatggcctataataacataacaaccataaatatgactgatagcatatgcccagacatactagaattttagaaatcccatacaattttggtacatatattaataacatattcattaaaatgtaacttgaagattaaaaatcatttcatgtttgacagtgcttcccgtgtaatttaacctttcagataatcctgtttatctccttttggctgcttcaggtgccctctgtagcatcccaaagttagaggctgaaagagacttaattttgacctgaaatttggttttgggaagcccatcaaattgtcaaggttttataacacttgaccaagataggatcacaggtcaccataaaataatggtcattcgtttagccaaagtgataattacaagaatttttttttgaaaaagaagaaacctgtactctttgatagaggagactcagtctttcagttataagacctaagacagcatgacagatcctatctctttttcctcctcctttttttcctttttgcagtttactcaacgcataaatgaaaatattttactgtgtcttattaataaatgctacacaaatttttgttcaaaagagaaattaaattttacttttgtattagtgtattataaatactaaagctaattttaataaaatctcataaataaatttatctaatctgtcttctcttaaccacacaagatttccataaacctttcattttgcattttccagctttctatattcatcttgttttttctatttttttactccttcaatttgaaacctataagaaacctcaaaccagataatatttttaacacatatctttgtgcttttttaactttcctcatgaaaagcatatcttgcttttttttatttattttttattgtactttaagttttagggtacatgtgcacattgtgcaggttagttacatatgtatacatgtgccatgctggtgtgctgcacccactaactcatcatctagcattaggtatatctcccaatgctatccctccccgctccccccaccccaccacagtccccagagtgtgatattccccttcctgtgtccatgtgatctcattgttcaattcccacctgtgagtgagaatatgcggtgtttggttttttgtccttgcgatagtttactgagaatgatgctttccaatttcatccatgtccctacaaaggacatgaactcatcattttttatggctgcatagtattccatggtgtatatgtgccacattttcttaatccagtctatcattgttgggcatttgggttggttccaagtctttgctattgtgaataatgccgcaataaacatacgtgtgcatgtgtctttatagcagcatgacttagagttctttgggtatatacccagtaatgggatggctgggtcaaatggtatttctagttctagatccctgaggaatcgccatactgacttccacaatggttgaactagtttacagtcccaccaacagtgtaaaagtgttcctatttctccacatcctctccagcacctgtcgtttcctgactttttaatgattgccattctaactggtgtgagatggtatctcattgtggttttgatttgcatttctctgatggccagtgatggtgagcattttttcatgtgttttttggctgcataaatgtcttcttttgagaagtgtctgttcatgtccttcgcccactttttgatggggttgtttgtttttttcttgtaaatctgtttgagttcattgtagattctggatattagccctttgtcagatgagtaggttgcgaaaattgtctcccattttgtaggttgcctgttcactctgatggtagtttcttttgctgtgcagaagctctttagtttaattagatcccatttgtcaattttgtcttttgttgccattgcttttggtgttttagatatgaagtccttgcccatgcctatgttctgaatggtaatgcctaggttttcttctagggtttttatggttttaggtctaacgtttaagtctttaatccatcttgaattgatttttgtataaggtgtaatcacagccgaattctaccagaggtacaaggaggaactggtaccattccttctgaaactattccaatcaatagaaaaagagggaatcctccctaactcattttatgaggccagcatcattctgataccaaagcctggaagagacacaaccaaaaaagagaattttagaccaatatacttgatgaacattgatgcaaaaatcctcaataaaatactggcaaaccgaatccagcagcacatcaaaaagcttatccaccatgatcaagtgggcttcatccctgggatgcaaggctggttcaatatatgcaaatcaataaatgtaatccagcatataaacagagccaaagacaaaaaccacatgattatctcaatagatgcagaaaaggcctttgacaaaattcaacaacccttcatgctaaaaactctcaataaattaggtattgatgggatgtatttcaaaataataagagctatctatgacaaacccacagccaatatcatactgaatgggcaaaaactggaagcattccctttgaaaactggcacaagacagggatgccctctctcaccactcctattcagcatagtgttggaagttctggccagggcaattaggcaggagaaggaaataaagggtattcaattaggaaaaaaggaagtcaaattgtccctgtttgcggatgacatgattgtatatctagaaaaccccattgtctcagcccaaaatctccttaagctgataagcaacttcagcaaagtctcaggatacaaaatcaatgtacaaaaatcacaagcattcttatacaccaacaacagacaaacagagagccaaatcatgagtgaactgccattcacaattgcttcaaagagattaaaatacctaggaatccaacttacaagggatgtgaaggacctcttcaaggagaactacaaaccactgctcaaggaaataaaagaggatacaaacaaatggaagaacattccatgctcatgggtaggaagaatcaatatcatgaaaatggccatactgcccaaggtaatttacagattcaatgccatccccatcaagctaccaatgcctttcttcacagaactggaaaaaactactttaaagttcatatggaatgaaaaaagagcccgcatcgccaagtcaatcccaagccagaagaacaaagctggaggcatcacactacctgacttcaaactatactacaaggctacagtaaccaaaacagcatggtactggtaccaaaacagagatatagatcaatggaacagaacagagccctcagaaataacgccgcatatctacaactatctgatctttgacaaacctgagaaaaacaagcagtggggaaaggattccctatttaataaatggtgctgggaaaactggctagccatatgtagaaagctgaaacatatcttgcttttgtttatacactatgtatacaaaattgtttcatctctagtagctttaattacatatatcaactaaaattttaactcttagtaaccttaatttctgattaaaaccctagaaaataatttcgaactaattttatatcagtatttgtgataaaaactatttttttaagtttttagaaagatttttcttcaaattattgttttttaacagacctaaatatatgtagcttttctgtatcatataaaaataacatcaacgtatacagacaaactcatgtttaataattaatgtttcaatattttaacttataaatgactcagacattttatgattattatttaatttaatataacatgacctgaagattttaaattactgaaaataattttgaaaatatgacacaggtaccctccttaatgtcttcccttagtcattctgggtgccaagtagcctcatggtacccaggaggcttatgaaggtcaaggcctctctgagtcctgacataccaggtgcaatggtcaggatagaagacagggctgtgaagactatatctggaggattcaacccctccccaaatagccagtaggcaagcaggaaagcaggggagaagggagcatattgggcttggttctggcttgtagctgatggtctaggcactaagaacatgcctctaggccgggtgtggtggctcacacctgtaatcccagcactttgggaggccgaggtgggccgatcatgaagtcaggagattgagatcatcctggctaacaccgtgaaaccccatctctactaaaaaatacaaaaaattagctggacatggtggcgggcgcctgtagtcccagctactcgggaggctgaggcaggagaatggcattaacccaggcggtggagcttgcagtgagccaagatcgtgccactgcactccagcctgggtgacagagcgagactctgtctcaaaaaaaaaataataaaaaaaaaaaatgaaaagaacacgactctagacctcgtcatgtccacctatgcagacccccaaatccagaggctctaaaccaaaaacagctcacagtcaatcaagcaaatatcttgttatatttaactgataattttgaagctattcctattttagcaacaattttagaatttgctttatttaccaaatattatcacagacacataacacacatggacatgaaagattttcatttgctagcttttaaatagttttccttttccctatttggtctattaatcttccagttacttgtttcattgccctaagcaattgttaaccaggcaacaaatttgcatttctaaaataactcttaggtacaacaacaaaaaattatattccatatgtacatagctaagattttaggcctaaatattgtatcatcatttgtctcaaaccaaggaaaaaatggtgctcccataaaagttcagttaagacaacatggccagaaaggcaccttaatcaaaggtgtgacttatgccaatttaaaacaatgggaagagtttctaatatacacaggcagacatccttaaaaatggtgatttccttaatagatgtaaatttcttttgcagaagggtttcaagatagccaatgaaattccagaaaggcatattttagttcaataggtgttcttaatttagctactgtttcttaactaaaattactgagttcagagtggagcccattaaggaatagggggaagaaagcatcctctatgcctggactcagcatggttgcatctgaaaaagaagcaagcctattttgcctgagggcctgccttttataaacactttatctttagttgcttaagctttttatttgccttttataaagagtcttttaataaaaatattgaaaaatttggccgagtgcagtggctcacgtctgtaatcccagtattttgggaggctgaggcgggtggatcacgaggtcaggagatcgagaccatcctggctaacaccgtgaaaccccatctctattaaaaaatacaaaaaatcagctgggcgtggtggcaggtcccagctactcgcgaggatgaggcaggagaatggtgtgaacctgggaggcggagcttgcagtgagctgagattgcgccactgcactccagccttggcaacagagcgagactccatcctaaaaaaaaaaaaaaaaaattgaaaaattttagaagcttccacaggtcaatagccatccctagatgagactatttggggagccatcattttcaaatttacatctttggtgcagtgttgttcatttggaacattccacatttgtaacttatctttagtaatattttgccatttctgttagactttactgcttctggggcctaatacttatgcacgtataagctggaagttactcagttcttcagaaactaaggttcccatttttacctcaaatattggctttggctctcagacctccttggtcaacctagccaatgacttttccctatctaagtgtgcaagaaaaatgaaacaaagtgggtagaacacagaaatttctgctaatttccaagagctaaactttataccgcctgcaatatttccatttactaccagtttttttctgacctagtcagatataagaagcccccttactggatacaagacagttaattatcagatccagtctgatcctagatccagtctgatcctagacccagtccagtttctgttgtgacttccaaacccagtttggatcagaaatttgctcaaagaaactaggagagctcaaaacacaaatatgtggagcttctgaatctgagagagaacttaccatgatccccagttgctgtgagagagcaatggacacaataggcctagtgggtacctcgcttggtcgctcagctctcctgggggttgttagaacctctactttggatcccacttctgacaccatctgttaaaagaaaaactttagccaaattaaatttaacagcatttaattgaacaaagaacaatttgtgagttgggcagcctcttgagccagagtaggctcagagagactccagtgcagccacatagtagaagatttatagacagaaaaatgaaagaggtgtacagaaaatggaatgaggtacagaaacagctggattgtttacaactcagcattcaccccatttgaacatggtttgatcagctgaccgcctttggccaaaactcgatgattggcacaagggaaggttacagtctgtttacacttccatttatgttatagttcattatgtacagaaaaacctttaggctgaacttaaaatatgtaaggaggcagctttaggctaaacttgatttaacagttcagaatgaaatttgaaatttctttagggataaaccaggtgactcttggagctgctctttctggtttcttggaggctagaactctcttcaggttaataccgtatgtgtttccctcacccatgtggctggtttggttgtgattcctcctcagcttcctggcacctcaatgattttactaccatttagaatccagaaagccttcatcctccatcaaggtcagcaggcaaatttaagcctttatgtttgtttcttattctattggtatataaaatctatttttggccaggtgcggtgactcatgcctgtaatcccagcactttgggaggccgaggcgagtggaacacctgaggtcaggagtttgagaccagcctggccaacatggtgaaaccctgtctgtactaaaaatacaaaaattagctgggtgtggtggcaggtgcctgtaatcccagctactcaggaggctgaggcaagagaattgcttgaatccaggagtcagagcagtgagtggaaattgtgccactgaactccatcctgtgcaacagagtgagactctgtctttaaaaaataaaaataaaaaaaaaaacaacaaaactaatgttaattaaccatttgtggggaccatggaactgagtagaaatgattctccttcaagaaatcctcccctgatagtttttcctcttttaactattaaaagacaaacttaagacaatttaaatttaatggcctttaactgagcaaagaatacctcaggtgttgggcagccctcacaaccaccagaggaggttcagagcgctctgctcttcaacatgagcaggaaacatttatggacagacaatgcaagtgaggtacagaaacagcttcattcctgacagcttagcatttaccttacttgaacatggtctggtcagttggctgcctacgattggctgaatgtcagctaccatgattggccaggctgagaaaggcaaaagggagggaaaaaaaaatctttacttatcttaggttctccagctggggctctataaattagactggccaaagactaattaacaataggaaaaacaagcagaaatttattaacatatgcattgctcatgtacacataggaatattccataaggagtgactcaaaagggtagttggaccttgggctaacatagcattttaggtgaaataaaagaaaatgggttttgggcttctgtacacagaaggcaagttatgggaaggtgaccagaaaaagtgtggtaaacaagggttgcttagtaaagtttgttatggtgatttaagttgaggccttctccattgaaaagagctaagggtactcctcttcctggtacaagggagggagacttttttttataaatggagatttctttttttaaatgacgacctgtttttagagcttttccggctagttccctgtgtccttttgctcaaaataatccatatgccaaagagtcctgtttgaggtgtcatattctggtaccctgcagtggaaaagacatattcttgaagctgttttctttggggaaattgtcgttgacaggatccatggacagtaaaatctttactgggtgcgaggaccacattccctgaaagttgttaaatggtggacaactgggcagcaggatacaatacatagtacctggttctaaagatttggtttaggttctaaaagtctggtttgaatactcagttctctaccttgaatactgtatgattttggggaaatttctgtaaatttgttttgaacttaaggtgcttcaattctaaaacggaaataaaaatatattcttacaatctcagtgtatgttggtaaattcttctggacaaacaaacccaaaacaaataaatgctcctatataaatttataaataaataagtacacatacatatatttttagatatttttagtgattgagtactacccagtttgaggactattgcatttgctttatgataatttaaaattttccttaacttttacattttggattaatgagtgatgcttctttatggaaaaaattgctttctgaatcctttttctttccaacacactttttaatcataatgttcttgctctatatgtataaaatacagataaatactcttttctcatttggaaagaactagaaagtgaagcacatgcagtctattaaatgcagagtatttttctgtgtttggaaggagattcttcttggcagacttcaaataaaaaacattttcctatttacttgttgagggaagcttagaaaatttctcaattaaattagaatataattaggggcttgaatattttgagagttggggtaggaacactaattgcttgaaagtgttggggatttttttttcttagacactttgagtcatttctttgctctattaatgtttataaatgcagagaacttatttatttcagatctgaaattagagggttttgttgttatttaaataattacactttactcagatataatctgtctaataaaaatagaatataaagtgtccccagggtaatattttgtctaatggtgtaatttagctgagatgtaaattgttttaactgtactggctttgtgtgtcatcagtatgctaatttttcacaatacataatattttagtgctttgccattataatttccctaaaattacttagaatcggagtagtggatgagaacaaattaatgttttttagtgtacacaaatacaaagtaatccttttttttttttccttaggaaccttgggtaatgtggaacatgggaaccaatgtcagatgaaattgatgtatgaacataatcttcagagaacagcctgcaatatgacctatggatcatttggtggtgtaaaaggtaatttgcttttaatcatgagtatgctatttcaagtgacagatttagaatatttggtcatataaaacagaggattaagtggtttgactctcagaaagagttaaaatagacattttattgaaacctttgtatccaaatgcccaagcaagtctatggccataccaccctgaatgtgcctgatatcgtctgatcttggaagctaatcagggtcaggcctggttagtacttggataggagaccaaatacccaatcaaaataataaaaaaaaacctttaaacattggaagtctttgatttttatataaccagcatatttttatatggtctatagaaacatttctaaaactgccttttctacagattttgtcttttatatataagctgactgaaactgagctctttttgtgtgtgatggaactgtggtacctgactgtctctctcagtggaaaaaatggttgaccttattgacaggaagtcactgctctacctgctacaggcaggataaagctgcaaacacctctctccactctacccatatctggggctgctgtacagggttgtgtgggtcgtttctgcacagggcagctggaagagtgggggatgtgggtctgaaatacagacttgatcctgctcatcgagccatgctttctggcttggagtaaatctacccagaggaaggggtgctttttctgtgtttcacaaaggcatcacctttatctagcactggctcagtgagactgggttcctcccaccttggcagaggggtgtctttttctaattagcacaaaggccaccttcattgtgtccactcagtcccagagcttccagattcaccaaggcttggtgcttgcttgtgtacactcttgctgttggcatgggagggctcttatttccaaaccaacttctctccctgcaccgtgacagggtagtagaggagctggtggtgctggattgaggataggaagccaggtggtgacacttacctgtgtgattgtgtgactctgtgtgcatatgtatctatgttcctgtgccacctgcagagcatgtaactagggattttataatatcttagctcttcctggactcatgttttatgagttcattgtttaactgttgcattgtatttttccttagcaacatgagaaaatgacttcattttggaagtattattcatttgtgtgaactcagttttttttttttattaatacatacagataaagacaaggaataattgaatttgggtataccaagcagcatcagggatatttttggtggtgatgtgcaaataaatattttgcataactgaagtgatgtgaaacaaaacacttggttaggttggaggactgcttgagtaacaggaatgtttggattacttgaacgataaggagatatctagagttagatgaagagagaaatttagatgaggggagagtctgtcagtgaagtgcttcctcagcttttagaactgatttttactgttctttgaaaaaatgtctgacctgattagggaacctaggcctcccttgtttaattagctattttcaattcacttttccctactgaatctccaaaaagcaaattactaaattccatacatcataaaaaaattataacatgagaaaaaagtgctttggccaaataaaagtgttttttgatagcataacagtggttctttaggtcacatcaaatgttatatagcagggatccccgatccccaagctacagatgtgtagtggtccatgacctgttaggaaccgggtttcacagcaggaggtgagcggcaggtgagtgagcaaagcttcatctgtatttacagccactccccatcacttgcattagcctgagctgcgccttctgtcagatctggctgcatgagattctcataggagcacaaactctattgtgaactgtgcatgcaagggatctaggttgtgtgctcttatgcaaatctaatgcctgatcatctgtcattgcctcccatcatgccaagatgggaccatctagttgcaggaaaacaagctcagggcttctactgatcctacactgtgtcgagttgtgtaattatttcattatatattacaatgtaataataatagaaataaagtgcacaataaatgtaatgtgctgagtcatcccgaaatcttcccccttcctggtctgtggaaaaattgtcttccacaaaactggtccttgatgccaaaaaggttggggaccactattatatagattgcagtgtactttttattttattatcagatcaagttaaccctgttggatacactgagttctcaatttctcttcaaagaatcagtatatcagtatgttcagttctttgtccttcattttaaagcttaacttccttgtagtttcagtaaatagccttttccaccagttttaatcagtagttcacatctgttcccctggtcacctgctctgtcctgacttatcctggttgcctgctttgacctcagtcagccctggtcacccgctctgacctaagtcacctttagttacctgttccataaccgtctttcctgccaaactgctcaccccgccactctggctcatacccctgttctctttaaaatagccaatcagaattagcttagactgtgtggtccaaccctagccaataggggaacaacacagcagtagggggtacctgtgtcaggaataagaatcccttcccctcccttgttcaggtgtactctcaccattgctccatctgcaagttgcacccttctatagatgtaaaattgccttgctgagaattttttttttttttttttgagatggagtctcgctctgtcatcaggctggagtgcagcggtgtgatctcggctcactgcaacctccgactccctggttcaacaattctacctcagcctcccgagtagctgggattacaggcacatgccaccacgcccagctaatttttgtattttcagtagagatggggtttcaccatgttggccaggatggtctctatctcctgacctcgtgacccgcctgcctcagcctctcaaagtgctaggattacaggcgtgagccactgcacctggccgagaaaattctttgagcactagttcttcttttcggcaccgaggacaagcatttgtttgtaacaatctggtggcccgtatgggagcccattctctcctggagaacaggtctccagttgcctcttgtagggagaaatgtcccactgccttgttgcggtagcctcagggtgagagactggggatccacctggtgtgacaaataaacccaggctagcaacctggggaaaaggatcctcacataccgtggcgaccaggtaactctgtgcacagagcgaggtaagaaacatcataaaggcgacaaagtatttccttggcggtcgggatattcagggtgctgaatgtgtatgtgaatgatcacaagcactcctacttgaggtgctgcttgtgtgaatggtacaaagtactactgctgtgctgagtgagtgggtcctatctgcgattccgtggtcacctcatatggcttagggaggatcctgtcataggatttgtaccagcatgccgatgccaagagggacttagatctcccccaggggagctgccagagtggacgaagtgcaagaagggtgcaaggagccttctgcaggtggaactaaaggataggtgggacacttctaatatgagaaattgaacctaacagccctagcatacctctagagaataataggtgagacatttctatatacttctttgtacctggaaatcccaaagtgctgggattacagatgtgaggcaccatgcccagccaaatcttttattatttttaatataacttggaaatgctgttcgagacagaaagccaattttcacctttgcattagtacactattgatgtcaaccaattcttaataaaaccttatagacaaatctatccaattttagtttgatcataagataagattcttataaaccttgcatataaccctttacacctttttttgttgtagttgttaaaaagcagatcagtgctctaagaaaagcctgttgtgcttttattccaatgttcaatttatggaaaaatggaataatacacctttaactttagccgatatgttcacacacagaatttcttttacaagattaatttttcaccaaccttccacaacttgttcaaacctttggctttttcccatctaacttaaaacaatccttggccgggcgtggtggctcacgcctgtaatcccagcactttgggaggccgaggcaggcggatcacgaggtcaggagatcgagaccatcctggctaacacggtgaaaccccgtctctactaaaaatacaaaaacaaaattagctgggcatggtggtgggtgcctgtaatctcagctacccgggaggctgaggtggcagaatggcgtgaacccaggaggcggagcttgcagtgagccgagatcgcaccactgcactccagcctgggtgacagagcgagactccgtctcaaacaaaacaaaacaaaacaaaacaaaaaactatcctttaaccctctaaactaggcaaaaagaaaaaaaaatccacatttccatgccttcttataatcttttttcaaaagcacatttcattttcctgacacaccttgcatataaaactctttctctagtagtctcaattatatgttacactgttaactcttagaaacttacttttggtgaaaaatctggtaaatacatgattttaattatgtactaggtgtggagcctagggcaccagacagaagtgcagataaggtgtgactctcatgtatagttaggggatgtggctaactccacatgtccccaggccttacttaaaatctaacggctccacagcagttaagttgaacaattttcaagagtcaaagaagcagtttatgaccttaaagcatttatcaaacctaatatctgacctgcctaatttagaccaagtgtctttattttactaataatctttaaagctgtgtttttatttcccaaagattacttaagtcacgtgaactaaaaggcattatagtcttaatttttttataatatttaagtgcctattatttttaaaccaattaatcagaacttatatagatatatataaacatcacacacacaacacatataaatacacagacaaaagaagatccaatagttgtaagatttttcatttgccagtttctaagtttccctttaaagcattcagtttctagccttaataaacaggtataggtggaaggcgaaacagatcccccaaaattaagggttccatttttataccagatcctggatcccaaaaaagggatgggtagcagcccatttcccatgggagtcttatctctcagtaggggatggggacatttccataccttctaggtggccaagagcatgcttctctgatccaaacatggaaagagctgagtgtccccccataacttccattagctgtccccaaaagtgtatttcctacctagttattacgcatgaaatctctcgcataatatgaagtaatttctaatacccccaaaagtaaaaaatgtgagagggatctattttcaattcttagggttccacgagggaaacagatgtctttttttccccccaaaatggagtctgcagcacctcctctgtttttcccaaggtgtcccaagctgttaaatattatcttaggtcctctcgtgtgcatcaagaatgtcaagaagacaaaatggagaaaattcagttgactgagaagaaaaaaccccttttccagaaaaacacaatccacgaagaggaaaaaaaaacataaaggcctttaaaatgtacgtataacttggatatctgcttttaagtaagctgacttttaaccatagtgctccttaaaaaaaattccttataaacctcttattaccctactttaaccaggccaaacagacaatatttctggcttttaaatgttaccaaaagtaacctcacaggtgaaaccaataagccttagttactaagctacagcactggacagtttccattgcccttcccagaaagagcctagagcagtcaattttgagcttgcaaaagcttttaactgcttgagataatttttagagctctgacataaactccaaaattcctgtcctccagatggctgagaacaagagaaagtactgccacgtacttaaaaggtcaagctcccaaggacataaaacaagacaagcggggaacctcattcagtttttttttgtttgtttgcttcaggaacctgcagcaaagtttgtagctgactagtttgctgggctagcttgaacagcaggcttgttctaagcccatgtgtcctaagcccatgttcaatcttaaggtactcctctttatgacagaatatagtaaaaaacatttatagcagaaagttccccagagttgctatagcttaagaccagcctcacaaatcctttttctcattaattaaaatattgcaagaggtagtgatttttaccacacctataagcagtttgcacacagagagagagagagagagagagagtgagagaagaaaggcaagggaagggagaaaagcattgcctgcagtggggtgggaagacgaggagcttaggggaagctagagaaagacccaccattgcagtgacactaaacaaagttcaggtggttgcttgtaatttgctaagggatcttttccagcagtcccatcagctttcaagtttccccttttggggagaaaagaagctccccatgtccggtgatcctgtacatgcctaatccccccacagccatcagcaaagagcgcaaggcagattaatccaaagaaaatagtggttaacatcccataatgccaaattcatttttaaccaagagattttactgagaggggcctctaaccgcctaaatcttaagaagaactctaaccttcctaagttgggtctcgaacccaaatttgtcgagaatccttactttttattaagagggtcatttaacccattctgtcttaggagagactttaaatcttctaagttgggcctctaatccaccacttaaccatagtcggccaatgggttctgcattctgtttcctttgggtcaggagtctccttcgtatcgttctttcatggttcaccaggagaatgttactggaaaggggtcctgatctagacccccagacagggttcttggatctcaaacaagaaagaattcagggcaagttcatagagtaaagtgacagcaagtttattaacaaagtaaaggaataaaagaatggctactccattggcagagcagccctgagggctgctgattggctattttatgattatttattgattaaatgctaaacaagggatggattatttatgagttttccaggaaaagggtgggcaatttccccagaactgaggtttcctcccctctttagaccatacaatgtaattccctgatgttgccatggcatttgtaaattgacatggcactagtgggagtgtcttttagcatgctaatgcattataattagtgataatgagtagtgaggacaaccagaggtcactttggtcgccatcttggttttggtgggttttggctggcttctttactacatactgttttatcagtaaggtctttgtgactgtaccttgtgccaacctcctgtcttatcctgtgacttggaatgtctaaccttctgggaatgcagcccagtaggtctcagcctcattttacccagtccctattcacggtggagtcgctttggttccgatgcttctgacaaagctatgaatgaacatctttttacataaatctttatctacatttctgattatttccttaggatagagtggagaggttgagttattaagtcagacacttgtaaaatatttttttccaatatgaaagtagctttagtccttaaatactgtataaattgcaaaaagttcagaacttaggtagaagaaagtaagactccaagacttgtacatttcataagaaagcccactttctaagcctgatgtctttaatgtatatttagtgtgcacctttccagtagtgagtgggtgattcttttaattggaaagcttccctggagttgatgttatttaaaaaagaaacctaaaaatccttgttttctactttcctctatttcatatggcatcttatggaattattgtttggtattcatgtcatgtctcaataaaggaattaaacaaaactaaagcccaacacagttttaagcaaatgtgttatttaaattatggaaaggcagtgggagaagaggtgtgcagtattttgtgtgtgcgtcaaaatgaactaacactagatggcagtcctctataacttttggccttagttgctgctgctttagaataaggtatggcaagaaatcactaatggaggaatgttgatcccataataatgctttgtcttttattaaaaataaatgtaacttctttgagttgcacaacagggtgggtttttaaaagacagttaattataacagataacagaatataatataaaagcgctttctagctgtgcttctcaaacttttaacttttttaaaacttttaagttgcatttgaattataaggggatcgtgattaaaatgcggattcttgtaagtctgaaattggaccttaaatgctgaatttctgacaatattccaggtaatgctaagctgcagtgatctagaggtgtgctatagccctatgtctgcaaaatgcttattttgtatcaggcagtgttctaagagcttttacaggttgaaaaagtaactgtgagtggtggagggaggatttctacccagcctgtctgcatctagaggcttctggtattagtcacactaaactgcctccttgattgggctgtgagtgaatttacctcctcccccattcagaaaaaactttcctatcagaatggagtgtagtttggtttggctaaagttaagtgcatatctttgattcttcatagattatgggaaatatgttaacttctgggtcgtatgtttgctttttcagttttatttttctggttggtgctttggtttgtaagaaaagtccaaaaaaatttaaaattcctccaaaaattataatattaattggttgtattgggcttttatttatttatttttgcagaggggaagtgtgtttgaagttaaaaatgttcgttgttttttaaaatttaaatccaagctgcttttttgaaggaatatgtgattttgggttctaaaaaaatattagtttatctttgttttttatgctcttgacaaattaatgcttgcaaaatttagtgagtagcataagcatagacaaacaagttacagtttggacatatactaaatcaattttgaaaaggtagattttaatagatttaagatatgttagtaatattggtggaatttatttgttttggtaatttgaactctacttgtttttgaaaaaagaacaaaatgatatttttgccagattttcacttgcttttgtttctttgtgttactaaaatttccaatggttgttaacatggtattttacctagttaagacaaacttgccatttcaaaataatatttggaaaaagacagcattaatattgattcacagaaagccagtggtgaagaaaataatattgttttaaggtcaacagctgcatatacttaacgtagtaaaataagatacttcttgtagtctatgtagtatcaagatatttgagctagaatttctttcactgatagtctgatttagagtccctgtagtaactgacccaaagtcctcagttacccgaaatttaccttgttggctgtgaaaagatgatgaaccttatataggaatctttcaagtgtgtaacagggacactgggaaggaattgttggtttgttgtaggtgcttgggcactttcagggactgaagcaagtctggtgtgttgttcctcccttacatcatctctctttgtccctccgtctgtccatcccctcatccattcgatgcatatttactaagaattctgagtgcccaggcactgtgttagttttcttggaatagacagataaggaaaagacagtttatgggctggccatggtggctcatgcctgtaatcccagcactttgggaggctgaggtgggcggagacttgaggtcaggagttcgagaccagcctggccaacgtggtaaaaccccatctctacttaaaatacaaaaaaattagctgggcacggtggtgggtgcctgtaatcccagctacttgggaggctgagacaggagaaatcgcttgaacccaggaggcggaggttgcagtgagccgagattgcatcattgcactccagcctgggcgacagagcgagactccgtctcgaaaaaagaaaaaagacagtttatgttctcaagtagctcacaatctaggagtaataaagatgaagggttaactataaaataatgaggcaaatcatgatagagatgaatatgtgcaaaacgatgccctaggattagagcagctccctgtagttgagtgaatgtgtgtgtgtgtgtgtgtgtgtgtgtgtgtggcgggtgggggtggggtagggtggggggaggggcgggggcgaggggagtaaatgagagtggggagtgtgctgttaccttttttattccagcccttcatttttatcctctttaatccagagattagtaattcccagtttcaattttatggtcttcagtatggtctttagcctttgttgcccaaaggttgaaccattcaaattccttctggtatagtttgttcctctcaagaagattacttttcagactttatagtgctttaaaaaccttgccatttttaggctactaaattgactttttaacttatagcataaagccctcagtaagggacaattattttctttagctaccagctgatctttaatggagaaggatatagtgctcttcaagagtactatgactatgtttgttgagaatgacaaatttaagggtagggataagaagaggaactagcacagagattaaggaatataaatttagagacagaagagcatggtgtcatggaaggagagggaagggagagattccaagaggcactgaaggacttgagagttcagaggttaagcagctggagtattggaaagaaaatgttggatttggtcatttgcaagtcattggtgattttagggagaataattttaacagaagggtaggaacattggtcatgttgcactggaatgaggaattcatagagaagaaatggaaatcccaaaggaaaggtgctttgtaaaggggtttgggcatgaaggtaggtgcaattaaagccatagccagaggggaacatgttttataagggggggagaagtctttgagaacacatcatgaaatcttaatctgataaaccaaatgcctttcatagatagtattttgctgaaaaaatttgacctgaatacatttttacttttattttattttatttttttgttttagagacagggtctagcattgtcacccaggctgagtgcggtggtacgatctcagcttactgcaacctctgcctcccgagttcaagcagtcctcctgcctcagcctcctgagtagctgggactacagatgtgcgctaccatgccaggctatttgtttttttttgtagtgacggggttttgccatattgcccaggctggtctcaaattcctgggctcaagcgatctgcctgcctcagcctctcagagtgctaggattataggcatgagccattgtgcctggccccatttttatttttaaaattatgttgttttgattatgatgtgcctataatttaaaacattgtttctcatcgtgtaatttgtgccttatagccctgttgaattattgccttcttttcataataaatatgtggtttatggggaaaaagcctatttaatacttcatgagattaaaagtcagaccctttggaaaaaaaagaaaaggaaaagaaatactttattagaaattatcactattacaccaccatctggttctttcttcaatgtttttttaattaaaaaaaaatagttgctgggtgtggtggctcacgcctgtaatcccagcactttgggaggctgaggggggcggatcacgaggtcaggagatcaagaccatcctggccaacatggtgaaaccccgcctctactaaaaatacaaaaattagctgggcgtggtggcatgtgcctgtagtcccagctactcaggaagctgaggcaggagaatcgcttgaacccaggaggcagaggctgcagtgagccgagatcgagccactgcactccactgcactccagagtgagactctgtcttaaaaaaaaaaaaaaaaaaagtagatacaaggtctggctatgttgcccaggctggtcttgaagtcttgggctcagccagtatgcctgcctaggcctcccaaagtgctgggattacaggtgtgagccaccgtgactggctctttcttcaatttttatctttatcaacatcttaaacttatttgctttcctttaaaaaatttcttttcttgattatagagctttgttttacatggggatttttttttttttttttttgagactgagtctcgctctgtcgcccaggctggagtgcagtggcgcaatctcggctcactgcaagctccgcctcccgggttcacgccattctcctgcctcagcctcctgagcagctgggtccacaggcacccgccaccacactcggctaactttttgtatttttggtagaggatacatggggatatttatattttgagcttacctgttaacacacaactcaagagttaaatgttaccgtcaaaaatccaaacctcccatttcctgcagaggccataattctgctttttcatgtggatttagatgtacttttgttttctttccaaccttgtctttggtaaaactgaagactcccttggttgcaactaacagttggcttaagcaagaataggaagttgactggctaacgtcacttgagccttctctgtgatcagatctggtttctctcttttcatctcttgcttccatttcctgggataggctatttccttctggttacatgatggctatagcagctttaaatctttacttgtcacattctagtccatgtaaaagaggttcttcctttctcgtagaaggctcaacaaaagtctgtttccaactcacaggctctggttgggccatctctgaaccaatcattgccaccaaaggaatgtgattaacttgagcctgagccacaggtgtgggaagtcctcttaccactaagggtaagagtggagagggaagaggggtggatttccagaggaatatcagtgaataattaactgtggtgaatctgaggactttggaggtgatcaagaaaaaagacatggctatcagatggcagtagaacacaataagctttatttgcgtggtgctttggcaggattgcattcaagaggaggtcccttacagcaagagaccttccagagagagtgaggtggcctcaacccagaaggggcagaggtcaggggagctttctggggagagaggacctagagtggggcttaggtgtccaggttgctgagaagcaggactggggagggcagcagcaacatacagtcttttacatgctcagggtttgttttacctgtagctagtggatgttgggtgcagtttttcagggtatgcaaaacaggctgaaaatatccttatttgggctatgtttaaagcaattgatataaaaatttgaatttggtatccgtgagctttgagttaatggtcagtctgaatgaagaagtaaacaacatggggtcaatatataaaggggtcacctttaacctggttctgtagcattaatgaaagagagtgaaataggtgctgggtggccaaaaaactgtaaatatccaccttgcttttggtttcactttctctcctaggacctccctgtggtactaccttagaactgacaggagaggccagcagtggtgatttgagagtgtgccctcaggtgtgtatatgaattggagaaggcagggcctaagcagttaaaggatatgctctgtcctgggctgaatgcagcctcattctggtacagtgtgtggggataattgcttgaaatgtttgtgtgtattttgaggatttgttgtaattgaatttaattgagtgctttgcaaaatcatttgtcatgattttaggcttggtatgcatagatatttaaattcgggggcatgtctcaaattatttacagaagagattgaaacttgaaataatgtaagttatgatttttactttatcttttcctcactttcagtattcttcacatgaggatgtatatacttttgttataaaagtagtcttgttcacagaggcatatttaaaacatatgtaccggtaaaaaaaaaaaaagtaaatgattaagcaccacctcccaaacgcaaccactgaaaacatatatgtggacagtagaatataatccagaatgtttcaacttgagctaacccagagtaattttagagtaattttacagtttctggaatttagtcatcttaccacctaaagggcccaaccagtgaaaagcatgtttatcatgtcaagtctggtgctgtataatggaatgcaagcaagttatgacaataaatgttaaatggaaaagcctttactttatatgcatatatcttgaagtcagttgagtaatttattcaatattggtgtttattttgtattaaaatatatgaatttactagaagacagaaaaaaatctgcgtgatttgggtcaagctgcaaataggaaaagtggcatattataagatattcctaaatatttagtgatgatacatttcacctgcaattcgtgcacttgaaatcaaaacttgtctttcctttaagatggcaaaaatatatagaataatataaaaactgtgcacattttatatttggggaaagacctcttgaactgcacataagcttctgcttattctttctaacttgcttttcaggttactttttcagtctatatacttggaataatgctcttaaatgactttcgttacattaaacctgagatttcctgacacgtagtagtgtcctagtccatttgtgttgctataccaaaacacctgagactgggtaatttataaagaacagacatttatttctcacaggtctggaggctgggaagtccaaaatcaaggtgccagcaggttcagtgtgcagctagggcctgttcctcatagatggcaccaccttggtgtcctcacatggcagaagaacagaggagcagaagagcaaagggcctaagctacttccctccattctttcacaaggcactaatccattcgtgagggtgaagctctcattacttaatcacttcccaaaaggccacacctcttaataccactacaatgggaattaattttcaacacaggaattttggatgacgttcagaccatagcaagtagtctcttacagtcattttagatctatcccttttacatcctatccatattatgtggatttgggctgctgtgacccagtggtcacatgacccactggttgttggagatttggtaaatgataccataaccatttttcacttgttaacaaactgcccctcaattataatgtggtatctcctatatatatctatatatctgtctgttagggttttatttgggttcttttttttgttgttttagttatttagcctcccatatcactttgtcactgtgtgtttgttttgtttaattcatattcttattaaattgctcagtagtgtgaaatgtttttagagacctttgttctgattcttggttctgtttttcttcatctgtctttcgcatattgtcttcccctgtccctctctctgcctttttttttttttttttttgtagtatgtttgtgggtttgccaggccagcctctttaccttgcttgagcaatcaagcttagcttggcccactctgtttgggcctgtttgcttttttatggtgctggtgaatttttcttgccttctttcctacccaatcagagaggagtttgttttccttcctgacgtactgttttgacggttggatatcatgcagtgtgtctgcttatcacctatctaggggcagtggagaagacatggggaggaagaagggttgtctgtagcagccttactgtaggatttggcttcaaccctctcttttgtgattttgctaagcatcttgaattactgtcacactacctggttggtctgtaacctgttatcttggaaggctgagagatattcttagattttggatcttctctcttactattcatcagttttccttgagtcagtgccatttgttgcttcccttgtttgtatttcattagaagctgtttccattcgccaccccctacttttcttctggtcctctgtgggtgtgtgtgaggcttcacatggcaattcctcctctcgcctgtcttccacttcttctactcatcataattgctggagatatttatttagcttggctgctattttttatggtctatggcctttcctgcttttttctttttgcagaaaaaataccaaaatgataaaacctgtatttttcttttctgaccagaaggaatgtggtaaaggtagaacttatggtattatgggcatttccatttctctgggctgtctacatctcccctccccttcctggatttgtcttcctataagtttgagagttttaatgaaattttcagaattttgtttattcacagcctcacccctccttctccttatgtggagtttggtcttagcagcttcacaaaatgcaccaagtccagccctgaagattcttggaaacatctgctttatggtcaccatattttaaagattgtggtatgaaattgtgttctttctttggtttcattgccattggtgtatgtttgctattttctataatttacttatttatttgtttaatccacgaagttacattttttaaagggtctttaaaactaatcccaatgctggatttgaaaaacgaatgttcatcataaaaattcctgtggattcagcagttcagttgtttgaataattctggtagacttatttagtacagattaatttcattgtatttgatgtgaatatcttttttccagattgttattggcttttaaactgtgtaagtgttttaatgtggtcagatcattcttttcttgtacactttatttcttctaagcttagaaacttctcttccatgcagaattttgatgtttctgtttcctggagtttgattatctagcaggaatttttatatttatttatagagaagactatgtggagagagagctagtatttattctcttctatatgttgtggtattgcatttagcccagtgagataacataatcaccattttttcatactgggagactggagatcagagagatagaggtgtttctccagacacatccaggcatagctatctgatttgaacccagagctatctgattccaaagctcatgttcttcctaatatagtaactgttatttaattgccttgctagttagagagaaggtctatgtgttctgagaaaggaatgagagggaggtttttctataagcttcctgagggcagggactgtgtcttttgttcatcactgcatatctagtgtctttcacagtctttggcacatagtgggtgcttaattagtatttgttgaatgattgaaccaaaatagacatttgattgggcagggctgatgtgttatatactttagactttggggttatttttttagaacacgttagctcagttccattattctagccaacttctaagttttattttcctctttaacaaacatgttaaagtatctattacaaggcatgggttattgtggtcactgtctcccatagtggtaaagtgagggtgagtaacttgggcctcctgggttcacccttagtcacattatttctcaatatgctggtgatgcagcatattgtatgtaagttatctagtagaaatacactgtcttatctaattgcaactgtgtttctatagattactcttcctactttttagcttggaatgtggtattcagaactatcgagtatttgtgataatgtccacaaatcaaaatgtttttgttttaaaaaattacttaaattctctaatatttagtgtaaaagacacatcttttcatctgtaacacttttctctctgtgtcctgtgaaaattcattttcctttaattcttccaatttttctactttgattgttttttcagccaaatggaagttcagaaaagtagaatttttaccaaggaaaatttaatgtcagagtctagatataatatcggcatggtatagattataaggtctgacagcacagtagtctcacgtttgtgactgaggtggaaaaaaatactgtatataaaaggttcagtatgtttggactataattgttagtaaaggaagtgaatggatttttatcaataatatatatgagcatagtggaatattttttaaatcataaaatgacttctataagcttgtatgggattatattgtcacataaataaaaattcatgaattctttggaataaaagtcctgccaaagaaaatagtgaactgaaggataagtcagtcaccttttgccacatctttttaatttttattttaaaaaattaaaaaaaaagcatccttcccactctgaggttttgctacatcttgagacaatcctagataatcagatcctcagccttcaaataacttctaattgtctgaactggagcctttttcttatctgccaagaaaatgtattagtggccacatgtggttgctgagaggctgtgcttcccaaagctgtctggtttctttgattgccatccagagagtgaactgatatgctcagctggggtgaatgaacagccagaacacagccttgctttttttgtgtgggggtgttagtgctaataaaagattaacgctgttttcctcacagggaatcaatggataatgttttgatagcccttgtctcaccagtgaaccatatggcccttattttctcatacatgtggttgaaatgttagagcgtaatgttagagaagaatctctgtggtgtactggctcccgttccttgcctaggcattaaagtgtaggtgttttattatattggagaacttccctcatttgtttttaagatcctttatggatccacagtgagaagtcggaagatcaaggggataataggattgactctcatcctgtgctgagttttctcatatacatggcattcatttataaaatctctggtccaagacctataaaataatgttactttcaaatagtgatttcctgtatgttatgttgcataaaacccttagttcctgggggaaggttataaagagagttcccagtagtctgcagattggttttttacatgatcatttaaagttgttactttttctaaaaggtgagttctgattcccgttatacatacactatcaaaatttggttaaatacctccttgcctgctattgctaagagagggaaagactaaaaaaatttgaggtttcttagtgttgtttgaaaaaaaaaataatttctttcatggtagctaaatgccaagactggaaaagctttaaggtgatgcttgtggtcagcactgcctttgacaagatggttaaatgtggtggtcttgataggatttgacaaccatttttgatccatatatatagttcatcgtggtctctttttaaacagtggagtaatgaagctgttaaatatcctactcaattgagaaggaaaatggctaccatgaactactttattcaagtgacactgcaatataaaggcttccagcagtttcaaaaatgcatctacacaacacattgccatgagaaatgaacaatctgcccttcccccgggtctctcttaaattaagttgattcagccacccttttccagtctctacatggaaacttgctttgaggtttaaattctgtagcacaaaataaagatacatattaatgcttaatatgaaaagcaactgcttgtgttgactactagcatgtcaaatatatttttaaagtacactggtactctgattataggatatactagatatataaaatttaaggaggtttttttgatggacttttgagtagttttcagtttttggccaatatgaataaagctattaagatctttatataattatttatgtggacaatacaaaaatataagtatcatacaagtgtaaaatgatttttaaattatactgttaaaaaattcccaatcttttttactgttataaaattttatgacacccaagaatattgagaatagagttctaatattggtaggcatgctttttgtagaagaatcatattatatgtgtttacctcaaccttcaaagatactaaatttgtatcttcagtatttcatattgtacataatttcagtcacttctggctaacttagaatatcagaaatggtaaagcttggcatcagaacaagttcacctatattatattactatttcaattatgtttctacctaagttaaaagtgagctggattttaaaatcaaattttcttttattgaaatttgcgaacatgaaccttttaaatcagcatttctagatctttgctaaaataagacagtactatttaatatggaaacaataactgagatgtaatcctaaatttaatttggaaagttatatcatgattttaggagactgtgaacataaaatgtgtgagtggaaaattaagatttcatatggcttttttcagctggttgattaagtcctatatagttcattgtcctaaagatgaaatttatataaggttttggaaggcaggatttgtatattaaaagtgcatgtttccaaggtggtacaaactgtttttaacaatctatcatctttcatttaccaagggaactatgtaaaaagaaaaggaaaatgttaagtagaaacaaaatgttgagatgatgataagctacaaggaaagaaaaaagactttagaaagaatactaaaaagaaactagctttttttcctcaacaatctgtctgaattcattttgctttcattatatatctagcccggaggcaaagtatgttgagtattacaacaaagagggtgttataaggaggactttttttcaataataaagtataacatatgtgtaaaccatgcaaccttgtaacaggaaactttataataagggaggactgtgcttagcttttccacaattttggaagaatgaattttattaggtgttagacaaagaaattatcaactgacttttatgctgtaaggttgaaagatttgttatgaccatttctagacttcagcagtggttttaatgtgggtcctgatatattaggaacagtgcctagcactattaatatgtctactgttgctagttctctaaaggaatatgatgtttaacttttgcctttcaatgaaagattattcaaaattctgttattctgtggttttctcagcagtattaggctattcttgaattgatcaacacataatataatttgggaacccaatcaatggttcttttctttttgaaagatggcgacaaattctttttaaacttgggaaattggctccatcattcatcccttattctttctttgcttctcttgcccaacttcctgaaaaccatattgttttgatgtcaatatttagaatagattatctgttggggaatcagtttgtattaattatactggaataaatgtaagtttgacaaatgatgtaggttagtaggtattgggcctaatgggttactcagttaatgaagacactaaaattagggacctctaatatgcctgaaacatatttcctgtaaatttcccccagtttcaagattaactggcaatagctatgtttttctggcttttaaaggctaatatatcatggtagagttttaggatttatatagggcttattatggaatagttgagctctttgtatttatcgcacagttattgaagcaagctagaagtgtagaagtcagtcctcaactttttggcttttcagcaatctattttttttttaatgttatacttactcagtctcctttcctcctcctctcacttcaaaacttaaaaatgattatacaccacacacatttactggcaattttaaatgaaggtgggataatttaaaaagactctttaaatatggttcaattcgctgcagggctgctagaaaaataaggatgaagtttttaggcaacgagatcttagaaggagagggatgttagaagtatgttagcaagatacagtatattgttatacatttaaaaataaaccatttattttaagccttgcaagagcccagaaacattcaaaataacttttaaccatgtgtagttaatttgataaaaataaaaagtcaaatagtacaaagcatatgaaggcctcactctccccattattctccctactctctaatatgagtcactgatgcctttattttttctgatggttcactccttatctctagattgtgtgatcacaccctatttttggatttatcctatttagattttgatgtaccacagtggtagaagttttgattattgacacttcctttttcttatcctccttccaattatatcactgttttcatttctgttgctggtcacctgtgcacgttcaaacagtatacttaatttctatttcttgttctaccaactttcagctccttgattctacattttataaaatgaagacattggctatctttatcattactgttatttctctctgatttaagtctctcaacctctatccgctctacctttattcttacattgtccaagttgataatgtttacatgctggtctgtaactataacttaaatcttccatgacttctcatgattctaaaagttaaacacatactttgtttgaattatgtaaatattactcattgtagagtactaagatcacagaagtccagtgtccttttatgaatccaatgtcctgtgctactcaaaggaaaatgatcttagtggatttttaaaacacacatatttatttatattgccttacaattcctgaaggttttcctggctttcactcatattattgaatctgtcagtttttttctagttcctggagaccttcctgttatctagagacaaggaatcccccccaacacccaattttcttccttttaatgatctcattttgttctggagtaattttgttttgctcttttgtttttcttgggcttttcttatagcaggttttcctcacatttctggtcatcagtttttatttgaggatgaatcagtagaaaaattgagcactgtgaaagtgggttggatttttgaacagctggcttagctttattggctatcaatttctatttgacagccatacaataaaggctgactgtaagctgtatgtccctggagacaggggcctgggtttgtcaactggtgggctttacttttactttaggacagttaggggataactggctgttttattggggactcaaatagcagtagttgtatgtcttttctcctgaggttgttttcttactctagaggtttttttcactcctatttggggaccatgggcataatgtattctggacctgggtggggaaggaggttttgggttgactatcaggatgaagactttttcttcatgtattttcaggtgtctgccccattcccatgctcttctatgcctggtgtccccctaatctggagttccttgtttagttcaccctcttcagaatatgtgctttctgtttcctatggaggaaggatcctgggtatctgtttatttccatagactttttatttttattgttaatttttttttctttccgttattattccaattttagtatatgtgctgccaaagcgagcacaaattccatagacttttaaacagctcctctgttttcagatcctacgtcatcccactttctgtggtacctagtgcttttacttcccgagacttttcagaattctgtggggtgaatcagtatatttctctctaagcattcaaagttgacctcactctactcttcggtatcatttacctcttcttgttcactttccattttcacagattgtgggtaggcttaccacaggtctgatttctttgaagaagctcatgtttgtttcttttatccttgttgtttgggggcattttttttttatttgagagaaggggacatagagtctttaattcaccaccttaaagcaggaagtcgtgtctgctcttttgatgtaatgtttctagaaaatattagagaaaaacttgtcccagagtcactagtcaggtaaaagaatatgtgattggctttctccaaaggctcttattttctgtcctgtgtgaaaaaggaaagggggtcagaatggttgccaggtcatgattacagaagctcggctgtaagtgatggatgaaaagcttggttgtctgcctccatagttgagtgagttatttcacttctgggacccagtgaatgttcagacagttgagtaatcccacatttgggtatgtggtaggcatcagggtgagtaatatatgagaacttggcataataattgggaattataaggagagtggcaatgttcgatagggctctgtctcaatttcctacaatttcattttcattgctgtcaatagtattggttttgctcagagaatgggggcattcttaactttggcagatgctaggattattatcattctagtattatttttggaagaagaggagataaaaactgtgcttgcccatgaacttcttctatatgagcattttaaccagtgtttgttagagatgttaataatctcaggctccaattttctatctccagttaggaagcctggtttatcttgtgacagaatatgagccatttactattatacatgtgtgttagtccattctcacattgctataaagaactacccaagattgggtaatttataaagaaaagaggtttaattggctcagggttctgcagggtacaggaagcatggctgggtaggcctcaggaaacttacagtcatagttgagggtgaaggggaagcaggcacgtcttacatggttggataaggaggatgagagagaagggagaggtgctgtacacacttttaaacaaccagatctcatgagaactcactcattttcatgaaagcagcaagggggaggtctgcccccatgatccagttacctcccaccaggcacctcctccaacattggggattacaattcaacatgagatttgtggtgggggggaacacaagtccaaaccatatcaacatggctctcctgttatcatccaaaacttaacttacctggagaaagaatcagcatctgagataatgtctataaagtactcagtcccatgcttggtttcccttacccattgtcaacctccagcttagtaactccagtggaaaacaaggggctcccccaataactctgaccaacaaggatttgccaagggctccaagtggcccagcttgggtcatatgctaattctggagcccaccactagtgtcagaggatggtatactctgtgggcccacatcttggttaagtcctcagctgcttggtaggtggtaggggttggtaaggtagttagtcttatttgaatcacacagaatttgggaatacatgctggctgataaaaactacacgtttgctatagagagaagagacaaaactctacaatagtggttctcaaactttagtgtctaccagaatcacctgggaggcttattgaaacacagattgctgggccccattctcagagtttctgattcagtaggagtggcatgaggccccagagttagcatttctaacaggtttccaggtgatgccaatactactggcgtggggaaccacactttgagaaccctgctctctagaacagtggttcttacattttagtgtacagagacttttctgggcttactaaaagtgttgtttctgaggcctcacttccagaaattcagatttgagaagtttggggtacagctcaggaatgtgcatttttaatgtaccctagataattctcatataggagccacaggagttcagcagactatggtatgataaatgctgctctgtaggttgcatgtaacaagtattagaaattaaccatccttatttatttatttttacgatattggaacactacttttcttttctttttttttcttgagacagagtcttgctctgtcacccaggctggagtgcagtgccatgatcttggctcactgcaacctccgcctcccgggctcaagcaattctcctgcctcagcctcccgaatagctgggattacaggcgtgtgacaccacgcccgtctaatttttgtatttttagtagagacggggtttcaccatattggccaggctggtctcaaactcctgacctcaggtaatccgcccgcctcggcctcccaaagtgctgggattacagtcgtgagccaccacgcccggccagaacgaacactacttttctaatttccacatgtacgtttgtgtcagtcagcatcctagcaggaaatacaacatatcttggatgattaaaagatattttaggccgggcatggtggctcacgcctgtaatcccagcactttgggaggccaaaggcaggtggatcacctgaggtcaggagttcgagaccagtgtggccaacatgttgaaaccccgtctctacaaaaatacaaaaattagccggtggtggtggtggcgagtacctgtaatcccagctacttgggaggttgaggtaggagaatcacttgaacctgggaggcagaggttgcagtgagtcgagataacaccactgcactccagcctgggtgacggagccagactccatctcaaaaaaaaaaaaaaagttattttagtgaagggatcactgatagaagtgtgggcagggttaagggaacaaataatgaagcacacagattatcagcagtggaagctgttatcacttctaaggtgaagggacaggaggaggaaatgatattattttgagggcttattaagagagagggccatggagaaaggtccttcctcctactcttcattcagatgaaaacctctcacccccaaacagatgagacacgaagtccaatcagttaccttattgtcatggggtaatatttcagccatattcccatttgaaaccaaagttgcatgtagccatcactactaccctcatacaagatagcaggaaaagaggtgtattgggagaaataattgactagtataaaatatacttagctgtaacagtctccaccattgtagctagtcaagaggctgacattgataatcataacttcctctctccactactcatttcatgttcctcttagtttttccagtactttggttggtcacaattctttacttttatacccaaaaggatttaagtctttagtgggcctgtctttactgggttactgtagtttcccatcgattttatcagataggaacattgtgctaagaggcagcccaatgaatcccttggattttagacatagcctacctgtttttattgcaaagcagccatctagtttcctcttagaaataaggatcaatcattctttagtacactaaccttcttctctgcttatcacccctatgtggtggagtctcgaccagagaattctctgcttcaaatttagtagaaccatggctgtattccttggtggaagctttcttttcctgggaaccatattctccagtgttttcacagtgcttgttcattatgagaaatccttccatatacctccctctctagacctcctttttaaccagtatttcagttttgttctttctaattacttaatcccaacccattagctattgcccacctatcagtataaatctaaatcccaggtcatcttccattcccagtaaactgaccaccagatatattgttcaaatttacatctactggaaaatttctttttgtaactgttttttaaggatacccctaagtgggaaaccgatactttagctgacttcaggtacaaggatatcatgcaaacccatctgtaaaccaggtctgtgtatttttttcttctgttcattggttatggggaactcctcatgaggcatgaaagaggcagtgaagcagcaagggtagatactataggagtttgagccactagtgctcattaaatttatgtcttattttcctgttcatatatttgatttctatttaatcaaatagattaaattgatcttcacatacccaatttcatgactcagtagatcaagtagcccattttttgatggacatctctggtcatgtagtcactgtcttgatttgacagttggaagtctcaatcttttttattttgtaagtatttaattaaagcagatagcccactcagccatctttataatgattattgttatcaaaaattaagtccagtagtcacctatctcaaagctttgtccttcactggcactccatcccacattgcagcagtgatcattttaataattgtgatttcattgcatgtcctatattttgttgtttcatttttttcccctggcagggaggtcatctgcgcattcatcaaatatgtgtgagcaaaccagtccccaaatctctgcaaatccccaagtactgtatcagttaatgacccagcaggaaatagattcatggcagatgattcaaatgaagggattttaaagcaaggggttacttatagaagtgtgggaatggttaagagaagaaactgtctttatagttagtaaagtaagtataaactatctaatttaagccattgtattttgggatatctttgttatagcagcttggccttttctgtaatagacataaaaatttacattattatgacactagttgttactgatagctaagacattattatatttcctttctttttctctgaggttaaaaataagacgtaactttatccctttacccaggtttgcctattgttaatatttttaccttatttgctttatgttttttcctgtcccttgctctcacttgctctgtctccttctctccctctctctctcatgtgtgtacatttttccctgaacagtgtgaaagaaagtatgtatttctcaagaatagaaatattcttatataaccacagtacagttatcagtttcccaaaattacattgatatataacatttttatctactgtatcatccaaattctaattttgtcaattggtctaataatataatataataatgtgccctgtagcacattatttcccatctcaatgattacatttccatcctaactattacagaatctaggctagggataggcattgcattaaattatcatgtcttttagcctcttttaatttggaaaatttcctccaattttctttgtcttttatgacattgacatttttgaagaatatagtctcccataccattaaattttttttctcattttgtctcttacttccctgtgattaaatcaagattatacattgttgtccaaaatcctgtcaagaataggtgatattgcattcttcctatattatcacatagaagcatcctcattaatgattaattttgatcttctggttaagcttgttacctgaattctccactgtgtaattactaattactggtgttttatgccttgcaactaataaggaaatgtaaatattttgcttttcatcaacattcccccttgaattgataacccattagcaattcttgcctgcaataatctttactgtggtagttgcaaaatgatgatttccaaattggcacttccttcacatttgtcagttggttctcaatcttctactgtaagcagtagatctttcttctcccctatttatttgtctgcttattatgtggattcatgaatttcaatttttttctgttagttttaattcaatactgaacctaataattttgatgcttaaattgtcccagatttggccagtgggagcctctttaagctggctcctgtgtccttgtgacatgtcttcttttttttttttttgttagcatttctttactttctagcatagtaagatgttccaggctaatctgatacctatcctgctgcagccatctatatagtattagagaccaagatatagatgctaggtgtgatcctgttactatggtatctttacttttagcccctttcagggacagtgctagaaaatatgtgcatgtatatacatatatacatatctgtacataaacatatacatatatgcacatgtgcacataaatgtgtacacttacatatagatataactttttttttttgagatagagtcttgtgctgtcacccaggctggagtgcaatggcgtgatctctgctcactgaaacctctacctcctgggttcaagcgattctcctgcctcagcctcctgggtagctgggattataggtgtgcgccaccatgcctggcttattttttgtatttttagtagagatggggtttcaccatgttggccaggctggtcttgaactcctgacctcaggtgatccacccgccttggcctcccaaagtgctgggattacagttgtgagccaccatgcccagcccatagaaataacttaaaagtcatgcattcctaccattatatccaacttcagttcattcctacataattcttttttgccatcccctattcagtatttatatgtttcttctaagtgaatatctggctctcaacatcaagccacatattcatttgctcatgtctataatacatctaaagtagctgcagaattgattttgaccatttccctatgataaacaaacctctgtctctgttttctttttctagcaaattcctctaagtattcgtgttcccagaggctgctacttccagtgctgcaccctttcaaattccttctctgtagccagagctttgaacttgtagatccaacccatgttgagaatttttgcatttattgtttcaccttttccttctggggtggttgggtctgtgccttccataagtcctttgctttcttctgttctttttcacagaatcttataagcctttctttcctcactttcaataccctgaagtttgtggtagtagcagtgggctgatggtagaagtgccatggaatttgtttcttttttcttctacatatggtgaaggcagcaaatgttctttctcctagtaatgcagaaagtatggattcagtgtggttttatgttttttctaggagggtagggggaagtgggtgaccactattattttctgaattcaggaaaattctgtttttttttttaatttttaatttttgtgggcacatagtaggatatatatttatggggtacatgagatattttgatatatgcatacaatgcataatcacatcagggtaaatggagtatcctcacctcaagcatttatcctttgtattacaaacgatccaattagactcttttagttatttaaaaatgtacaattaaattattactgactatagtcatcctattatgctatcaaatattagatcttatttattctttctatttttttgtacatttagccatttctacctccccatcccccaactacccttctcagactttggtaatcatctttctttatctccgtgagtttaattgttttaatttttagcctccacaaataagtgagaacatgtgaagtttgtctttctgtgactggcttatttcacctaacataatgaccttcagttacattcatgttgttgcaaatgacaggatctcattctttttatggctgaatagtattccattgtatatatgtaaccacattttctttatccatttgtctgttgatggaagcttaggttgcttctaaatcttggctattgtgaacagtgctgcaagaaacataggagtgcagatatctctttgatatactgattttcgttcttttgggtgtgtaactgggagtgggattgctgggtcatatggtagctctatttttgattttttgtggaacttcctcactgttcttcacagtgattgtactaattattcccatcaatagtgttagaaggttcccttttctccactttctcagcagcatttgtcacagttcaatgttggtaggttgtatgtgtctaggaatttatccatttcttctaggttttccaatttattggcatatagttgctcatagtacctcctaaggatccttttaatttatgcattgtctgttgtaaagtctcctttttcctctctgattttatttatttaggtcttttctctttttttattacttagtctggctaaaggtttgtcaattttatctttttaaaaaaccaactttttgtgtcattgatcctttctactgttttgttaatttcaaattcatttatatctgctctaatctttattatttcttttcttctactgatttttggtttggtttgctcttgcttttctcgcactttaagatgcatgattaggttgtttgtttgcagtttttattcttttttgatgtaggcacttatagctataaaatttccttttagtactgctttcactgtatttcataggtttcggtacattatgtttccattttcatttgtttcaagaactttttcaatttccttcttaatttcttcagtgacacactgatcattcaggagcatattgtttaatttccatgtatttgtatagtttccaaaattcatcttgttgttaatttgttattttattccattatggttagaggagatgcttgatattatttcaagttttttgaatgtttaaagaatcattttgtgacctaacatatggtctgtccttgagaatgatccatatgctgaggagaagaatgtatattctgcagcctttggatgagatgttttgtaaatgtctccatttggtctatagtgcagattaaatccaatatttcttgttgagttcctgtctaggagatctgtccaatgctgaaagtggggtgttgacatttctagctactattgtgttgagttctgtctttttagctctagtgatatgtatttttttcttttttgagacagagtctcgcactgtcacccaggctggagttcagtggcacagtcttggctcactgcaacctcgcctcccgggttcaagcgaattctcctgcctcagcatcctgagtggctgggattacaggtgtgcgccaccatgcctggcttattttttgtatttttagtagagacgtggtttcaccatgttgatcaggctggtcttgaactcctctgcctcggtctcccaaagtgctgggattacaggcatgagccaccgagcccagccagctctagtgatatttgttttatatatctgggtgctccagtgttgagtgtatagatcattataccctgttgctggattgactcctgtatcattgtatgatgaccttctttgtctcttattacagtttttgtcttgaattatcttttgttttatataagtgtagctactctggctcttcttttgatttccatttgcatggaatctctttttctatccctttgatttcattctatgtgtatctttttaggtgaagtgtgtttcttgtaggcaacagatcatcgtgtcttgttttttcatgcattcagccactctgtgttttaattggagagtttagtccatttacatttaatgttattattgatatgtaaggacttactcctgccattttgttatttttttctggttgttgtgtggtcttctcttccttcctgtcttccttttaatgaaggtgactttctgtggtggtatgttttaatttcttgcttttttgtgtgtgtgtatctcttgtatgtttttgatttgaagttcctgtgaggcttgcaaagactgtcttattacccattattttaaattgatgacagtataaccctgattgcatgaacaaaaaacaaacatgcaaaagaaaactctacactttaacttcattcccctgcttttttttgtttatttttgattgttattatccccctgctttttaacttttgttgtttctctttatgtcttattgtactatgtcttgaaaattttttgtaattattatttttgattggttcatcatttagtctttctacttaatgtaagagtagtttacccatcatgactatggttttgtaatatttctgtgtccttactattgccaatgtgttttgtaccttcaggtgatttattctttctcattaacatccttttcttccagattgaagaacttctttagcatttcttgtaggacagttctggtgttgaggaaatctctcatcttttgtttctccttcatgcttaaaggatatttttgccagacacactattgaagggtaagggtttttctttccttcaacactttaaatattttatgctactctctcctggcctgtaagtttccactgaaaagtctgttgccacatgtattagagctccactgtatattatttgtttcttttcttttgctgcttttacgattttttctgtatcgttgaccttcaggagtttgattattagatgccttgagaaagtcttaattaggttaaatcagcttagtgttctgtaaccttcttgtacttgaatgttgatatatttctctaggtttgggaagttctctgttattatctctttgcataacgtttctaccacccctctctacctcctcatcaaggcaaatacctcttagatttgcccctttgaggctattttttagatcttgtagacatgcttcattttattattttgtttcctttgaccatgtattttcaaataggctatcttcaagctcactaattctttcttctgtttgatcaattctactattaagagactctgatgcactctttagtatttcagttgtatttttcaactccagaatttctgcttgattctttttaattatgtcaatctctttgttacatttatctgatcggattctgaattccttctctgtgttatgttgaatttctttgaatttcctcaacacatctgttttgaattctctgtctctgtttctctgggattggtcctggtgccttatttagtttgtttggtgagatcttgttttcctggatggtcttaatgcttgtagatgtttgtcagtgtctgggcattgaagagttaggtatttattgtagtctttgcagtctgggcttgtttgtgcctgtccttgagaaggctttcaggtattcagagggacttcagctccaagcacaatatcgctgtggtttctgcaggctggtagaggtacggccttggtagccttcgataatatctggaggaattctctggaatacgaggcagagactcatattcttttcccttactttctctcaattgaacgtagtctctctctctctgtgctgagccacctggaactaggcatttggtgatgcaagcagtcttgtggccaccaacactggggactgtgttgggtcagccctgaagccagtgtagtactgggtgtcacccaaggcctgctgtaaccactacctggctacctcctatgttcactcaaggccctagagttctccgatcagcaggtgctgatgccagccaggtttgtgcccttcccttcaggatggcaagagcccccaggtcccaggcagggacagagattttagaaatttgcctgatgttcaattctactgcggctaagctggcactcaaaccacaagacaaagtccttcctgctcttcccccatctttccacaggtagaggagcctcttcctgtgggcaccactaccactggcccacagaagtgttctggcaggccactgaccatgttcacttaaagtccaaggtctcttcagacagctgtggtaaatgctgccaggcctgggactcacccttcagggcagtgggctcccatctggcccagggcaggtccagaaatagtgtccaagagcctaagcctggacttggagaccccaggagcctgcttgttgctctacctcagtgtggccaagctggtacctaaggtgcaaggcaaagtctcttttacttttccctctgcatttctcaaacagaaagagtgtttcagcatagccaccacagctgggaatgtgctgggtcacatgtgtcattagcatgtctcagagcccagggcacactgtgtactacctgggtattgctgccggttattcagggctcaggggctcttttatcagcatgtaatgaatcctgctaagactggatctttcctttcaaggcagtaggttgccttttggtccagggtgtgtctagaaatgtcatttgggagctaggtcctggaatgggggcctcatgacactgcctggtgccctatcctgcagtggctaaggtggtatccaggatgcaagacaaagttctctttactcctcgttctcttctccttaagcagaggatggagtcactttcattgctgtaagctgcactgtctagggttggggtaggggtgacacagccactcccctagccaccccggattgtgtctccctagctcaagtgccactctagtcctctggctctgaacccagcttagcactaggagttgcctaggaattgcatacctgtgtcctaaactgcttttcatgtgtacctaggatccgagagcactttggttcatgatggcgaggcctgttgagaaattcaagttcctaccattgggatgggcgattcccctctggctacgtctggtccaggtgctccctccttgcatgagtgctggcttagcccaccatggctttactctctgttatatcagggcagcactgagttcaatgtaaagtcctcaagtcactgtgctgtccctccatgaagtgcacagactctacactggggtatgagggaggggaggcatctgtgattcaagactgtgtctccgaccctcttcagtgacatgaagttactgtagttggtcatctgatttttggttatactgtgatatgaagttaaaactagttaaacttcagtgatatggagttaaaactactactttgcttgctcatctgattttgtgtcagtcctttttcatgggcagataggtgttaaaatttggtgttcctgccaggaggatgaagcctgcctgtaggcttctaatctgccatcttgctctgccctcctaagacttaatttaaccaaataaatgaaagatctttacaatgaaaactataaaacactgatgagaaaaattaaagaggccacacacacaaaacagaaagatattccatgcttatagatggggataacattgctaaaatatcaataccactcaaagcagtctataaacttagttcaatccctgtcaaaatactgatattattcttcgtggagatagaaaaaacaaaatttatatggaactacaaaagactccaaatagccaaagcatccctaataaaaagaacacagctgggcctggcgcagtggctcacgcctgtaatcccagcactttgggaggccaaggcgggcgatcacgaggtcaggagatcgaggccatcctggctaacatggtgaaaccctgtctctactaaaaatacaaaaaattagctgggcatggtggcgggtacctgtagtcccagctactcgggaggctgaggcaggagaatggtgtgaacccgagaggcagagcttgcagtgagctgagtgcagtgccactgcactccagcctgggcaacagagcgagactccgtctcagaaaagaaaagaacacagctggaggcatcgcactacttgacttcaaaatatatgacaaagctatagtatacaaatcagcatagtactggcataaaaaacagacacatagaccagtggaacagagtatagaaacccagatataaatctgtatgtttactgtcaactcatttttgacaaagatgccaagaatatacaatgaggaaacagtctcttcaataaatgctgctgggaaaattgagtaacaatatgcagaagaatgaaactagactcctgtctcttgcaatatatgatattcaaatcaaaatggattaagaacttaattaagacctgaaaatagattaagacctgaaactatgaaactactaaaagaaaacactggagaaacattttgggagattggtctgggcagaaatgcacacacacacatagacacacacagacacacagagacacacacacacacaggaatattattcagccataaaaatgaaatcccggcatttgcagctatttgaatggaactgggagtccttgttttaagtgaaataagccaagcactgaaggacaaatattacatattctcccttacatgcgggagctaaaaaagtagatctcatgatgacagagaagctgaaagaggagaagctctagaataattttatgattagattaaacatgtaaaaatatgtctaagattttttgtacttagatttttactctgccacttttcttgaattttcttttgtcttacaaatatcatgtttaggaaactaacctaaaagagaagtctgaatgctgattccattcagcaggggaagggttgttattgccatctgtagttcattgttactagtttccttatgcttggccatttgaggatcaaaggctttgtttaatgaccttgaactctgatcccttacaaggcaatgcatatttctgacactaggccactgggctttctgtgttcttgttaaatatacaatgtcataatgtacatactattcttttggctagtgtaatgacatttctacttctgcttttaataaggctaactcccttctaaacactgtctttaaaaatagaatggttcttccattagtagcagaaattctttactcttggttgacacacaattttttttgttcccaaacctaggcctcagtcctatccttcaaaaaaacaagccgaactttgttttctgtttgccaaggaaagggattagtgtgtctgcacaaagaaaagtaattcttttccatacaaaaaaggataggtactatattccaatcaaggtaacaaaccagtgggctaaaaaagaattgccttttaattgtgaaaacatttcctgatcttttaaaaaaagaaatctacgggaagtataaaggcaatcaggtaataaactcattgaaaatcagttatagtattagcaaaagtttacagtggttggctttgtcacatagtcatagtttgtgggagaatcttgaccttatttgatgctgtaaatacttgtgttttcttagcctattgatatggtatgaaggagtctcttggatgggccaaattgcctttcaaaaaattcattgttttgtaaaattgggattaccttaaaagaaaaagttaaccagccgggcgtggtggctcatgcttgtaatcccaatactttgggaggccgaggcgggtggatcacgaggtcaggagtttgagaccagcctggccaacatggtgaaacccatctctactaaaaatacaaaaaaaatgagccggggtggtggcgcacacctgtaatcccagctactcaggaggctgaggcaggagaatggtttgaacccgggaggtggaggttgcagtgagctgagattgcaccattgcactccagcctgggtgacagagcgagactccgtctccaaaaacaaaaaaaattaaccaactaaaaatacaacctatagaagagcaaggaatatatttggtgaaatttgacactttctttttattgaaatttatattttaaaatatatttaaatgtatttaaataaatatatatattgaaatttgatataagaaaattagatgaaattttctcatatgttgatgtatttatggtattttttggttttgctaaacaggttgtgtattattaatcatttgctatagcataatttaagattatttgcagtttctaatttttattaacactaaagtttttttgacattcagcatttctgctcacatgagccataattatatctacgaagtgttttgagcttaaagcaactttgaaaatggaagaaatgactaacattaaacatgtttagctcctcaaacactacctgctgattacttaaattttatgtggactccatataatgttcataatacaaatacatttcaatattttgatacagaataatgtttataattctcagcatgcacatatattctaaccatgctgagataacactagcgttcaaacaacagtagccagtctgatgtttaaaagaaacacttgctagccgaaggacattcctcttgaggcatggactggaaaccatgttgagtatgctaagtaattccatctgacctgcagaaaatcactatgggttacattttcactttgcacatatgtcatcgaccaagccaactggctggagtaagctttttgaaatggacatttctggctgagcttttggaagattgcatttttaaaaataaagcattaaaaaaaccattattcattggttgtacattaaaagcaaatggcgaaaggaaataaacagaagtataaaaaggtcataggatgaaaacattaaattgtgtatacaattttaattctatttgtagtaggtttaaaaataattgtacttaatatagagccaacctccctaaaaaagcaaaatatttagaattagacattacagagaaggatatattggtacagattaataaagaaaagatttgacatttttccttttacaagtgtttaattacaactgtatatagattacatacttactgagtgaatatttggaaaattgatgtaaatcattgtacttttgtcctttgaggaaatacattctgggctggaaaaaaatttcaaattcagggaaaactttctgagtttgagtccttgctttaccatttactgactttgttggtataaggtccatagtcttagccttggatttccctgaaaatatggttgtatatttgcctgaccctgtcattgtcagtaatgaactgttgtttaaaagtggcttaagctcctggtaagaaagccatttttgtaaatttagggtattatttttatagtgtgtggtaactgaactggccaagccagaacttattaaccacatgtggcattgggagataggcgagtattcagaagtagttacagaagccttttagttagttaggatttaccacgggcttcttctgtgaaactctttgctaggtgagttacaagataatacatgctagtgtgctagcccaaaggaaggaaagaaaccaatataagaaaccaacatcagttaaatgtcaatttctgtcacacattgtgttggtgattgacacatcttatgtaatcaactgttatcagttgaaggttttgagaggtgacagcgtgctggcagcccttgcagccctcgctcgctctcggcacctcctctgcctgggctcccactttggcggcacttgaggagcccttcagcccaccactgcactgtgggagcccctttctgggctggccaaggccagagctggctccctcagcttgcagggaggtgtggagggagaggcgcgagcgggaacccgggctgcgggcggcgcttgcgggccagctggagttccgggtgggtgtgggcttggcgggccccgcactcggagcagccggccagccctgctggccctgggcaatgaggggcttagcacccaggccagcagctgcggagggtatactgggtcccccagcagtgccagaccactggcgctgcgctcaatttctcaccgggccttagctgccttcccgtggggcagggctcgcgacctgcagcccgccatgcctgagcctcccaccccctccgtgggctcctgtgcggccgagcttccccggtgagcgccgccccgtgctccaccgcggccggtcccatcgaccacccaagggctggggagtgcgggcacagggcgcgggactggcaggcagctccacctgcagccccagtgcagggtccactgggtgaagccagctgggctcctaagtctggtggggatgtggagaacctttatgtctagctcggggattgtaaatacaccaatcggcactctgtatctagctcaaggtttgtaagcacaccagtcagcaccctgtgtctagctcagggtttgtgaatgcaccaattgacactctgtgtctagctactctggtggggccttggagaacctttgtgtggacactccgtatctagctaatctggtggggacatggagaacctttgtgtctagctcagggattataaacgcaccaatcagcgccctgtcaaaacagaccacttggctctaccaatcaataggatgtgggtggggccagataagagaataaaaagcaggctgcctgagtcagcagtggcaacccgctggggtccccttccacactgtggaaattttgttctttcgctctttgcaataaatcttgctactgctcactctttgggtccacactgcctttatgagctgtaacactcaccgcgaagttctgcagcttcactcctgagctagcgagaccatgaacccaccagaaggaagaaactccgaacacatctgaacatcagaaggaacaaactccggacacgccgcctttaagaactgtaacactcaccgcgagggtccgtggcttcattcttgaagtcagtgagaccaagaacccaccaattccggacacagtttcacccatttcatgagtgtttaccatgtgccaggcatttttcttagagtcttataattgcagtttattttgcagatgaggaaactattcacacttatattgcctcacagttgggaacaactcttcaggggaaatgatgagaagagtttgaaggttaaatatcatggcatagttaaaaaaagggaggggcatatttccatgttgagggatggtcagggcagatgctgctgattctttttgactttgaccccttgttgctaaatgtgagaagctctctgagattgcgatgttgaggttatttccagtcgacccgcacctgagatttgctttgatgtttgctgtgtcctattgtggtcagactgtcttcaccattgtggtgattgctatgtatataaaactactttgtacctaatgtgtgcataaacataaaggctacatttaagcagttttgagcacgcttatgtttatgaaatgtgaagataattcattttctggcatacatgctgtgattttattagtaaagaaatgagttctatgtgatacattcctttatacatatattatttgcctattgtacattgtccaattcatgtgtttacttatttacgtttattcttatacagactagtaccaaacaaatactagtgccctttttaattctcacatttacatggagtaataataacaaaaatgaaacactctgagcccaccttttaaatacaagtttaaaatttcacttggctaaggataaggagaaagaaatcatgttatatggttttaatttatactaagaaatttgttttacaactacaaaattaaagccatgtaccttctctaaagtgtaagagaaaaatctaaagcgtttgttagaggtttagccgtgcttttttgcacatgcagtttctcctgcctagattgtctttacagactgatgtcttatcaactgcggccaaagcctattctgaggcccagctctgctggtgtcactttctctgtgaagctctgctgtgttggttgtttctgcttgtttatacctagataatttgttcataccttacctttaattattgcatgtgttatgtaatgctttattttagtatttcttgacttcaacatttctttcttgagatcagagatcatattttattcatgtttttaatctccagtacatagtccactctgttccagtctgttccagacatagagcaagtagtcaatatctggaataaatgaacgtgctaattatattttgatttaaaaaaattgcgtatgagactgaaatcatcaagtactgtgaactccatggaaaaagtatttaaagatatttcagttcagtattaaaatatctatctttggttattttattctaacaagaaaaaaaaattagggaaaactgctttctactatgggaggttatgtccttgattagaacaattcccttgcttttaagttactcattttgttgctaggcagaaatgataaagtgttgtaattctggaataaatctagagtacttcaggcaattcatgtaactaaagataaaggttttatattgttcctatactagagtgaatttttaattgtttgtaaactgtttaaaaaattttcacaatcctacaagccctgccagagttgctattcttcattgaggtatgtggcaagtttgaatttggaagtgtgtttgtgtttacatttttaaaaagtatttcatgtcaaaaatatgatatgaaatacttaaaaaatcatatatgtgatatgaaatgcttaaaaatcatatatatatatacacacacacacacatatatgatatgaaatacttttggctaaagaccaaatacagtataagaactttaatcctaaaaggaaaatactgttatatatacacacagtgaaataagggggtctttgtaaattaaaggaagccagtgtataattagcaatagcagatacaatgatgtgtttgaatattttttggcttcttgtttattagcatgaactctatgaaacttttaaatttcatgtagtgtgtgtgtgtgtctgcctaagaagtcaaagtctcaagcatgtgactgttgatagaaatgatagatgttatatgcggttatacctttttagattttttcatctcttataactaagatatcaaattgattttttggttggtttaagagaaaagtttgaagaatagtccctaagctagcagaatgcatggaatgggtgacattttatttatcctgtgagcaaaagggtaaggatcgttggccctgatttcctgtggctttcaacagggaattctaataacataggaaatgaaggaagaagatgcttcatcaccattcctaccattattgcctgaatttgagccttctctgtttctcatgtgcattactgaaagagcattcctactggtctgtatgcctcatatcttgttccaggtctcccccggtttcttctccttctattctccatttttctgctttagagtaatattttcaaatcacaaatctgatcttgtctttgtcctgcttgaaattttttgtggcgccaggtgcggtggctcttgcttgtaactccagcactttgggaggctgaggtgggtggatcactttaggccaggagtttgagaccagcctgccaaaattggttaaacccccgtgtctactaaaaataaaaaaaaatattagcagggcgtagtggtgcatgcctgtggtcccagctactcgggaggctgagatgaaagaatcacttgagtctgtgaggcagaggttgcagtgagctgagatcacgccactgtactccagcctgggcaacagagcaagaccctgtctcaaaaaaaaaaaaaagaaattaaaaattcctagtggctcccatcacttgtaagaagaataacagggtttatataaggttctggccctgctaagccccctgatctgatcttacttcaggtcccaacttaacacaatacattaaaaaattaattttttaattatatatacatttattttatattttttatggcagtcaatatttctaccccaaattaattttttaattgacaaataaaacttttatatatttattgtgtataacaggatgtattgatatatgtatacattgtggtatgattaattcaagctaattaacatatctatcatcttatatccttatcactctttagtgatgagtacatttaaaatagactctgtttgcaattttcaagtatatggtacactactattaactcttgtcaccatgctgtacagtatatcttcagaacttattccttctaactggaacctgaaaacagtagttgtctaacaacaactttctcacccttctgcctatgcacaacacacttttcctcatgtttttcatttagccaactcctgctcattcaggattgaattcatgcttcactttttggggagagggccttgaaaccaattacacctaccttcctctcacccccaagacttaggaatgtcttttatgtgaaactataatactctgtatgttcttctaagcacttactgtgctctcttacacttttaaaatttgtctttttttttttcactagattatgagttacttgagatcaaagaagacttcctttatttcttcatctgtgcctgatagaacttgtgtttgttgaatgaatggaatcctaaaagctcaaggggctatttaatatttattatatttgggtctattttacagatagcttccgctccaaggctagtgccactttgtagtaataattgctaatttgattttctaatctcttactttatagttggtaaatgtttgctcttatcagttaacatagattgaaagttgactgagtatatttaaaattacttttttccatcttctgtggtatttccttaaatgggtctcagtgtgtttaaatgtggtaaatataatatttactttttgagtgggaattttgtgattagtcagatttgtatttttaaaattctgatatgaaatatttattatttataatactactaataactacattcattggacatatttgatgaatgactatgctaaattatttgtgtgtgctatcttatttaatcgccaaaacaatgttgtcaggtcagtgcaattagcctcattttgcagataaggatactgatggttatagaagttaaattagttacttgggtttacacagctactaagtcagagctgagatttggacctggtggatctgaccctgtagactgaattcttaactgttctatatctgtctgttgtgtttatatgacagtaattgcaaataataatttgaaagcagtaacttcatttcaggcttttaaaagcattcttacagcaaacatttcagttaggcttaacttgagagtacagtggcaaaataatgtgttagtaacaccaaatttttctggcttaaaaaatatgttaatagattaacaataggttctccctcttttttccttctgtcttctccctcacctccccaccgatcttctccctaacttacttgtcgaataggttggattgtttgtcctgttaacgtcccacagtctggattttgctcattgcatccccacagtgtcttgtaaatgtgttcctctgtccacatttactgtaaatttgtagttagatgtagaggactggtcaggttcaggtttgatttttttggcagtacaactttacagctagtgtttcattcttatgtgaggaggcacatgctccctggttgtctctctttttgaggcaacagtagccattgatgatctaggcagtgctagagagctactgatttattagggattaaaatggttatattataatttttattatgtaacggaaatacatttaaaggaagaaatctccctttatcagctagtaggttacccagagatatattcttaggagaaaggcagaataaatgctttgttgtttccctgttttcaaaattcagggttggttctctagcatcctttgaagatgacaaattagtagttgttgttttcatattataataaactaatggatttaaatatgtgatgcctttcaatttattgatattattgttattatttgtttatatttattttttgagacaaggtcacactcttttgcgcaggcttgaataccgtggcataatcacagctcactgtggccttgacctcctgggctgaagtgatcctcccgcctcagcctcccaagtagttgggaccactggtacctgctaccatgcctaactttttgaaatattttttcatagagatggggtcttgctatgttgcccaggctggtcttgaactcctggcctcaagcagtccttctaccttggcctcccaaagtgctgggattatggacatgtgccactgcactcatctgaagttattatttttgttaatgtcaatattgtacaatctttagccaagggagcttttcccagttggttcatcaacccttttgacatagcttcagtagtctttgttagctttcttgcttcgtattatgagatgttcctgcctcatcttttatatttcctctcccagaactggaatcagccacttctttaaggagcttggttctttttttttttttttttgtgggaaatggcatttgaagatcacagtgtgggtgctggtggtgttcagtactcctgctggttattgcttctgcactgttgtggtggatagagttaggaaatatacatacttagtatttaaaggtaaactatattatgggttcatattgatactcccaattatgatgcagacctacagacattttacttatcctcattgattttacatacatatatgtacacatgtgtgtgcatatgcacacatttgtatatatatttgctggaagatgtttttagataagcaccttcagtggttttgtcttccaacatagccaaaggtacagcacactccctttagtaataatgccttggtggcaatgattctcattcttaagggaaaaaagatatagagggggaacctatagattctcactggtgagtgattgtcagtgcagtttgaaaagtgatccttactctttccccttgataatttgtgacccagaagaggaaaatttctcatctctatagtggagattttttttttccaggagaattttgtctattaacattggagatgatttttaatggctttttgatcattagatgataatctgctttagagtttaaacaaatacacaggtctacttttgttacacattcttgtgattttatatctgataggtcttttattgataagtgttagataagtgctgctggattatagaaaactcttctactttcaatgttatatagaacaaacaaaaggatacaaaatatggctagaatggctagaattaatactcaaaacaattaaaaaattatgatccagcaactccactctgtgtatatgtccaaaagaagtaaaagcagggattaggaaagatatttatacatccttgttcattgcagcattattcacaatagccaaaaggtggaagcaactcaagtgttcaatggataagtggataaacaaaatatggtgtatatgtacaatggaatattatttgaccacaaaaagaatggagtactgatatatgccataacatggatgaaccttggagatattatgttaagtgaaataagccagtcacaaaaaagacaaatattgtatgattctttttacataaggttcttagagtagagtagtcagatttgtagacccaaaattgaatggtggtttccaggggcttgggaaaggataatggggagtagtatttgatagatacaaacttttgcttaggaaagatgaaaaagttatggagatgaatggtggtggattgcacaatgcacttatgaatgtacctaatgccacagaactgtacattctaaaatggttaaaatggtatattttaccacaatttttaaaaaccacatagcaccaaaaaagagtgaatgagtaaatttcaaaaagctgtgtcaagaatgataatatattatgtaatttgtttagggaccttacagccatcaattttttttttttttgagacacagtttcactctgttgcccaggctggagttctcagctcactgcaacctccgccttccaggttcaagtgattctcgtgcttcagtctcctgagtagctgggattacaggcacacgccaccatgcctggctaatttttgtatttttagtagagatggggtttcaccatgttggccaggctagtctcaaactcttgacctcaagtgatcccctgccttgatcctccaaagtgctgagattacaggtgtgagccactgcacccggcctaatcttttttaaaaaattaaaaaaaagttaatagttctttgggaatgggtggtttttggttacatagataagttctttagtggcaatttctgggattttggtgcacctgtcagctgagcagtatacagtgtactcaatatgtggtctttcatccttcaccccattcccaaccttccccctacccccaaagtcctctatatcattcctatgcttttgcatcctcataacttagctcccacttatgagtgacaacatacgatatttggttttctatttctgaattacttcacttagaataatggcctccagctccatccaagttgctgcaaaagacattattttgttcctttttatggctcagtagtactccatggtgtatatataccatattttctttatctacttgttggttaatgggcacttaggctgattctatatctttgcaattgtgaattgcattgctgatataaacacacatgtttatgaccatgtgtgcacatgtgtctttttcatataatgacttcttttcctttgggtagatatccagtagtggcattactggattgaatggtagttctacttttagttctttaaagaatttccatactgttttccatagtggttgtactaatttacattctcaccagcagtgtaaaagtgtttctttttcaccacatccatgccaatatctattattttttggctttttaattgtggtcattcttgtagaaataaggtgctatatctcattgtggttttaatttgcatttccctgataatcagtgatgttgagcattttttcatgtttgttgactgtttgtatatccttttttgagaattgtctattcatgtcgtttgcccttaaatccttcaatatttatttagttgaagcaattaaaaataaaataaatattaatttgaaataaaaatccttaacagctagattatattttcttttattcaaattcagaaaccttttcattttctttcttccagaagatttagtcacaaaaggaagaggaataactttctctatacagttgaccattgaacagtgtgggggttagggatgctgacccctcctttaagtcaaatatccacgtataacttttgactcccccgaaaattaactattattagcctactgttgccttactgataacataaacagttgattaacacatattttctatgttatttgtgttttatatggtattcttacagtaaagtcagctatagtaaaaaagttattaagaaaatcataaggaagggaaaatatatttacagttcattgagtctaagtgggttattatacaggtcttcatctttgtcatcttcacgttgaataggctggggaggaggagaaagaggaggtgacccctcttcaggtaaccccaattttgctgtctcaggggtggcagaggtggaagaaactccacgtataaggggacccacacagttcaaacagttgttgttcaagggtcagctgtatttttatatctcctgacatgaagttataatttgtttttgagatgtacagagggaaatgaaaacagagaattaaaattgaggatgaagacttaggctttatttattttaactttcaaaagtaaattttattatgtatatttaaggtatacaacatgatttatgagttacatataggtattaaaaagattactatagtgaaacaaattaacatatccatcatctcacttagttacccatttttctttcatttctgtggcaagagcagctaaaatctactcatttagcataaatcccaaatacaatataattttattatctatagtcttcatgttttacattagttctctagacctgtttattgtacatatctgctactttttatactctgacttcatatccttgtatacttctaatttctaattgtgtattctgtctccccattttctccccctgccatctgcccctggaaaccactgttttgttctatgtattggagttttgttttgttttgctttttttacattctgcatataagtgagaacatgcaatgtatttttttctgtgtctggcttatttccttttgcataatatcctccatgttgatccatgttgtggcaaatggcaagatcccattctttcttagataacaaatatttatagtaatacaataataatattccattataactatataccacagtttctttatccatttgtccactgatgcacacttatgttgtttccatatcatggctattgtgaataatgccgcaataaacatggaagtgcaaatgtctttgcaagatggtgatttcatttcatttgggtatatgccccgaaaagggatttctgggtcatgtgatcattctatttttaatttttttggaaacctccatcctattttccataatggctatatcaatttacatttccaccaacggtatacaagagttcccctttctctacaccactgccaacatttgttgttttttgcctttttgataatagccatctaacgggtgtgaggaactatctcatagtggttttgatttgcagttccctgatgattaatgatgttgagcaccttatcatatacgtcttggccatttgtatgtcttctttggagaaatgtctatttatgtcttttgcccatttaaaaatcagattgttttgatactattgaattgtataagttctttataaattttggatattcactccttgtgagatatatggtttgtaaatatttttcccagcctgtaggctaccatttcgttgattgtttcctttgctgtatagaagctttttagtttgactgtagtctgatttatttatttttgcttttgtggccttctcttttggtgtgatttccaagaaatcattgccaaggccaatgtccaggagctttcccactgtgttctcttagagaagttttatagttcctggtcttatatttaggtcttttatccattacattttttaaaaaaaattttcaataactttagaggtataagtgtttttgcttacatggatgaattgtatagcgagtagtgaagtttaggattttagtgtaccctttacccaaatagtgcacattgcacccaacaggtagtttttcatccttcacctcccttccgccctgcctgcttctgagtctgcaatgtctagtgtaccactctgtacacctttgtgttcccgtgggttaactcccacttataagtgagaacttgtggtatttggttttctgttcctgagttacttcactaaggataatggcctccatttccaatgaagttgctgcaaaagacattattttgttctttatgactgagtagtattctatgatgtatatatagcacattttctttatccactcattaattgatagggacttaggttgattccatatctttacaactgtgaattgtgctgcaataaacatatgcatgcaggtgtgttttttatgtaatgacttattttccttcgggtagatacccaggatagtgggattgctgggtcttatggtatatctgcttttagttctttgagagatcttcatattgttttccatagaagtcgtactaatttatattcccaccagcagagtacaagtgttcccttttcaccacatctgtgccgatatctattcttttatccattttggattgatttttgtgtatagtgtaagatgaacccaatttccttctttagcttgtgggaattctgtttttctgtcaccctttttttttgagatggggtctcactatgttgcccaggttggccatgaactcctgaggtcatgtgatcctccttcctcagcctcctgagtagctaggactacaggcatgtgccactgtgcctggctccagcaacagttgttgaagagactgttctttatttacttattgtatcctcttggtgctgttggtagactgtattaatttgggtttatttcttagctctttattctgttcctctggcctatgtgtctttttttttttttttttgccaggaccatattgttttgattgctatggctttgtaatataattttaagtcagagagtgtggtgcctccaactttgtttttcattctcagaattttttttagctatttggttccatataaacttttatggttccatataaactttgggatttttttcctatttctgtgaagagtgtcatttggattttggaccctttatttttaaaactattttaaagaagtaggtaatttagatgcttgggaaatccgaattagagtatccttcaaaagaaatagacaggaatgactttttgaattagaattctttgttttcagggtttgatttataattgaaacataagagtttctttctctacatcagggttttactacccttgacgctgttgacattttggtctaggtaattctttgttgtggaggatgtcctatatgccattatgggataaatagaagcatcactggcctctacccactagatgccagtagtacccctctgctcccccatccagtgtgacaaccactgggggacaaaatcacccctactgctcaacattataggatgaatattaacaaaaattaaggactgcattgcaagtataacttatactcctcttttcttctcttgttacaactgttagatctgaattagaatttaatatatgtcccttttgaacaaaccatgagaagtcataaattaatggattagttctttggtactattatacattttattttgaggaagtgactattatagcaataccaatctttctgatttagttatcatagtcagatgttttaattcttgctctaaagttatatcattttaaaaattatacaggtaatctattaataattttaagaaaatttggaaaaatgcagaaacttattaagaagaaaattaaaatcacctttaatactaaagtttagatataaatagaaatacatgtacttttaagtcaagtactgttgaaaaatgtagtgtggttttggtgaacacttagagactttgtagattgtaattaaatcctcccttcctgggttaaaatggtaaactgtgattttaaacagttcttcattttttttaagaaaataaagatgctagagctcatcattatttttacttccttaggtttgtctgaattgtataaataattgtgataacatgtacaaggatatctctgagataaaaagggttgtttatgaatgaattatccatttgtgagattaatactaacttcctcatatgtgtgtaaagtaacttcttacataacacattaaacctttcaactgttcatgtataatatatggcctaggtgtatgtgcttgtatatgtgtgtgtatatatctatatgtatgtgtatctgtttctaattttataaacaataaaatctaggtttgaacagaagccatagtctttgctatataattgaaacaacatgtgttttggtgtaggcaaatttaaggaaagtcgtaactctcaaacaattcatctgtttagaaaatggtttcaggactttatatgttaaacccataattctattacaattgttgagttttgtaacaagaagcatttgttctttgacttaagcctttagcagagtttaacaattagaaatttctcagaatgatgcatgctatctattgaagaaatagggggggttgagaaatgagccattcctggaaagctgaagtaatcttcaaggttagatctgaatcttggcacccattgtttgggtggctattggtgatgcgaaagtgttaatttatttttgtttttattctctctttttgttttgtttttgttttttctctttttgtttggtttttattttctcttagaatgtaccattgcaattttgaatgatttcaaggagttaataaaatgtcacaaggtcacaaaaagtttttttataaactacaaataatctgtctagtatcattttacctagaagagggaagcttttcattattaactttttgctgagtttatttttggaatcattagaggtttattgacaaatagctgattttattttgtgtgatacttattaaaggatatgaactttctataaggaggaaggacattgtatttcatacactatgttttctgtcatatcaagcattttttttcttataaaagctactggtatcgtataactggcatcccaaaataagaagacagtaatcagctgttcagctatcatagatgaagagtgtatttgatttaagaaggaaaaatcaaacaactgctgatgctatatctttttgttgtgttaaagatgtcttttgataaaggcttttaactttgaaatttctatttctttccaaaagctaagaaaaacaaacctttttttgactataggttatatgactgggactgtgccaggtgccagcacgtgcttctatttacagtagtcccctcatatccacagtttcactttccgtggtttgagttacctgaggtcagctgtagcccagaaatattaaattgaaaaatccagaaataaacaattcgtaagttttaaattgctcttcattctggctgatgtctgtcccacccaggatgcaaaccatctttttgtcccacatatccaccctgtagacactaatctcctgtttgtcacttagtagccttctcaatgatcacatcgactgtggtggtgatcacagtgtttgtgttcaattaaccctaattttactgaataatggccccaaagtgcaagattactatgtctaatttataaattaatctttatcatatgtatgtatgtataggaaaaaacagtgtgtgtatagggtttggtactaaggtttcaggcatccactgggggtcttggaatgtattctctgtggataggggagactgctataattttttcccccagctattgaggtatagttgacaattaaaaattgtatatttttaaggtttacaacttgatgatttgatatatgcatgcattataaaatattcaccacaatcaagcaattaacgttccattacctcatatagttagcattttttccttcccttcctatttttgtgagagtatttaagatttaccctcttagcaactatgtacaatacaatatttttaaatatattcacattgttttacattagatcttcagaagctattcatcttgcatagctgaaactttgtcccccttgaaatctatttatcatctatcatatatagatatctatctatatatctatatctttttatctatctccatccctccatctatccacacacacacacacacatacatttatatacatgcacatatatgtatatgtgtgtatatatgaatatttgaatatatacagacacgggtaaaaacatctgaacattttaaggtttgaatggcataatggcagtctcaagggaatggagaaaaagttcttgggaaatactgatttttttcaacattcattgtttcatcatagaaatttgtttgaatggaaggtagtaaaagtagtggttttataatataatcattttttctcctttaatttggcattgatgatatattttggttttgaatttaatatgtgacaagtatattttagcattttattggaggaagtgcttactgacttttaaatgtgaaaatgccattaagtaagggattctattggttatctgaggacatggacccaaagaaagaatatgtttaatgatttttaggagtgagaattttgcatttggtagcattgaatagtttaagtggcatcatttatgtttacacatgaaaatatatattcttctattccccttcctctttctttttttatgacaggattcagatctgaggtcttttgaaagtccacctgacataggtcatgaaggacttgcctttttcttgagcaggaggtggcaatcttagcatatttacttctaattaaaaccagaatccaatgttttactagggaatttattactacttttaagcaatgagaattttgaacttgggagtagagttttcttttataaaccttatagtacatttgggcctcagaattaaaaaaagctgttgactgcccattgtgcactaaaaaggctaaaagtcatcatgttagtagttttgtggcattctttttcattatagtgcttgttttatgggttttataaagatgcattaaaatgtagcagcttctgttggaataacatcaaattaagtttgtgcctttactggccacttttttgtccttgacaaaatcaactggacttttaaagtgatccacatgactgaagatggaaatatgtatgcactaaagattcaaagtcactgaggtagtggatacatataccagaagtgaaggggaaaagtagagttgattccagactcttaatcacctttaccagaaatgcttgtttattttctcccaaattttatatatttttaaaattatgtaaacaatctttttacttttcactttgtctgacaagaaactggcttagcatttatttattcttgactttagatatatagctctttttgagtaacgaaaatgaaagtaatgaaactactttaagaagtatttttccttattacaccactactgtattgtttataaattagagaatacaaggtcgggcatggtggttcatgcctgtaatcccagcactttggggggctgaggcaggtgatcacctgaggttgggagttcaagaccatcctgaccaacatggagaaaccccatctctactaaaaatacaaaattagctgggtgtgatggcacatacctgcaatcccagctactcaggaggctgaggcaggagaattgcttgaacccaggaggcagaggctgcagtgagccgagattgtaccattttactccagcctgggtgacagagtgatactccatctcaaaaaaaaaaaaaaagaaaaaaaaattagagaatacagttaaatgaatacaaaacaattacgactgtggatgttgttaaattttatgactaattgtgattgctaattcagaattttatatatttatttatatacacatacatactttaaacaaaatgggttatactgtccattataagcttttccccttacaatatactatgcctgtctttctatggcaatatatataaatctacctcatcatttaaaaaatacataatttataaatatttatacaacacattataatatgtgctagtaggattgttattgtttttaatgtattttaattgacaattttatatattaatggggtacaatgtaatattttgatctatgtatacattgtagaaagattaaatgaagctaattaacatatccttcaccttatcaacttattttttttgtgtggtgagaacattaaaaatctgttcttttagcaattttgaaatatacattacattattattaactgtggtcactgcgcagtacaatagatcattaaaacttactcctccagtctaattgaaactttgtacccttttacctcatcatttttaatgacgtacaatttgtgttttacacatgcatacacattataattaatttaatcagtcatctgttgatgtatatctaatgctttcaatagtttttatatttataaatcattgaacttatttgtaattctttatatattaaaaatataaaatgaatacatttttattaaaccaaaactgaaaagttccttttcatttcccttctgcagatgaaatctcactcttgtgccaaggtaaataaaatagtgagcaaccttgcagttggatacaatgttcaatgcgtttataaacatatttggttctgttttatgttgttttacataaatgaggtcactctgtatattagcttgtaacttcctcatttcagttacacggacatcttttcatgtccaaacacacagacttttgttcttctttgagctatgtacaattctatatttggatatttcattatttagtcattgagattgcttctaaaatttcaattatggacagtgtgtttttgcagtggctcactctgccttagtatatgcctttacagtaaagcccatgggtgtgtatcctcttgatctgtctgtgacatacattttagcatttacatttaatttcacttaagagtagtggtatgtgttgatcttgtggtggaaaatagaggcagttggctaaatattctagaaagtttgcagagagcttgatcaaataagctcagaggaagaggttcctcacttcaggattaccacattcatctagtaccttcttcaacaaccatttaaattaaccttctcactgaaagcccatttggctaatggaagattttcactgacttttcactctatgaaaataaattgataaagattcaggagttatcagctctaggtatgcttctcagtaatggatgcttattcaaacttttactcttgtgacaatcaagatcagtagaagtctggttttttgatggttcagatgacaaatttcagtggatagaaattgtgtcaactgctttctgatgaggtgaaagcctgctctttctgtcctctcttctcttcctctcctccctcatcctcaagaatagagagccatttcatatacagtggacattgtttgctccattaaataacaatagtcttttcagactgactgcttattatctaagtgcttttggaaagagggatataaatccgccaatatttaggtcaccatttttgctaaaagtcttctaacacatttgccttcttgccaaggttcaatatacatgtttgaacatgtgattttaaaaaatgtgtgcccaaactttgatcatcatgtcccatggcagagtcagtcattggtggggcctgaacttcaggaatagtggggagtgtgattcctcaaaggtctttttttttttgagacggagtttcgctcttgctgtccaggctggagtgcaatggcgcgatcttagctcactgcaacctccacctcctagtttcaagcaattctcctgcctcagcctcctgagtagctgggattataggcatgggccaccacgcctggctaatttttgtattttttttagtagagacagggtttctccatgttggtcaggctggtctcgaactcccaacctcaggttatctgcccgcttcagcctccaaaagtgctgagattacaggtgtgagacaacatgaccgacccttgtttttattttaacttaagtaacatgctcattgtagaaaacttcatatgaagtttgcattaagagggaaaaagtattttctatttttgccactgagagctttaaccaaatgagtattttaggattttttttagcctttttactgtgaatttatatgcagtaaaagtggattcatattgtatttattaatttaaagtccttttctcacttaaaaatattgtgagcatttccccaagtcaataattattctattgcaatataaatctaaatggtcgtaaagaattctgtggtatacccctattagtggaattgtttctaatattttgcttaaaaaatactgtggttataaattaccagtatttgaatctccatgagtgttcatttctgatatttctttagaatcaaatcccaggactggataattgggacaaaaagcttttgacgcatactttaaattgtcttatgtcacagagatgggcttaatttatgttttcattagctgtgtgtaatatctgtgccaataccaggtagtatcattttttgaaagtttttaaaagttcctaatcttcatcaggcaaaagtgacatcttcttatatttgcataatttataataataataaaaaatatattggggacttacttggtgctactacctacgactacgctaaggatttaaactaaactttctcatttaatccttaaaacaaccctgtaaaataggtgatcattctccttttaggcatgagaaaatttaagatttgcaagattaagcaatctgcccatgaacacacagcctatgagtggtgggttatctttttaactttttttttttgagacagagtcttgctctgtcaccaggctggagtgcagtggtgcaatctcggctcactgcaacctctgattccctggttcaagcgattctcctgcctcagtctcccaagtagctgggattacaggcacgtgccaccatgccccaactttgcctaatcatacagatgttttaattttttatgatatcaaatattttaatcttttgttatggcttctgatctttgtattctcattaagacctttcctatactaacattctaaaatatttaatgtcttttcttaaatttatttttagatatggactaggcatggtggcccacatctataatcccagtgctttggttgtctgaggcaggtggattgcttgaggccaggaattcaagaccagcctgagcaatgtagaccccatctctaaaaaaatataaaaaattagccaggcatggtggtgctgcacacctgtagtctcagctgcttcagaggctgaggtaggaggatcccatgagtccaggagtttgaggctgcagtgattgtgccaccgtactccagtctgggtgacagagcaagaccctgtcttaaaaaagtattttttaaagatttggtttacagtagggctccagttttccccccaaacatttatccagttgtccaggcaccttttatgaatattcttttctcatatgctaaattcccatagtcattaatttgtttttagactatttatttcctttgacttatttgtctgtagtttatctataatgaatgccataccatataaaaatattaatgtacagtatgttttgctgtgtaggagggctaatcattcttcattgttctttttttttttttttgagacaggatcttgctatgtcacccatagtggagtgcagtgccatgatcatggctcactgtagttttgacgtcctgggctcaactgatcctcgcaccttagcttcctgagtagctgggacaacaggcaggcgccaccatgcctggctaatttttttattttgtagagatgaggtcttgctgtgtttcccaggatggccttgaacttggctcaagcaattctcccaccttgacctcctaaagttctgggattacaggcgtgtgccactgggcccacccattgttcttcaaaaaatttctatgttatttttgctccttttcacttcccccttgaactttaaaagatagtttattgagttccatgaaaaaaattgttttagaatattatttggcattgcattaaatctataaattattgtaatgcataactggcatgtttgtgatacaatttttcccatccaggaacacagtatatcttatttatttagatattcttttatgtctttcagtaaaaaaattttacgttttacctgtattagttttttggttggttagatcttctctgtctctttccttcccaccccacttgctcacttccttcttttcttccatttatgtgccagcaccctggtaggcactatggatacaaaatcgaggtctgtggcttctttaagtttggggagggagataaacattaagtagataatgattaagtagatagcaataggtgtcaaatcacaaccattacgagggaaaagataccatgttaataagggtgtatcttaggggtatattacttaatttgaccttacttaatgtagccttcctgagcaagtcaagatctcgaagttgacctagcgttagtgtgttaggaacctaattgcttggtggctattgtgaatgaaatctttgttttattactttaaaacattttttggaggggagggcaaggagaagactaggtaggcaaagctatgttgatagttatttttcctacacaatatataacattccactctactctggcttccattgatagaaagaagttaggtttcagtctttttctatttgcttttgagacattctctgtgcttctgcagtttcttatcaggtatctaagggatgatttatttttatttatcccacttgggatttattggacttaaaactggattagcattggtgactttcaacagttctggataattctcagccattatttctttgaatgttgctttttccatattttctctattatgtacctgtgaaaatccagttagatataagttagacaatcttatgctattctttatgtctcttaacttcacatgtattttccattcatctctagtattttgatgcatcttggatttttttagatttatttgttttgctttctaaatcactgctatttagttacaaattcttattaaaactgctcttagagttttgttaactttgttcactcttaattattatattttttatttctcaaatttctgttcttttaaaaatttcgcttggtcattgataaggtctcttaatcatttttaatacctgcttttatttccttaaacagaaagtgtaatatttttatattttctgtcaatttcagtacacgaagtctttgcagttttcatctcattctctattatttttgctgtttcttggtcatgttaccttcaattttttgtgtattgtaactttgactttgaggtcatattcttttgaacattatcaatgggaatgattggtgtctttcttcaaagatttgagtaatcttttgtcagatgtttggtggtacttccaacccagtatcactttatactaaaatcacagactgaggtttcttgggtcgtccaatagaatgaatttagtctgcaaacccacattaaaatcagtttggggtttatgaattcctaggatagatttttttttccttcatctggttccaggttttgagatgtgtactttattttgctttctcctgggcttgagggggaatgctatttacaagttctccttacagtagaggtagagctctttgtggtctttgctttgtactggggagataaagtcaatatgaggatctactagattctccacaaaaggtggtccacaagttttttctcctttactgtatctcatttgagagcaggaaaactgaagcttatggttgtctgatttaggaaaatgcccaacagctctttttacctttatggggttcacacttttacttagtttttagcttctaaattttatttactttttttttgcagcatattgatgtacttaaaagtactgctttgaacaaacattttatacagtaattttagtctgagaatcagggtcttatatgctattctcctcctctacttgtcccctacttattgtttgattttatttacatttgcaagcaattaacaaagaattcagcatcaagttttgtctgctaaagtgaaatatttaacattttatatttaaattagatgttacttataagcatataaaatgctatggtaatgatagaccatgttaaatttggaatcagaaaggaatttagaaattatgtcattaggtacctacactatgcataacattcagttggagaaacagtaggaaggttagaagacgtagtgttgagttctggccctgctacttaccagctgtgtgtcctttaataaatcatttgaactttcttgagccttaggtctctccacagtaaatgaggacaataattcttgacgttcccaagttatagaatagttggatgtgctaataatgtatggaccacgttgtaaatggctattactgttaattcggaagtctttcatttggttctgttaatttcattggacttctgttagaaaaggtcatcaatgtattcatagattgctaccgttgttcctcaaaccctcttaaaacctgtctcaattctttagccttccttgtttaatttcctccttgtatgacattggagctcagttaacttttagagcatagagcagaaaccaagaattttgaaagctgatttagaaatatctattggaatacacaaggagtgttacatagttacacatgtccttcacattcatatctgatgcagctgaattcctgttttaaggcataaaataaagccagtctttgatagagaatagtaaaagcctatgcagtatccaattaatattgggaagatttttaatgggatcgtactgcctacttgtcagcagagggagcctttgtctcactttttgattccagaactcttagagtagtgagattttaacaagtcagaatatttatggaaaatgtctgtttcctcacctaggcctgaataggaaccagtttttcttttgttcctggaagagaaaaactttttgtgtttgttttctgagttctttataatagttgttcccaagttccttaaaaatggttaatgctgagttgtaacagaggttctcaattactatcctatgttaaagttttggatggtcttaagataatggacgaaaaagagctaatgtaagtaagttaaagctaaaatttattcagttagaggactacacttagtgatgacattttttacttcctacttatttgtattagtattgtcttttaagagaatattggtgattataatctatttctttaaaaaatttcctgactggggccaggcggagtggctcacacctgtaatctcagcactttgggaagctgaggcgggcagatcacctgaggtcaggaggttcaagaccaacctggccaaccaacatgatgaaaccctgtctctaataaaaaatacaaaaattagccagaagtggtgccacatggctgcagtcccagctactcaggaggctgaggcaggagaattgcctgaacccgggaggtagaggttgcagtgagccgagattgtgccactgcactccagcctgggtgacagagtgagactccatctcaaaaaacaaacaaacaaataaacaaacaaacatcctgatgggcttttcacaaggctgacaaccctacgatgttctccagtagtttctgaaatgttacaggtgaatgaaattcatgagcctgggaatcactgttttactgagtactttagcaaataaaaattgacatttctgaattgaaccatttccaacttcctggcacattttttcctaaccttcctctgggatcttttctatcctttggtatgtaaagagtgagacttaataactaaattatctgatatccaaggtataaataagtatgggtgctgggggaagttggcttgatactttttttaaagcatgctaaattttggtttaagattgccatacattcctaccatgttctatgtactgtaccaggtagttaatacaggttccctcctcccctcctttagtctttctagcaacccattgcggtatagaggttataataaggcttattttgcatttgaagataccaactggatgaaattaaacaaagtacccaagtcacatatttaggatgtgtctgtgaaagccagaattcaaaaccttatcatcttgtgtttctgaatcaaaaatcactgccctttccactacttattggtactatatctacatttgatactctttccatatttgttcaatttgttgttttatgatataccatcctgctttggaaacagggaacagtcagggagtatcctaattagtgcccctttttggtactttgcctgctgataataatctcttgttttgtattgaaaagaaaaagactttgtacccaggctctaataattactagagctttaagtttaatctgagtatgcttttgaagtcagagttttatgaaatactaagggatctaaggatcattctgctcctttggtgtccactttgggcttccacaatttattctttgtggttgaatgatttttctcctaatttgtatattttccttgtagagttctcagccatgcttcctttatttcctatattttttatattgtctttccagtaggctttatctctttattttatttttttaagagcagatttaaccttaacctttcccctctcttcttaacagatcttagtgtttctagtgttaggcatacaatgagtacttagtcttttgacttagttctaactctgtaataccaagatggatactaaactctgtaataattttgaatcacagtctcttaagtgtcacataccaaaactaattatttcaggactttcaccttatattatttttactttgatgctattcattcattcagtaaatacttttggttctagtggatgcgagggactatcagggatggagaggcatggtgaataaaacataatggcagttcttatggaattgtcatgtgaatatggtgatactttcaaacattttggtcctcttgatggtaattgacatattgctaatctagaactacagtttaacatagtttcttgcttttatgatggttcagtttagttaaacagatatttttggagcactaacatataagagactgtgctcaatgctatgagctagataatgaaaagaaaataaacatctttaaggacttaagatataaggacatttagggcagggttattttacttggagtatttggctgatggggctgggtgagagggagtactatgttcatttagcagacatacactgaggagttcttttggatatcttgtttatgaatttatacttaattctggaggtactggagtatcttggaagtttttgagtgggttgataacatgattgcatttgtatattaagatgaatattttggtatatttgtatgtatgacttttactaaacgtggtattttaactacttcccttagaagaaaccaaggacatttaagagatcaaacaatggctaaatggcacattgaagtctgtgataggaatggacagttcaggaaatttagtgttgtaactatccctaattcattttgatttgccttttaaaaccatgtaagtttaaatcatgttgaaactcagctgataatttcctggctttagttgtttttttttttttccacaacattaattaattggtcacagtgagttcagtgtaaactaaggtttttttcttgtttcttcttttgagatgctaatgatttaagattaagagagttgataatatgtaaaaagcaaatatttagcttttgaagttaacgctttatgggactgatattattgcaagtgaggaatatttatacaaaataaagtatttaattttttttgtttttaaatatttttgggagtattctctggggtcttatcatgattggctattaccttgagtagtttaccttagtttgaaactggttatatttttaaaatttatgcctcaacgttatactcattctttaataatttttcttttggatacaggagaagaaaggaatgctaaagtacacgggttcttctgtatgatgttgtctgtcttgtctttcttagggagtcatcctgtaagaaaatatcaatattggggtgggggaagggagagagagaatacgaatgtgaatatgtgtgtgtgttggggtgagggtgtgcagacagagacagctcattccccattcccagattctgacacactcacaatattcttctttagagagttcaatagttagcatgttaaggaaattgctattttgaggaaagttaacttaaaatagtcagaaaatcatttgaacagccaacagttcccacagacctaagttccgagagacttctcatattttttaaagtcttaaaacccccccatttttggcaaaaaagatgaatttctgagtgtatatgtatgtgtgtgtgtgtgcatgcagtctttctcatgttaaattttatccatttttctctgaaagaattttttcccttgatttttaagtttttcaattttaagtttggtctataaggaatagaataacccagtaatatcaattacttaacatttagtgaatgcttgctaggtactaggcagtatgtattttaattatatttaatccttattgcagtatcatgtaatattctcttcttaccattactttacagttgaggaaactgatagagctcccaggggtctgggataaggatgcagcaaacttgtcctcaagttgtggctctgccatcagttctgatgaacatgtcatcttcatcaccagtgtctctctgcacccagtccctcccctcccaacaccttccacccacctctttttaaatccatgtctcgatgcatggtgttccatctgcttttgcttctctaattgcttgggaaactctttctcaacctgcaagacccagtgttctgaagcttttaatcatccttccatagccttttaaattactttaatatatctctgttcttacattgttgtactatttaattaactcccatgttcacccaactttctgagagtagcgactgtgtctctcctagcacatactaggtgtacaatgaatgtgcatggaatttgttgaatgaatatgagttatggaaaatgttatcaaaactttcatgatcgttccatctgacaaaataattcacccaatattttgtggatgcaagcaataatataatgtttagggccttcttttaaactctaaaattgcattcatattgaacctatcacatataatgctaatttaatcaatggttgtaattttcttatattatgttattaaccttgttcacagtttaggggaaaagattgtgataaatagcttgacagaacacctagtaatggtctttgtgaggcaattaaaatttgctattaaaattagacacattaaaatgtcaaaagacaagttcataggagaagttaatatgtagacttaaattttattttcttgtatcttaaagcaattagtctcatgaggctatttattggagtaacacttgaattatagttgagaatttgtgtaactttccctggtacatcatttaaaatattagctattcagctcaacatatgcattctatttattcatttcttctgtttacttcaggttttaaaatgtatttatttatgcctaaggttttaaacttagaatctaattggatattgcattattattaggcactaattatctttagaatgttcaaacaataacagaatatgagggagagagtaataagaaagaagctagctattctttcatctaattaccaattattagttactaagcatagccaaatagtagcatgatctcaaaactatgatagtagttttatttgcatgatgatatgagtgaaaagtacaaaaatgatatttaatggcaaatttacaatccagcaacctctagatatccatctgctatttgtttttaaggcagtatctgttggaatcctactctgaatatttttatgtctttgttcatagcaaacatgttgtatcatttttgaggtaggtttgcaataaagattaatgtgttagtgtttcagtctttctgtaacaataacaaattttttttccgtgcatgcgtaaaatgaacaaaatgagcggaagttccacagacttttggactcttctgttcttatgcatcagtctcttgatgtttcctgtctgcctttttgactacctatacagctgttttttgtgtgtttttcagacttggagaaagaccaaatatttttgacagctgcatgctgaactgcatatatgcttggccataggtcacgtttgcatttcttcacttgtatttttactcaatgtgtaaaagaaatatgagcatagagagattcaaaaaacatgtagcatgctgagtaatggtagttttctttcatgtttgctacaccacttactctgctgtatatattccacaggaagagaaagacagagaaatggaggacatggcattcaggactgccctccatgaggcccttgttgccataataatgaaggatggaacatgctctgggtcatgcatggtagaaagaacttctgggcatggggacacacacacacacacacacacacacgcgtacactcctacacttcatgaatagattgtaattttcatgaatagattataatttaatagagaagactgttaaatttagcagtatgattaacatttagttgattaccagtttatgcatcatgttaaagctttgactatatgatattttaatgccagaaaatgagacatactattgaataaatgttcatgacatgaagctgccataatggaacttttctgcctctaccccccatccccacaggcatgaatttttttttttgcctttgaaaatgaaaaataattgatttttaaaatcctctcaaattgatcttggtcagttctttctcaatttgtttccagatcttacaagtaatatttcaaatcacaacagttgtttttctcttattgtgctcaaaatgactagaataaaatccagattttaaattctgttgaaatctcctagtttttttccgatttaaaaattattttttcctgtatggtttaagcataatttttgaggagtcattgttaagatattgtcatcttttcaatttgtgcttttatgtttcatgctctgttggtgaaacatgatccattgcactgtggatcaagtataattgcctctgcatctttttctgtgttccttttctgtccaataatttccctctacttttacctttgactgctattcactctgccaatcttttgcagtccagggtgcatcgtatctgtcatgaaatctttcctggaaattttattgtaatgcagttctttgattttctgcagtgtttagtctgttttacaccacttagattttgtatgttaatgcatattattttaataaatggatataaattttccttcccagggtttcagtgtgttataatggagccagatggattcctatttgaatatttgttgtcactttctaattctttgacattagacaaattgtttaagttctgcaggtttcagtcttctcgtgtataaaatgggactattgtctcttttttagagttactaaaaattataactaataatgctgtttaaatgtttaacagaaggccagaaatgtaacaggtgctcagtaaatggctgtagtagttaatattgctgttgttccatatttcttacagctcctgatataatactgagcatgtggtaaagactctttgagtatggttcatggcaaggtcatttaaatagcttctgaaatcccattgcttttgtgaaggcttcctgttggctctgttctgtcagaatgacaaaactttcatggctttttctggactgttctttctattcccattatctgtaaggggagcctttggtatgtattctgaagtggtttccaaaacagtgatttgaaggatttatttatttatttttgagtaatgttttggatcaatctctacatatttctaaacatcagtagccaagattgtaataaataaagcatttttcacatactttgtatgcagagtgaaacacatggaataaaatctcagccaatctgaggtacagatgaataaattattttgcctagcttacttcagctcaacagacatttattaatgtatctcctatgtgccaggcattttatagttgctggatttacaaagatgagtaagatatggtttctgcctttgagttagtccagggcaaatgagagacacaaaaacagatcatttcaatagatgacgtgttctaagatggaggtgggacaggggctctgtgggatctcagatggtgggtgattgaagcggaatgagaagacttatggaaagatgtgagtcttagcttgtgatgtctctcagaggaaaaatgcgctgatctacttgattcagggacagagacctgactcaaagtgacttcagtatctacaggaatgaattgcctgcagagttcagaggaagatttggctccaggtgaggcttgatgcactggctcaaacagtgtctaccatggctctctcttaactgcttttggaaaagccaaatggcctctgtgattccataccgtatgctcctcacgcattactcaccagggaagagtaacttttcctctagttccagctcaaattagggagttcatttttctctcattggctgtaaattatccctgaaccaatcactgtgactactggggtactaattggtttacataagtcagggccttgcctcaagcttagagtgaggtcagtctcacccaaaccttatggctgagcatgaggagaggggaatggataactagggggaagctagcaaatgtttgctagatgagggggagaaaagttaaaggatctttggaggaaagaaaattgtgtaaacaaaagcaaggaagcatgcatcatcatgatgtgtgtgggaaatagcaagcagttaaacattaatacaacatgtagtataagagttagaaaataattatagaaataataatgtgtttgggtattttccactgctaggtctagtttccatacattattttatttaattctcacaagttactgaagtagttactccatcttgcagataaggaaacttgagtctaagctcacagctaataattggtggagctggactcaaacctagattatttggctttagaggcagccacttggacttgaatatattaagtgttctcctctatgttgctagagtttcaggaaataggacctgttctactatgctatattaggctgttctcgcattgctataaagaaatacccatgactggtaatttataattggctcacagttctgcaggctgtacaggaagcatgatgctggcatctgcttggcttctggggaggcctcaggaaacttacaatcacggtggaaggcaaaggaggagcacacatgtcacatagtgagagcaggagcaagagagggaggggggaggtgctacacacttttaaacaacaagatgtcgtgataaatcactcactatcataagaacagtaccaaggggatggtgctaagccattcatgaaggaccaccctcgtgatccaattacctccctccctccaggctccacctccaacattggagattacaatttgacatgagatttggacagggacacagatccaaaccatatcatatgctaacaggccaggttttctctggggctcaagctttcttcaggccttactttttcatcctatcatgctaaggtagtggttctgaaactttagcatgcaccgtagtagtctctaggcttgttaaaacctagcatttctgggctctgtgaccagagtttctcatatggtaggcctagattggtatcttagaattggcatttctgagaagttcctaggtgatgcaaatggtgctggtctgggggccacattttgaagaccacttctttgaggtctttgggagactgaagatttgtggttcgatgataccacatattgaaatgaacacaaattttattggtacttctgcttgcaagtacacatgttctgagcttacagtcttcaataacacagatatcaagagtattattttggttaccataatatcttccaccgcaggtcaaggtcattgcataaatatttcatatcttaatagaaaatatatcgacatttgtatttacatacaaaatgtatatatttagacttaatttttttatatttttgttgtgaaaaagtatatagaaaaagtaaaatgaaaacccatatttctaccacatcaagttgtaaatatatatgtatttatacactttttttgatgaaccatttgaaagtgagttacacatcttgcaccactttaccataaatacgtcagcacacatctcccaatgagaatattctcttacatttcacaacgccatgatcacttaagaaaattagcaataattccttaatgttatctaacatgcagtcatattcaaattcccccaattgtcccaatatctttcctatacctgttatttttggtaccagggttcagttaagtgaaactaaattttaagagacagcaatgctggatggatctttaggctcagattaggttctgtgttatttaagatctgggtttggttgctttaacaaagactagacttaatgatggcttaaataagaaagatgtttggccgggcgcagtggcttaatccctgtaattccaggactttgggaggctgaggtgagcggatcacctgaggtcagaagttcatgaccagcctggccaacatggtgaaacctcatctttactaaaaatacaaaaatcagccaggggtggtggcgagcttgtaatctcaattactcgggaggctgaggcaggagaattgcttgaacccgggaggaggaggttgcagtgagccaagatcgtgccactgcactccagcctgggcgagggagcgagactccatctcagaacaaaacaaaaagatgtttatttctgtcgtgtttaaccatctggagataaaggagtctagggctgatagagaggctctgctgtccacaatacgtgactttcatctctgaggccaagacaactgctccagccttaccatgatgctacaaagaggggagggaagtgtatagttggtccatgtaagggcatgtctgcaagttgtatgtataacctctgctcctatcttgttgagaagaacataataatatgatgcgtctgtaaatagaggactgtaagtggaagctttattttggatggccatgtgtctagtgataattcatgattctactactaaagaaagaatggctgttgggggcagcagttagcatctctgccaaaagttcttttttgcaaaaaaagagctataccaaactatattaaatccacttaacaatgatatttctctttttgagatatatagggctcataattgctcctatgctaactgagcccagacagatgttcttttttggattatttgatatgtgttttatagatgttctcttttatttttgttagggcattagctgtcatttctcacagctgacagtgtcttcaccccctttctaatttaccactttctttttttctgggctagggaagcaggtaataataaccctcttaataatgctataatttattctgtgtcttatgtgtgctataccatgttagggactttgacatctttcctctaactttggaactctttttcagcattattgagatatgattgataaataaaaattatatatcttcaaggtgtgtacaatgtgatgttctgatatacatatacattgtgtaatgattaccagaatcaagctaattaatattagtatggatcacttctcataattatcttcttttttgtgatgagaacaaagatctattctcttagcaaatttcaagtgtccattattattcactgtaatcactgtgctgtgcattaggtctccagaacttactcatattataactgcaagtgtatatcatttgaccaatatttccttgctttccccatccctgacccctggtaagcaccctgctactctctgtttctatgaatttgacttttaaaaaatattacacgtatgagtgagatcatgtagtgtttgtcttttgttgtctggcttatttcatttagcatgatgttctctaggttcatccatgttgttgtaaatggtaggatttctttctttttttctaacatgtgaggtgatatctcattgtggttttgatttacatttccctgataattagcaatgttgagcaccttttcatatacctgttggcgatttgtatgtcttatttggaaaaatgtctattttagtcctttgcccatttttgaattggtttatttgttttttgttattgagttgtgtgagcttcttatatcttttagagactaattgcttatcagatatatgatttgcaaatattttctcccattatgtgtttttttgttgattgttttctttgctgtgcagaaaatttttagtttgatgtagtcctcccctctattttttgttttgttgcttgtgctttttgtgtcctatccaaaaaatcattgccaataccaatgccatgaagctttttaccatatgtttaccttctggaagttttacagcttcagatctttggtttaaatctttaatctactttgagtggattttggttgtatagtgtaagataaggatcttttttttttttttttgcatgtggatatccagttttcccagcaccacttattgaagagactgttctttcaccattgtgtattcttggcgcctttgctgaagattagctgataaccttggagctcttatacaaatatactcattttacaaatgagaaggctgaagctacaggaatatcagtaacttgtttataaaaacgacaattcttagaaccataattaaaataagaattgatgcccttagtgggacctgggaatcctacctttgaaaatttgcatgatttttattacaaagaccttgcagcatttattttaactacttagaggcatttttatacttactcatttttgctgattgcagacaggtaggtttgccagatagctagatgagattctttttgtctgattgtgtctctgtgaatacatgtgtacagcatgcatatacatacaacatgcatataaactcacatcttttttggaaacttttaatagcatagtggataaggataacattaaaaaaacaaagcttaggctgggcgtggtggctcacgcctgtagtcccagcactttggaaggccaaggtgggcggatcatgaggtcaagagatcgagaccatcctggccaacatggttgaaaccctgtctctactaaaagtacaaaaattagctgggcgtggtggtgcctgtagtcccagctacttgggaggctgaggtgggagaatcacttgaacccaggaggtggaggttgcagtgagctgagatcgtgccactgcactccagcgtggcaacagagtgagactctgtctcaaataaaaacaaacaaaaaaaacaaacaaaaaaaaccaaaacaacaaaaacaaagcttaaaacagtaactgtaaagcctaccatacgttataaaagaatctgagtattgagagaatacttttcaaacagcattaatataaacaatttttatctctctaaaagagattcctgaatggttcagatgtatgtttagtgaacattcattcacagacaatacttatcctagaacatctttcaggctatttaaggttgataaatctattgtatcagttgaggtgggttagagtataatgcagtaataagcactccaaaactcagtttgttctctctctttttttctttttttttagcctcttttggtgatatgttttctttttaaaagttgcttagctgtatgattgtccttagtcagatacaagaagagtatcatctatttctatgcaatttgatttctttttgagcactctttaaaatctaagtatgctatttaagattgtcactgatattcaaggtaataaagaatagttactatagtacttactgtatatggtgtatgagctagagatgacaaggtacaagattggccttttatttattcccttaatgagtagcttaattttcctctaacataatttttccctatgtaatacattataggatacactaatcacactagcaggacatgaaaggttatagccactagatctttctcagattagggatactaatgtatctatgttttctatgtatcagttttctatgataaactgtatcagttttctatgataaactgtatcatagaaatcatcatcattaccatcatctcagtaaattttaagaactgtgaatattgtgcttaatactggtagactaatagtagaagacacctcagaattagtttatagttgagggcaattagggattggtatttttcactattagtaattttcacaccgaatgctgcttaatgctatgatttatgtaaaattggtgcctaagacatacatgttgtagatagtgattaataaaaatattatatttataaaaagaatagattatctaattttctctaattcttctttaggtcgagatttaatttgcatccagtctatggatgggatgctgatggtatttgagcaggagagctatgcttttggaagatttctccctggctttcttctgcctggtcctcttgcctacagttcccgtacagattccttccttactgtctcttcctgccaacaagtggaaagttataagtaagtttggatgttaagtcttcagaatcatgattttttggtgcgtttgttgctgactaatttttgtccacaaagagcttcaatatcacaaatgaaaaagagatcggtttctttgaaaatatgtgattgtggtgacttagactatatcatttactattgtaaaatatttgaaaggcaatatagtgcagtggtttgggaggcagacctggattggaatcctgattttaccactccagatgtttgatggtccttatcctggctctaaaggaggtaatatagctcattttgacaagtttattataaggattaaatgtatgtccagttactaccctgtagaaaatgctcaataattattgtgattgttccttgatataataaataattaaatacgatgttgagtgaaaaaagccaaattgaagatttagctgtggaattcttttataagaaaaaagaatatgtgtgatataggaaaaatactggcatgaactgttaatatgaatgtcaatacttttttagaagaacaattcatagtataagtgaagtatgaaaatgaccctaggcaaatagtttatacttattcgctagaaattcttattggtcttggtaaattgtgtatgagagagactgttttcttctccaccagctagatttaaataaaagtcaaggttttgagtttttggagagtatgttttttattggcagagagaatggggaaaagagtagaaattcatgctgggaaaagaaatagccttggaggttttcagtgcctttagtaactttattgtgttgtcttactggtggcaacatttggaagtttaaacatctaagcaacacatcatcatggcttttcaacattatttttggccacatcattattcccaagatgggaagaagatataaattcatcaggcaacagatgtaaatttttgtcttcatgtttcaatgttgtgtatataacaagttaatgcagctttctcatcataagtagccatttgctttttgtaaatcattgtcaaggcatctagggttaaaactctgaaaataagtgaatgtttgtgagtaagcagaatttaaccgatttaggaagtgtatcatcatgtaatattccttctgtaattcttatggctcttatccaaaggagatgattgaatggtggcattgctattggtaataaataaaatattatatttatttggagaggttgggaaaaatatctgtatagtttactcaagcctgccaaacttgagcaatattaggacatctgctttttagctttccacccagctctgtgcctcacctcctgccaagtagtgctatgctagagccacagtacaaatatttaaacacccagttacttactctttgaaatatgtgcataggaattaatttgataataactctgggagtgattggatagagaagtaatgtgtagatttccttaatgtgtgagtttaatctaacagaagctcacattgttttaactgtggtaagtctccaacataccaatctattaaattcatctttgtcttagactaaaaaatgtacacgttatgcattatgtggctcatttataatggtaaaaatgcatgagatacgagattattgtgaaatgatgacaatcaagaaggtttacaacattaagtcgtatgttgtacttatatatgctttcaactttaatagattatattaaatgataatcactgctgcatttttggattttggagaaagcatgaaaactatgtttgttcttttgaggctttattaaatctgtctatattcagttaatataatataatcaattaatagaataggcttttaacacataactcattttcatttttgatattgatacctttagtttctttaaaccctgcttaattatgtttaaataaaaaccagtgaaggctagggatctcaaacttcagtgtacgtaggagtcacctggacagcctgttataaaatgcacttttacagatgctagtccccagtcccctagatttcttttaataggttaggggataagacccagaaatcatcattgtaaatttttactccagatcaatctaattcaggggcacactttgagcaccatttttctttttgaagtaagagaattgtttgccctgagacatttttttttttttaatagagacggggtctcactatgttgcccagacttgtcttgagctcttgggcttaagtgaaccttctgccttggcttcccaaagtgctgggattactggcattagccaccactcctggtctgtttgccctttactgagggtaagggtaagggctttggtaccactgttctctgggccatgtatgtccaaactttgatcatcttttattctcttttcttatcctttgccttgcagaattatttagtcagtaatccctgcccttaatactttctcttattcagcctctccttcccattcccattggttcaggcctatattttttcacttggatttccgtttttttttttttctctctaaactttgaaggtttcttctcatatcttttcttttaaaacacctccttaagccagaataatttttatttctgactaaaagacctagacttttttctttttttttttttgagactgagtcttgctctgtcgcccaggctggagtgcagtggcgcgattttggctcactgcaacctctgcctcccgcgttcaagcaattgtcctgcctcagcctcccaagtagctgggactacaggcgcatgctgccacgcccagctaattacttttgtattttagtagagacagggtttcattgtgttgcccgggctggttgcgaactcctgagctcaggcagtctgcccgcctcagcctcccaaagtgctaggattacatgcatgagccaccacgcccggcctagatattttattattgacattcagtgctttttataatccagtcccattttacctctatgatgtggacttttggacttggaagtgacttttgaagttaactggttcaactgtcttccttttttcacctcctagatatattactgcctaaaacactgatttttggctaatgtcatgtattgccttcttgtactgacattttccagagtatcttgcattatcaggttcttgagagaagaatctgtgttaaacatctcttcactgactgaataattcagtttgtttattcagtcattcattcagcaaatatttttcaacaggcttgtgtgccatacactgtgcaaggtactggaaatgtagtcaaatagacgtgcctcttatcctcaaatagtattcaaggaggcaggaagtcagtcagctacttcagtccatttgtcatacaggctatagcagagctttgcataggatgctgaggaggcctcgaggtgggacctctaagagttgaatgtagggaggctccctaaaagagtatacctgccatgggtgttatttctctccttctgtctgctataccccttccccagcaacccctcaatagctcctaatacatcactaagtaaataatcagccttaaataaatatttaaaagtgtttctgttgaatttaattgactgttttaaaaagaagtattcttctccaatctttggctctgaccaaatggaaatatttgtagtctccatatatgttaagggtttttctctctctccttttttttttttcccacatactgtctatctcctatgtctgaagtgcttttccttctttctctgcacgtggaaattatgtctagaagcctccctgctccccttcagttcttccctgacctagatgtaaccaacatctcctttttctcaatttacatagtagtttttcagtgcttcccttaggtattacttatgctttcactgatagtaaacatttgtttttctccttgactaagctcagtgctcctcgatggcaggaattctgtatcccctgaagtgcccagcactgtaccttggtgaaagtgggtgttcaatgagaactgataaaagagtgaaaagtgtataaagaaagcttctgttttgttactggcatctttcaatgaaaaggattctccccggcatagtcaagaatgttttagctatagttgaaatcaacataataatgctctgtgtctcgagcttccatttctagtaaagttctctgggttacatatcaaggttccaaaacttcctgccactcactgaggtgacagttctgtttattttgaaaataaatgattttggagggtttacttttgtgctctgtgatgcctcaatctatattttagttacctgctactgtttttacaaagcaatttggaagagtattaaattatgtggttgagtttgttattggtgcactacaggacctgtgaagcatttgtggttagtgagtcaaaaagcaccaccgtttagctgcacttggtgtagttgcgattagtgcctttctgttctgagagacatgtatggcactctttcataagatcttgttacattggccctgattattctttcagcaatctcgacaagggaacttttttgtgtagcttatgttactgaacacttgagtggtaagaaaaaagatccaaatattttatttcagaatttccaaatctgcttggaattgtttggttttagaaatagatttttacatactttattggtcacagttaagaggaattaaggaagaaccataaaatagatgctcttgtaagtttgtcatcatctaattttactgtcaagtttaagtaataaaatactcttctgagttgtcttttaggaagagaaatggtttggatttggaaatcagtagtcaattttggctgtgcctctgcctgctgttttaatgttaataaggccgctttaggggctcacttatttcttagataaaataatgaccatagttatatatataagcttcaaacagctcaaagagttttggacctttgtaacaatctcatgaatatctatattatcccttggcaggttggtttctgtaggaaatgaaccacctatgtaactaattgcctagggttagatccatagcaggacaagctttgggatgatgttctagtcaccagcgcatactatttctgttgctatgaattgggaataggaaaacaatcctatttggagttcagaatgtgaggtctaattattttgcacttttagagactttgggattttgaaggtcaatctcagatggtatagagagattggctgcagctgaccgtgggattttgtagcatggtcttacaaggctgagatcttctccctcttacttcatgcgccccatgactcattcctccctgtcatgcatctctcctaaactcctgtcatggcctttcatgtctcttttactgctgcatgcctttgcatttgttatttgatttgccataatgccttctccttctttaccagcgtgatagaattttcactcatcctttaaaacctagctttctcttcctgaacctataccaagagcatatcttttctcccccaattacttgttactattggtactacgtgcataccttctgttaattagcacaggatactctgagttatacttagctgtctgtatatgagtctctacaactagtgtgggagcaccttatgagtatagattatgtagtagtttttccattgttaatgtttgtattggatccctactatatgtttataaaatgaatgaaatttatatatattacgttttcatattaataagatctattttttataagctattgttaagtttgtcatcaccttctatgtcttggaaaatttaaatcatagtcattctgcattcaactgaagttacaggttttttataagtgaattattcttgattgagataggatgttttcagagttggtatatgacatttgaagaccattgtacatttcagtgcttgtttagatatgccacattgccttcattcaggtccctgatttttacactctcagatatctgtgtcttagaaaatgtgagttttgattcaataggagggaaaggcatctgtgagtctgtagttgctttatgtacagtaggattattcttctaaaaatatgccattaattaatgagaaatatagaaatttcaactttattagataaattaatcatttctagattgaataatatttataaattgtttttaagaataatttgagctaaatgccactattgaaatagaagctgtaaaatacttatagatcataatgtcgattactgagaactcactacctaccagctacaaactactatgtgattgatctctatctctatataaatctgtctctttgtcaacccatcaatcaataattgtatacctactatataccaaatagtaggcactttataatttattgtttaatccttttaacaatgattgtgttagagattattatctctgttttatggatggggaagccagacacagagtgattattcaccaaaaatgtacttacctagttaagtggttaaactggggttaaactgagttctttttggttccatagattatgtattgataatttctactccatctgactgctttgcatatttacatttttttctgtctatttggtgtttaggtgctagatctttcttgagcattgttacttgtcacataaaattctaatggaagtgctttaatagttggtagagctgttttcccaacactgaataatggacatatggttataatttctttatcatgacattttacacagttttatgtcacaatatcactcaataagaattcaatcttaaattttagagtttttaaaaactaggaaaaagtgctttataaagtttatagattattgtgtacttttaaagtttaaaataatttataatttttaattataaactcatttataattttttaaatttctttcatacaggtaccaggtacttgcttttgcaacagatgcagataaaaggcaggagactgaacagcaaaaacttggttctggaaaaagactagttgtaaggcctttttttaatatataaaaatttcaataatgctatatctaatcacatatgtttgtcaataataattcatgggaagaaaatgtaaaaaaatatgtcagccattctctttcctatattatggttatattaatgacctaagaattgagttggttgttgttgagcaatggaaacacatgcctggtcatggtcttaatataacagattgtagagttgtaccactagaactgtggatatccagatggagtcacttttaacaaataaaaatagaaacattaaaaaaatctctccttaataggcaaaattttgtagattatattctattgtttgaagtgtcttttttctctagctgctttccagattttctcttatcacttgtttggagcaatgggattataatgtgtacttttctttctctttttttgagcttaagatttgttaagcttcttgcatctatgaatatttagtttgcataaaatttagaaatgttttggccattaattctttaaatattttgtaactagtaggcatgcgaccgaatatataagtaaaagataaaaattcacagctcacaaagatagaattagctcaaagacaaaggtgaagtttgataatttgaaaagtagtttgaagaaaaattgtaaatgatgaattctccatttattgtaaattggggaatagatggtgattatgaactcttccttatcttgagaacttccatagacagcaaggcaaaaaatagaaggaactaaaattatggtggaaacagtgaaataaatctgaggatacacaagaaggaagctaaatggagaaataatgtagaatttagaatactaacataacagtattggagaagactatgcagaattttctgtattaggatacagaagttcaggagatggtagaacagaagggtaacttggaaagagtcaagaatcagatgaagatatattttttttcattggtagtaaaaagtaaaagagcacaatgaataaaaatatgatatagttttgcacagaatttagaagcaccatagtaataatagttaaagcacagattgaagtcaaacaggtcttgagagctttactttttttttgagcaagttacagcaagtttgttagccttactaaatctcagtttcctcatttgcaaagtgataatatctattttaaaatgttgttattaggctgggcgcggtggctcatgcctgtaatcccagcactttggcaggctgaggcaggtggatcacccgagttcaggagttcgagagcagcctggccaacatggagaaaccccatctccactaaaatacaaaattagctgggcatggtggcccatgcctgtagttctagctccttgggaggctgaggcaggagaatcgcttgaacctggggggcagagattgcagtaagctgagatcgtgccactgtactctagcctgggtgacagagcaagactccgtctcaaaataaaaaaagttgttataagataaattaggtatttatatataaatatatgtattgtatataataaatatataaagcacatagcaaaatgtctggatgaacttactgataatggtaattaaattgtcctttgacctcctcaatagtggtgttcttccatttgtttcttatagtctgcacttcagccatatagggcctctcattgttccaaatattccatggctcttcttcattctaggcatatggtttttcttctgtctggaatagcctttccttatcatttgcagtttttattgattactccatgtctcacactgaggatgtattctgaaggcaattgcagttgagtggtttttccattcgattagtgaatagagtaagaaatagcagtaaaacttcattttgttacacgatagtcactttgcaggaatgtgataccatggagcaatatcaaatctattgcagaagaaacagaacttacccaatggagtgattttaataagatagttgtgggaagtcatttaatagcttcctgtgttactcacagctacctttttattgattgatttctatttaagtcttttgtgttcagaaaaataatttgtatgatttaaattctcttagattcattgagatttgtcttatggcctagaatatgatctatcttggtaaacgttcagtgtgcacctgaaaagaatgtgtattttttttgttgttagagtgtttcatacatgtcaattagattatgttggatgatagtgttgttcaactcttctatatccttattagtttttttactagttattattagttattgagagaggggtattgaaatctttgactgtaattgtggatttttttgtatctccttggaaatatgtctatctatatctatatttatttatttatttatttttgagacagagccttgctgtgttgcccaggctggagtgtagtggcacaatcttggctcactgcaacctccgcctcccgggttcaagtgattctcctgcctcagcctcctgagtagctgggactataggcatgtatcactatgtccagctaatttttttgtatttttagtacagatggggttttgccgtgttgaccagactggtctcgatctcttgacctcgtgatccgcctgccttggcctcccaaagtgctaggattacaggcatgagccaccacgcctggcatatatctatatttatttatttattttttgcttcagatattttggaattctgttattaggtacataaacatttaagactgttctgtctcatgatgaacccctcccctttacattatgaaatgacctttatccttttgtttgataatcttcttttttctgagacctacttaatctgttggtaaaatactcagttttcttttgattagtgttattctgatacctttttctatctttccactttgaatctgtttgtccctttatacttcaagtgcataatttataagaagcatgtagttggttgggatttgctttttaaaatcagtgtgatatatactctgccatttaattttgttttatttatctatatgtctgtctagtttttttggtttccttttcctctttttctgcttttctttggatttatccagttttttttttaaattctattttatctttgttggtttattagctataactctttgttttgttattttagtgtttgctttagggtttccagtttttctctttgacttaacacagtctaccttcaggtgatatattaccttatatataatataagaagtatgcttctgtttcctaccttccagtctttgtgctattgtcctgtattttatttttacataggctgtgaaccccatattacattgtaattatttttgcataaataatcaattatattttaatgagatttaaatgacaagaaaaatatgtatttacccatgtaggtatcatttctgctgttcttctttaatttgtataattccatctttccatctggtttcattttccttcaaactaaaggaattcctttcacatttcttttagtgtgggcctgctggtgacgaatttttcattttttatgtatatactgttcttgaggttatccctgggacacagttaagttacttggaaacagtttgatttttgggggccttgttctcaagacttgttaagtgggaccagggtagtgctcattttagggctacttattccctattcctcaggcaagatccttcttagtactgtaccaattcactcagaattatgaggttttgcagcctggctggtgggcacaggaaatatcttataccctgtgtgaatgttgggcactgttatctctaatcttttttgggtggttctttccctggccttgtgtggtttccttacaataatttgccagtaagtactcagctgaatatttgagggcactctctgcagatctccagagttctgtctgtatgcagcatttatatgtagctatttggtgtgctgtcttgttaactccaactgctgtggtttctccagactctgagtatccatctccacaattcacagagtctgctgggctctgcctaggttcttcttccctgcactatggcctagaaactctttcaaggctggagcaatcatgccactcacctcgtttgttttctgtctttaagggattgctgtgctttgttgtctggtgtccagtgccttgcaaactattgtttcatttattttgtccactttgtcgttgttttaggtgggatgctaaatcatttccttattactccatcttggctggaagtggaagaattttttttttattattgttcttagcaaatttctgtgttttatgagactcattaattcagaatgtagtgtatttccctaagtggaggtcacagagtggcattcagtacctggtaaattgaaagtatttagtggctggatctcagactgtggcctcagaaacatgatttgcctgttcactttggataaatcacctctcagagtgaggcacacatcagcccgaggtacagacactgacgtacaaagccaaatgctagcctgttacaatataatgagaaatataactgtcatgggactgatattcatgtcctgtccagtggagtcattttatataggtaagcaatacttgagccaaatagtaatcaaataatttcttagtgttgaattctagttcagcttaagatagtctgatgcacctacctatgttcactaggctgtctcccttctacagattgatcttatacatatactggcaatatttgcctttctggccagccccatttggattttataccttcttcaaatattttaatatctaaagtagatgaatacctaagatcatgtcttgatggccaaaaattcatcttgtctttaatgtgacttttcatgatcttttcttggatccattgtttgttgatcatagcctaactttcacagcagccctatttcctgtttatgcagatttttctctgtgaaaccatctcattattactttcatatacaatatatgcctgtcagggaccctggcttgggtccacagctctcccattttgggccgattaatggattgattgcagctctgcatctctcttgggtgaagccccaggagacaagacccttggctccaaccactgctaaggtccattcctctgctgcctctaagctggggagggaatataaagcttgagatctccccagagaggcagagtgcagcctgggagtgccaagctgtgatttacagccagcacagaagtgggagaagagctgcactttcagagcattgatacggaacatgatggcaaccattgcagtgagccaagattgcaccaccacattgcagcctgggcaacagagtgagactccaaatggaaaaaaaaaaaaaaaaggccaggcgcagtggctcatacctgtaatcccagcactttgggaggccgaggcaggcggatcacgaggtcaggaaatcgagaccatcctggccaacatggtgaaaccctgtctctactaaaaatacaaaagttagctgggtgtggtggcgtgtgcctgtagtcccagctactcaggagtctgaggcaggagaatcgcttgaacctgggaggcggaggttgcagtgagctgagatagcttcactgcactccagcctggcgacagagcaagactctgtctcaaaaaaaaaaaaaaaggagagaaagagaaaatatagaggtgccacataagtgagaaagagcctacttactgaccaatgcacttgctaacataccccactttgaaaccaaaggcaagaatttagctataaataaaaaccttgcagaaagcttcagccctctgaaaacatccagaaaagaagtctactgactatactcaatttacacctcacgaaaaggaatactcatgcacacagatgaaaaaaaaccagtgcaagaactctggcaactcaaaaggccacagtgtttcccttcctctaaatgatcgcactaattctacagcaaggattgttaactgggctgagatggctaaaatgacagaaatagaattcagaatatggacaggaaataaagaccattgagattcaggagaatgtcaaaatccaatccaagaaatctaagaatcacaatacaatgatacaagagctgacagacgaaatagccagtatagaaagaacttaactggacctgataaagctgtaaaacacactacaagaattcgtaatgtaatcacaagtattaatggcagaagagaccaagctgtggaaagaatctgagagcttgaagactggctttctgaaataagacagtcagacaaaaataaagaaaaaagataagaaatgaacaaaacctccaagacatttggcattatgtaaagagaccaactttatgactcattggcatccctgaaagagatggggagaaagcaagcaagttggaaaacctctctcaggatatcattcatgaaaaattccccaacctcactagagaggctgatattcaaattcgggaaatgcagagaacccctgcaagatactatacaaaaagatcatccccaagacacataatcatcagattctataaggtcaaaatgaaagaaaaaatgttaaaggcagctagagagaaaggtcaggttacctccaaagggagctccatcaggctaatagcggacctttcggcagaaaccctacaagccagaagagattggaggcctgtattcaatattcataaagaaaaaatattcaaccaagaatgtcatatccagccaaactaagcttcatatgtgaaggagaaataaggatcttttcagacaagcaaatgagaagggaaattgttactaccagacctgccttactagagctcctgaaagaagcactaaatatggaaaagaaagactgttactaaccaatacaaaaaacacttaaatacttaaatacatggagtaatgacactataaagcagccatacaaacaagtctgcgtaataaccagctaacaacaatgacaggatcaaatccacacgtatcaatactaaccttgaatgtaaacaggctaaatgacccatttaaaacacacagagtggcaaactggatcaaaaagcaagacacaattgtatgctgccttcaagagacccatctcacatgctgtacacctgtaggctcaaaataaagagatgaagaaaactctgtgaagcaaatggaaaaaagcaggagctgcaatcctaatttcaggcaaaacagactttaaaccaacaaagactaaaaaagacaaataagggcattacataatagtaaagggttcaattcaacatgaagatctaactatcctaaatatatatgcacccaacacaaaagcacccatattcataaaacaatttcatagagacctactaagagatttagactgccacacaataatagtgggagacttcaacaccccactgaccctatgagacagatcactgaggcagaaaattaacaaagatattcaaggtctgaacttaatacttgaccaaatggacctaatagacatctacaaaactctccatcccaaaacaacagaatattcattcttctcgtcaccacatagcacatactctaaaataaactacacaatcggatataaaccaatcctcagcaattcaaaaatgtcaaaatatccatcaaaggtagactggataaagaaaatgtggtacatatacaccatggaatactatgcagccataaaaaagaatgagattatgtcatttgcagaaacatggatggagctggaggccattatctttagcaaactaatgcaggaacagaaaaccaaatatcacatgttctcacttaaatatcacatgttcttactttcacttgaggttgaaaggtgggaggagggagaggatcagaaaaaataactatcacatactacgcttaatacctgggtgataaaataatctatacgccaaacctctgtgaaatgaatttacctgtataacaaaccttcctatgtatccctgaacctaaagtaaaagttagaaaaactgaaaacagtatatgcctttctgccaatgtttttcaaaatggtgtgtctttgctcttttgcattttcctgacttagaaatattgtatggaagatgaatcctgaaaagctctcattttacattcattctttcattactttaagaagcatttattgaacattaactgtatcccagcaatatggagatatcctggagtagctcttatgtatagaatattctgctatactctctagtggcttggtgactactctgtatatgcatattgatatatttttagttgccctataaaaacacatgtacaatcataatgatagtttttatggattattaaatttgatttgcaaattaagcacaatatcattttcatggaagttttttagggaagcagataagtgttttagtgttcttgaattgcagaatagttaatatcatttggtaagacatggaacaaaactttgattagagtcttgtaaaataccagaaaaatggtcatagtgataaaaaaaagaataaagaaatgaaagagattagcccatctttatatttctgctttgttgtaaagcaatttcttaatttatattgatatgaaaataactgaaattttctgaggttagcaactaaattgatattgagttttgctttgtaggtggattggactctaaatattggagagcaagcccttgacatatgtattgtctctttcaatcagtcggcatcctctgtttttgttcttggtgagagaaactttttttgccttaaggataatggacaaattcgattcatgaagaagcttgattggagcccaagttgttttctgccatattgctcaggtgtgtagaaagattttcttttatctcttccatatgtcaaggctatgtgatatacaccagaaaaagccacactcatacacatattgtaaacatatatgaaaacagtttaatattgaatatgtaatggaaattttaactttcaaagtttgaatggaagtttgatataaagcacacatttggttttgtcagtcattttactttgtacaaaatgacttgtaaaattggcctccggcatacattaatactttccataatgtggctattcaagatgctttcaagagaacatcagactcttttataagcacaatagtaatgtctaatagaatgaattatctgtagtgaatgcgtagtaaatcattagcttaaatgtgttacatattaatgaaattcatgctttctagatgaaatgcaaaaatgttggtgattatctagttatagcttccaagactgtaaaatgattcctttcttttttatactggtaaagttacaaaataatgttttattatgtaaaatctttatgtattaaaatccaggtgttagaattagtttgtgctatcaatttcctaaaagagatatacttttccaaatgactgttttcttagtgtctcttttctgtattttcaacttacagtttctgaaggaacaataaatactttgattggaaatcataataacatgctgcatatttatcaagatgtgacactgaagtgggccacccaacttccccacattcctgtagcagtaagagtgggctgtttgcagtaagtgatttaatttaacacagtttttaaagaggatgttagtcaagaaattttctagaagttctatgaaataatgacaagtgattttattaaaaaattacaggtgacattgtagtatgaatgtcaataataaaagtaatttaaaatataacttttattggaaaggaaggataattagtgctattaatcattttcatttaatatttctagcaagatatccttagtaaattaaaggtaaaaactggtgaagacatcaagaaaatggtttacttgatagattattcttcagaatacaaaaatatttcttttagcatttgatgagtcccttttagagaacatttattgatagactgtgacgatattacactgttcattataataagttctcaccttgtttcagacgtttcattaagtcaagtgatgcagaattgttaatgatcatgtgtttacacagtttagattttaagtggggctactttgtatttaaattgaaaaacagaattcatactttaacattaagtttacaaaatttatcaaaaatgacagaaatgagccatctaagtgagtaatttttctaggtcatcagtataaaaactgagatgccgatgaactttttagcatcttagattatgtttaggaattgaaaatatcagcaaacgtatagaaatacaactttccataaagcttcatagattctcagatgtattcagttctacttatttataatattttattgagcatttaaaggccatacggggcggggcacagtggctcacgcctgtaatcccagctctttgggaggccgaggtggttggatcatctgaggtcaggagttcaagaccagcctggccaacatggtgaaaccctgtctctactaaaatacaaaaaattagccaggtgtggcggcgtgtgcatgtagtcccagctgcttgggaggctgaggcaggagaattgcttgaacccaggaggtggaggttgcagtgagccgagatcacaccactgcactccagcctgggtgacagagtgagactgtgtctcaaaaaaaaaaaaaaaaaaaaaagccatctgtagaattcttcagtgacacctatagtttctcatcaggatggagttgttttctcctattaagggcttgagtgtaatattattgttgaagctcaacgaagggtattcatatttgcatcagtgttttatctaaagcctgaattttagaaaaatggaaacggtgttttgaaaacattgaatattttaaaaagaagttgctttcttatgttttatgagaaaaaacatataattctaattgctatgcacttaacacaagttatagttattttgtgtctgaaaaataatttaaaagttttgagattggcttttgcaatgtccatcacatggtctttttaaatttaacagaatattcatactcaccagacattttgtatcagatttacttagaaggatttagaacaggaaaaacatcttgccagcagggcaacatcaagtatttcacttctggaagagtaattcttgcaggagtctatatatccatccaaagctgttctctttggtctcttaagtgacagttcatttgcaaaaagacagatccacactggtgagtatgggtctcattttgacttataatcttcatgtccttcaggagccaatatcttgaaatacttaaaaattattggggttttggtgtgtattttgagcacaggagaatgatgggtagaaagaccttattgagaacatttagttgaaatatatatatttttacacatacattatatacaagggatgtacccatttcaggagtcaccatactgagaaaagtgcaaaggtatggcttctcagcagatatttattgttaatttatagtttttggtctaggtgcaacttatgagttaacagtcaataataactgaaatattatgagtaaaacaccaaattttcatatagtgtgcatcatgatgcttatgttcaaaagtagcctgtcattttattttcggtacctgtgagtgaaccttcctatttctcatagcttttgcaagatgacagttataaacaattaaatccaaatattgccattagtattttccacaattaatatataaaaataaattctaattgttgaactgaagatttttcttttcttacatataatttaacacaaagtataggattagactgtgtttgaaagaattccattgtaatttctattagagtttttttcttcttcagtaaactataattaatgcatgaaaaagaaaataaagattgtaaaacactagactcaattaacataaagtttaggaaggttttctgccctcaccacaattgtaagctgtatgctacagttatttaaataccttttatcatagtcacatcttaaatcttattacttatctaaactgaggcagtaaatggacaatttcaaaaatgatcataagtacagaacaccacaactatattttaatcacttgcaaaaaaggccgtggaccatggggagagcactcagctcttagctcatgctgcggtttaggttattaaccacaaaaggtaagggagcttccagttttgctctttggctgtcagatcatttacaggggggaagttggaatagtagctggtgttacagataccctacacaatgcaaagctagtgaacaccaatatctagtcatccggcaaaaaaagaaaaaagaaaaaaacagcataaactagcaagagcatctgcagccaactgcaggctaatgccacatcttttctcaaggctctatcctgggtatgtgaatgaaaagccctgcttttgtcctgatcaacaacagccttcctgtgaggaagatacttccttgccacgtgagcgctggtgggcttctcacctttgcaagcagtccataggtgtggtggttcccaaaatgtggcttttgccattcaccatgctgccctcactccctcacctcatgggccacaagagggtggaagagccaggcagatctaagctgatgtcccagaaggggtctgtggtggtggagactccatggcagacttggcaggtgatgtccaactgcagcccacctgtgaagatctgttctatgatgtagttgtggtagttggccttcttcccattgtcatcacctggggacagactgtggctctgggattagtgtctgtaaaccacaaagacagcgaatgtctaagggaagagtatgtttaccctgcagaggcctgaggaagccagcgctgacactttacaaggccatgtgaggatgctcatcatttcattagagggtcttgctgttatttaatgtgacgagaaatcacagcacttggattttcaatgctcctgtttttgtcattccctaagaagagccccatattttttatcttgccaacaaagcacatctaatgcccaatagctgagtaggtagttggttccctttttatatgagggacaattgaataaatattttcctgcagacagctgaaaatattgtgggccagatactgtaaccccagacaggttctttctgcctgttgcacaaacaaaatcaattcactgtatttcagtagagaaagagtttaattgatgcaaggccagccacaccacactgaagagggacttattactgaaatcaatctcattgaaggctcataggttaggggtttttcaaaagttctttgggggaagagtttggggtggctaggcaatgggtgcttgctgctaattgtttggaaggtgcaatcataggggtgtgggaaatgatcctgttgcatgctgaatcacttctgggagcagttggtgggtccaggtggaaccatcatgggtttcagaaatgcaaaaaacctgtaaagatctcttacaagaccactgttaggttctacaatagtgatgttatctgaaggagtattggggaagttgcatatcttgtgacctctggaataatggctggcaattgtttttgtctacaccttagcaaaattcaggctactctatcctcctagcctggtgttctctcattagctttacaaagacagttgagttttggggaagggctatttttacttaaactatagactaaatgtctcccaaagctagcctagcctaagcctaggaataattaagggagcttgaaggttagaggctagagggatgtaggttagatcatgtctcccccactgccataattttctcactgtgacaatttttgcaaagcctgtttcactttcgccctttgagtttcagcatgcctcattcccgaggtgtaagctatgatatgggaaaagggtgaggactgctctaacttcttcctactgacagggggcatagttgtggtatgggttgcccctagggtaagaggagtggaactgctttgcatgtattcataggtgcctgattgggcttccaaggcttatatgacaaagacgttaatattctcacccacagttttagcatagcacttaagtgaaccacagactataggataatgagtagattgttagaaatacagattcactaaataggaaatagcaaatttaaatatatcatcccatatttttttaatttcctagtcctgagactagatgagttcagctgaacagctgtttcccatatcaggaggtggcattgcagatgggctaggcctttgtatttgatgaaggcaaacagattttttaataagaggcatttcagacaggttccaggactatttcttcactgtaattagatctctgccctatgggtcgacagtgcctcaccagcaggtacagtgccaaagatgaccctcagtagaaataagcagttgtaagagctcacctctaggtctgttatactggaggaggctgatgaaccatgggcagatatttgcaagggtggatcctggataagcccccaaatttgtaactgtctgacgagttcttcctgctcactgtacaaacaaaattaattcatgacattgcagtcgagagagcatttaattgacgcacatctagccataccatgtgggagagagagttattactcaaatcaatatcataatctgttagaattttaaaggtaattattactaacttagctatagcttatctgtttatttatttttagagacagggtcttgctctattgctcaggctggaatgcattggcatgatcatagcttacttcagccttgaacttctgcctcctgtctcaggagcctcctgagtagctacaactataggcatatgcctcctcctgtctcagcctcctgagtagctacaactataggcatatgccaccattcctggctaattttttcatattttttagagatgaggactcaccatgttgcccaggctggtcttgaacttatggcctcaagtgatcctcccaccttggcctccccaagtgctgggattatgggtatgagccacagtgctcagcccacatatttatattaggaagttatttgaaattgacagtactgaaataatttttctcttgctttttattacctttagggttaaagctttttgatagaagcttccttggctgaatgtgttgatttatgaaggaagttgctgctttttaaatacgtttcttttcagtgaataagaaatgttggatttagatcaagttgatgcaattatacttaataacagcattttgctcagagtctaagatgttttttttctttccactcccacctacttggcagctttagtcctctctaccttgtttattacataccagttccaattctgtctgtgttttcttcttccttttcagattaaatctcattctcaattaaattgttttttatttaattattttcaatttttgtaggtcagactatgggaaaatgaaatcaatacacaggttacagaatcagaagagcccagcatcttacttctgctgtggtcagtttctcaagtggcaaataaagatcatcatttatcagtaatgttactttctctggagatatcaaataaatatatctacaagtgtggaagtccatttgaatgaaacttcacaaagatgagaaccattctaaactttgctggcagctcacagcaagctttaaaatcttattgcagtacttattgcagctcattttttagtttgagcaatttggtctagtacttcaatgtttttcttcctaggctaggtccacaatagtcacttattttaaatttgttacttaacagtttcttctttttaaaaaatttcctagcttatttaaatttttttaaacatttattttagatacagcaggtacaagtgcaagtttgttacatgggtatattgtgtgatgctgaggtttggggtacagattctgtcacccgggtagtcagcatagtacccaataagtaggtgttccacccacagccactccctccctccccactcttgtagtcgacagtgtctgttgttcccatgtttatgtccatgtgtgctcaataatactttgttctttagctttcattgatctaatattgttgaccagaatgtttcccccatatcttttctggattttcatgtttctatttcgagacatagctcaagtcacataaataagcctttcctgcttatcatggtctccctcttctctgaatttctatcacattcataattatgttgatgaactactatttgactttcctaactctccgactagataatacattccattttacttttgcatatcacactgaataatcagtgagaaagatgaacatatgatatatgcttcctaaatacttaaaagtcattgtggtttttatgtgtcaggggaagagctgtggctctaaagaccttataagatctcttagttgaaaaacctttttaaaatatgaaaaaacagactcatagagggaagaaggattttttcttgaaaccgaatttattagcaaaatatttttagttccaaagtgacattttcttttttggtttaagttttgctgttaatttgtcgtttttgtttttttttttttttttttgcattatagaaagagaatgtgagcctatatactttttgctatcctgtattttaaggattttctttttgaattcttacattccacagaaaattcataaatatttctggaatttatgtaaggtataaattctgatatttagcacctctgcatttttattgatattttcttgtatttgttataatgcaagagtagaatattagtttttcattactatatttttctgtcagttttctgttgaataagctttttggtttagatattctatgttagtcagcttatattcctgatagctgttttttttggtgagttaaaaaaatttgtcactataaaatgacctcttttgggttccatttaattttttttgtttgcttattttttcatttgtttgctttgagttcacttagatattagttattggtatgctgtggtctatgcctttttttttttttttttttttttttgaggcagggtctcactctgtttcccaggctggagtgcagtggtgtaatcatagcttattgcagccttgaatgcctcagttcaagcaatcctctcacttcagccccacaggtggctgggactgcaggcatgtgtcaccacactcagttaattaaaaattcttttttttatagataggatcttgttatattgtccaggctggtcttgaactcctagcctcaagccattctcctgcctcaacctctcaaagtgctgggattacaggtgtgagccattgtgtctggccaatgcttcatctttcaataggttcatttaattttcccaggaatgatatagggtgttattatattccatggtaaaaatgtattgttatatttcaccttcagactttattgatgttgcttccttatttttttaattttaaaattattattattatttttgtgacagggtcttgctttgttgaccaggctggagggcagtggtgtgaacatggctcactgctgccttgatctcttgggcgcaagcaatcctcccacctcagcctcacaagtagctgggactataggtacatgccatcacatctggcagattaaaaaaaaatttgtagagataggatctccctatgttgccagattggtcttgaactcctagccccaagagatcctctttccttggcctcccaaaatgctgggattacagatgtgagctaccatgcctggccccttatttgtttttaaaatagcttttagagaaaataataacctttgtggtttttgcaaaaagtatagaactgcatttttaaaaactattatttaaaagtacaaagaaaaataaaatacctttttattaaagttacatgagtcttatcaaatagaatgaacatttgttggcacttttaaatatcaaccctgatatttttctctacacacgtgcaaatttaggcatagaataaaatttacaaaacaggaccacatgaattttatttttaatttttttttaagatggagtctcactctgttgcccagactggagtgcagtggcgtgatctcagctcactgcaacctctgcctcctgggttcaagcaattctctgcctcagcctcctgagtatgtgggattacaggtgcccgccaccatgactggctaatttttttgtatttttagtagagacagggtttcaatatcttggccaggctggtcttgaactcctgacctcgtgagtcacccgcctcgcctcccaaagtgctgggattataggcgtgagccaccgtgtgtggccatgaatttaaaatataaatttatttcattatatcctagtggaaaaaagaaatagctgaagtggaaggaatatatgaattttttataaatgtttattcacaacattatattttagtttctaaaagacttctctaaacaagaatagaaaaaaatgcctttttggttgataccattagtcttttaaagctgcatttcaaattttggtagtgtctattgacttcctattgtgaaacataaggaaaatagcatacttatattttcttcctctcttcttgccaaattctggtattattggtatattattatttattttgtcaaaatttaaaacacttccatacattttttgtaatcacaatttctatagtgctttcatcctgttgatatatctaaatggagtcaaagcttaccactagttcttttactattcctgaattatcttgattcatttcttggtgagttgagtttaatcatcctgtagttttgtggaaagccgtgtaagtgttcttaccttaataattgtatattgcttttatacctgaagataacatccgcttccctctgaaatttggacattccatttggttttgaaagttgctgtggaaaagcctgaaggtagcttaattttttttaaaaagacatcttattggatgaattactttttctgtctggatgctcgtctgacttatttctcagtccttaagaattaaaacattactcctcatcaattaattatttgtatatatttgttctttctattttgatttttgtgatttttttcatgtcgcttatccatgttcttgagttggtttttagtgtatttattctcatttaaaaaatttatttattctagttattgcttctagtgtggctttcaaccccgtatcttttgagttctccaaacaatgaaaaaaagggtttcttttatttcactgatacaaggggtaactatttctctgaattcttcttttgtttctttaggaagtttttgctatggagattttctgtcttttatgttctcatctccctcatgtctacccctttcctttttttgcaatttccacacatacatctcttcttattttacagttactcattttttaaatggtgacagcagtttgctgaaggattgtgtggggagttttgagggagagtgatgattagctcagatcacctgaatattttcaccttctcactctgtttattttctcttttgccctgggggtccattttccttggttttcagggttcaagaggctagtgagtgtcacagaagcccctaacggcccctgtcacaggtccttggtgctaagaatcagtggctgccgcttgtctttctgtcttcattggttaggaagctgataaaagcacaggtatagggccatatcttttgcttccattctggttcttctgatgtcactccttctgtatcccatgcatgtccttaaatctcattccgttagtctaggacctgactctctcttccgcttgaagtctgcagagttggtgccagctcttggcatcctatcatactgtggtccagaatttaagatatttggtaggcttcaaagtttgttgattgtgactgtagtcatttcctcattcaatttcctttttttgggaggtggtagttattgtagtactttctgctgtttttggtaagttttgctgtattatctttgattagaattcaagtctttgtcagtctttattgttgctgaggagaaatccatggacaacctgatttttgttttgttgtaggtaatcagttctttatgtttgattgcttgtagaatgtttttcattttttctgtaaatgccacacttgccaccatatatctgtatgatgatattttccttgatattattgggaatgtagtgaatttaatctgtttaaaccatttgttttgctgctgaagaaaggtttcctatgttatatctttgattatttcttcagttttgtttgatttaatctgtccttcaggaaaactaatatcttttggttggctacttattttctgttcccaatatctgctctctttttcctcataattttcatttctttgtcatttgttttctctgttttctgtggaagtgtgtaaaatttgtgttccatatcagttttgagaaaccacggcactggttttggtcttttctatgtctacagtggaagatttttttagtctgctgaggtactgtctttctcccagccacttccctcctacctcctgtatctttgctactcttaaccagtgtagtatatgccaagttacaattcccatgaggcactagtaccaagtacatcttactttgaaacatgtttatagtgtttattttggggctttatctctgagtatataatatgccattattaatctctgttctttacttggacaattttatagaatttgctacctttgtttagaagtcaatagatagtgtagaggggccacgggcagtggtagaggttggaaagattcaagagggtagttataaaatatgttgcttcaatcataggtcactaacagatgtctgtacagttttctggttcatatagaacttggaattctgaatcagatggggcagtgagtttataatcagaaatgttaggtagagtgacagaactcttggctttcatgggttcctatcaaaagaggagagctttggtttagggcctaatgaatctgctattgcattgtggtatactgtaacttaacatgagttatgggggatgaaggaacagaattatgtcatagttcgtatattttttcttcctcttactattggtacctcagtaaacataatttggacaaattatgtcaatctcattgaaggattttgggggtaaaattagttgcatgatttttgatggtcatcgttacatgcatgcatatatttccattgtgtcagataaaaggtctttatgagatgacccctagatattatattgatggggcttaaaatggagaagcacaagaattgtgcttataatgtccttatagccatgtggctaaaccattattgaggtatggcctgtcatttggtacactactttcataaactgtagtatggctattttgataagtgttttattcacatggaaaagaccttgtaggaatcattaaataaattaaaaagccatatctttatttttatttgtcagtcaaggttataattctcagaaaaattctccttaggaaaagttagatatcttctgcttggctcatgttttcatgatcattttatttttaatgtaataatgtaaaacacagcatcctccattcttataaacaatatcatagtaattacagttccagattgtttgattttgttacattccatagtaagtctatttaatttgcctggcagagattttagaaacactgtatagccaaggataagtagttgcagttagaatgccagttgggtttatgattttctgttttataaattaaatgtttcaatggtagaattctacttattaccacatgtttccactgaaaaacttctttagaagtactgtcatcaagactgtgaacatctcttaaaaatgaaactctcaatctccaagaaaataatttataccggtaggaaaaatccttttgtgttttgggttcctcattctgtatcccataattgatatatgggggattcagttgcagtagggttgtagccaaaaggaaagtgtttgcttttcactagttatgaagggtttgcctttcactaagcacataccttcttggccctttggtcccggagatcatttctatcaggttagtgactttgccgttcatttttcttagaaaacacatgtgatttaacatttttttctccttacttcagatagtgggtcctcctgataactgaaatttgactctctggtttcaaagatagaatgagtttatttttatgggttcctgagaattctgggaaatagctctatttcccagaggaaaaagtttgtgttttcttagttacttactgtagaatataaaagagaaaaagtgatttatttgtgtgtggggggcagtaacataaagtttatatgcggctaagctctttgcagaagtactttgaactttagaactttggatggacttagtcctttattctgttaactggtgtatggcctgttttttagaactagctttggagtgcaaaaatctgagttatcaccagaataaaaaaagagaaatatctctgtatctctgtttcccagaggaaaaagtttatattttcttagttgcttactgtaatataaaagggaaatgggaaaaagtgattttttttgataacataagatttatgtgctactaagctctttgtagaagaacttagaactttgggcttcagaactttgggtggacttagtcctttattctattaagtagtatatgacctgtatttcagaactagctttggagcacaaatcagagttatcatcagaataaaaaaagagtgtaaatatataactcttatggtataggatgttgggtgacttaaaattagaatcaaaaggaaatgcaagaattagcaatttttattgcttgctatgcactagcatcatttcatcattagactcttaatttctacaaagagctacattggtagcttattcaaaactttctaagtctttaacacatcaggtttaacattttaaaaaccttagtaaatcccctacatcttaagaaaaaagatttaggagagtgatggtgcatgtttacatttcaagataacggtattaattgaaattactaaaagttgggttgaaaagtaaaatagatgaatagtcatatcatttaagtcatttttggaattctaacttgaaacttgtaagcaaattaagtctcacctgataaaataggtctttaactctaggttatctgatcaacagaacctgccagttaacagattgtgggggttcccagatattctaaaatgtggaactgtattcaatggttttcctgcctttaaatagagaaaatccactgacttttgttccctaaagtgcagtttactatttaaaataagtgtaaaataaaagaattgctacctgctttattaatgtgctaaaaaaaggatagatacccatataatgttttgtgtgtgtaatatttaagactatacaagaaaactgaattaatttaaggttaaaatgttattgttttgagagaggagaaaggaagaaaccagtcaggcaggcagttagggtgggtcctcacttaaattgtttcatactaaagaacagcctgaaaaatcaagctttgggcacagatgagggaacttgcacagcggggcttgcctaagacatgcccacagctgcacaggtaagaaaggataaacgggtgacttgtccagacatgcctgcaatggaaaattctgtctcctgaaacatgtgcagtaaggggaacaaagcaatatggattaactcaagctaaggacccacatgcgcactaggaggatggggtggagctaccagaaattcgtgccttatgccgttatgcaacccagccctcctttggtttcttataaaaggctttacattcagctgtaaaaatggcaactcttttccaggctccctgttcatggtggagagctttcttcttttgcttattaaacttttgctctaacctcaacctttttgtgtccacactacttaattctcttggttgtgagacaaaaaactctgggtggtacctcaaaatgagagactgctacattgtggtgcattggcaagactgtaacagtttcaatcaagtagaagatgacaaaatgttattctgggaattcgttaacgttgaataatgtaacatgatgaactatgttctattaataattagcacgtatgttctagtcttgaaacaacttggctagataaaagctttgcttagtgaagaaagacttattaccctttttcctcttgtatttcatcaaaaaattaccttttatgttcaaatgtttttgagcaagagtatttttatatttgttgatagttagcatgaagtatatattatgaagatgttttatgagcatacatttattggctaatgagtaacatgttatttcccaataacactgttctaagaatttatatgatgataatagcaatttgtatcattatgtgccaggcaatattctgaattctttggacatattaacatatttaattctaaaacagttactactattattactattattgttatcctcattttatagatgatgtaactgaggcatagagagatcaaataacatgcacgagctcataagaaaacatgtaaacagctaattacagcctaagtgagttggtgttacaatatagaaaagcagaatacggtaggtccattcagagtatttatccaccatattgctagaagtcccaacaatttttgcttttactgaaaaactctgatacatttcccttctctaagataattgcttccctttcagattagtgcgattcaatattctatctaacaagacgtatgttatttagagttgttagggtaaacacctggaaaaaccagaaagtggaagcctaaaacaaaagttattacttttggagtgtggaactgaggggtggaagggcctggatgagttccttaaatatcttttagaaagtctcagacattctgaaaatcaacttgagtctttggaaaactaatgatgcagccaagcctctttcatttaaatctaaaatagtttagatgcattagattcaaacataaattatttggaatgaataaaaaatgaaagataaattattaagtattttaaggacagtgttatgtaaaagtgttttttctttttatttgagagaaaagttatggcttgtgaattagaaattactagtatttcagtagtcaaaatacaatgaaaaaaatggtagtgtttgcatttcagatgcaacattttgtatactactttttatctttaacttgtatttatttccatttctctcatcttcttattccatcttgttacctccaaattttaaatgggtagttacaattcatattaattgaatatttaaaaattttcttgtaaatgggtagttacaattcatattaattgaatatttaaaaattttcttggggccaggtgtggtggctcacgcctgtaatcccagcactttgggaggccaaggtgggcagatcactaggtcaagagatcaggaccatcctggccaacatgatgaaaccctgtctctactaaaaatacaaaaattagctaggcgtagtgctacaggtgtgcctgtagtcccagctactcaggaggctgaggcaggagaatcacttgaacctgggaggcagaggtcgcagtgagccgagagtgcaccactgcactccagcctggtgacagagagagactctatctcaaaaaaaaaaaaaaatttttttagaaggaaattactttgaattgtaatatctacagttcgcatttaggattgaatgtcgcaataacttaaagcatttaggaatgtaaaaattctgctttttgccttttataaaactttactaatgatggagcaagcaaatatatctgttaaggtcctatagttagataaagacctccactttccaaaaccttagcaacgtgcatgccatgtgaatgcagcatggggctggtgtgtgagtgatcaagcagctgcaacacagtttatatggagacaatatccagagtacttaaaatttaagtcaaatatatgaaaaattaaaacacaatcacatggggaataatggagggatgcagttaaaaagttatctcactgctttttcaatatctgcaggcttccagatagtaggaaattctttgttcttcccttcaacccatctgttgttccttagtgtaacgacatcactgcaactactgcagccactaaagcatcgacattaaaaaaggcaaaatttagaactttttacagagttttattaaactacaagtttgcagaacgatttggtctttaaatttttaaaaaattttttagtgtgtgtagcatagtgatatgatagaagtaatgcccaggcagacatactctaagattagaacagaattctcagtatttgtgttggtatagaaatttttttatgacttagaattaaacatagagatttctttatgtatcattgaaatgaattactttttaagtaaggagtatggttataaataggtggtccattaaacctgtgtatttgctttattcctttttgtccagactgttacatctttgccagaaatggaaatgtgtattgctgtttcctactcaaaaattactttaaagaaaaaagtattagttatttatgctaatttcagttcagtaaatataccatttttgtagttaaaaatttaaaatagggtacaaagcaaaataaagttctccttaaataatatgaaatatcataaaataatttttatttatttgtgcctgcctcacagcagaccttataaatactatttgtttctgttttgatatttttatcagatagaatttgtgtttactagcatagaatttagatagtaaattctttacttttaatcaatgaaatcacagttctcatagtaattttggatcagttatttatcttaactcttttttatttctttattccttagttagtgtctaaaatctgttctcttaagaaaagttaaagttttgttaaaatcacaataatttttgtccaggttacctttgcctatttttaaatgctaaaatacttaagcaatagttagatgttgcctttaggaagattattgttaccttccttatgttatttctcccaaatacatatctttctttcagcttgtatatatttcatgaaaattcatgcctattttgaataattttttcaagattatgtcacatttgagttcaggaaatccaattgtgagtagaagtatatgttactttacgtttagaatattaaaatggattaatgaaccttgagttttgggaaatctcattcttaaaccatttgaacctccaagtgatgctcagatatcactagcccatagaagaccacagaaaatttcattaacccatagaaacccagtgaattctacaaagtttggtgttctaaagataagctaactgaatagcagtgttaaatggagtttattcaggaagccatgtagcatggaaacaaggcctttgtcttgcaatatgaattttaataggtcttaattccttaagtaggttttttctatagctgggactggagtcctgtggtgtgtagtctttagggccgctccactttcaagtctttggggagaactaccttctccagctgaagttttctccagggaattggcttatagaaagatgtttcctctttcatatagggaccacccttattcagtttcttcatgcttggcaatgagttgattttcagtgaatgttggttgagtgaatgaatgaatgaatgcatgatgaagagattaatgaaagaatgatctgaaaacaagtgactcacttagaagagggttcaaagtcatgttacttcacagcctgaataccttgcctgtggaaaattaaaagaacatttagtttggctacttaaaaatgtttttttttttccccctgagacaaggcctccctctgttgctcaggctggagtgcagtggtgtgcccatagctcactgcaacctctgcctcccaggctcaagtgatcctcccacctcagccccccaggtagctgggaccataggtgtgtgccaccacacctggctacttttgaatttttggtggagatggggtttcaccatgttggccaggctggtcttgaactcctgagctcaagcaatctgcccaccttggcctcccaaagtgctgggattacaggcatgacccaccgcacaccatctatttgtggaacatttatttctttgtttaggtcaaactttttactgtttttattatgtcaggtgaatatcccatgaagagtcttagatccatatataattaaggtgataattgcaatttgaacttattgtatgcataaataatatttgctatgctgataagtatgcctatactgttactttaaattatagaaaaaagttggccgggcacaggggctcatacttgctctcccagcactttgggaagccaaggcaggtggatcacgagatcaggacttcgagaccagcctgaccaagatggtgaaaccctgtctctactaaaaatacaaaaattagccaggcgcggtggcaggtgcctgtaatcccaggtgctcgggagtctgaggcaggagaatcgcttgaacctgggcggcagaggttgcagtcagctgagatcatgccactgcactccagcctgggcaacagagtgagactccgtctcaaaaaaaaaaaaaaaattgtagaaaaagtttcaaaagaaattattagcgttgacctcattttataccaacagtcatgagttcaagtgtttttatgtacaaaatttctcataccactttcaaaaaagcagatttggttatcttctaatggaccatgtcaacatttcatttatatattttaccatgaaaatattttatatttttattaaacttgaatacatgcatattatcattttccacataaaatatgtaattatgtgaaagtgaaaatagaaggggttatagcaaagaaaaattggtatcagaattatacagtatcctgatgctctttgggaagaacttcagaattttaatgatgatatagacaagcagatgactcacagacacggaaaaaaggatctgtaattgttatatgagaggagataaatcaacacaggtcaaagtatgtatggatttctacctaggaggccctgaacacattcatactgtataatgcagacttgtattgtttctattgaaatattgtttctggaggtcccatgatgtcatctaggaaaaagtatcagtacagaaaatttataataaaatgaagtgtctttcgggaaatataagaccaagtgcagtatgctattatttctttccattttcccttttctgtatgtctaaataggattgtgtctcatttagtcaatatatagaacctatctctatagactatttattagactcagtactctagttaaatcatagagattcctatactgttaattactacaattattaatgagtaatatgctgtatttctcccaaatatctttttttgttcttcattatatacctctttatttcatcactttcttctgagagacttagttctttttcttcgtgaagagatctacataaagtgtaggttttagtgtgactcctagaaatatttttatgttacttcatttctcagtggagcacaagttatattgttctaatgtggggcatcttaaagactttttctccatttctctcagaagagcctaggaagaacctctaaattgaaggcacagaaacacagcattgtgaatcttagtctaacatatactttgaagccagtacaaataatttattttacattatatgatgctgtttaactttgatctagtcaattaaaacaataagactacttataaatatttttccatttataaatgtttacttctgttagcagcagcaaccctcccccccatatgccaaacacacacacactcacgcacacaatacttccatctatctatcatctatctatctatctatctatctatctatctatctatctatctatctatctatctatctatctctttgtccatccatccatccatccatccatccatccatccatccatccacccatccatccgagtatgtatgtacatatctttcttccctggagtgtgagtggcttgccagagagggcaggcagaggcatcttggctggaggctccagttaatttaagacagtgggcattattaataggcagcatctgccctctcccttttggtaatgtagtgacccttttagctgctggatacccaagctttaagaggcaatctttaatgtgatatcttagagtaatgttcttactaaataaatcacatttagaagcttttatgcaatcatagtcatgcttgtatattaaaaagtctaaacatgatacacattaaaagtgaatttatattcatgaagccaaatttgattttctggttaatgatgaattcatctagaaattcaaatggttgcttttagtgttcatctatgtaaactgacacaataaaaatgtaagttatgctatgatattctgtgcttcattgcaagtggttttcttgataataaatttattttgccaaatgctttttcaaatagtctcttctttcctaagtaaacttgctctagttggaagtaacttaataggtttactgttacaatgagaccagtacaatcttttatttaggcattttatttaggagctttttcttcagttagtacccattcagttagaatgggcatattgaacatttaaaatatggttctagactaaaggatatacagagacattacataattttacacatttatactgctaaggcaagcatacgtattctacctattcataatattagagaaaaagagatactaattgccattgatgtttaagagtaaaattcttaaaccatagtggataatttcctgatatttttctcctgtgtcattttcttaatggtatttatacacaatttttggtacttaattttaaatttgaaatgagaaattactgaacagcactttaaaaattaaacttcaaagactacagattatgtaaagtttcaattatttgaaaaacaataaagtaagcaaaattaagaaataattttttaagaaaccagatttttttgtgatgcttaaattttgaacttctttttcactcctaattcatcccatttccccccatcttttaaaatttctgcagaattttttctaccttgcatgtaagttaaaaaaaatagtctattattattttagtttgtggaattcaaaaaaacacagttccagataatattggaataaagcaactttccaatttagaaaacactgacattgaagtaagatatgagaacttaagatacggttaagagagaacttaagatatggtttcttgataaatcaagaaaaatttatatattgcaatgtgatttaattactatactgacatctgtttgatccagactgttaacaaaatagtctagaaaatattgtaattggaatttttggtcaacagtgaatttttttaagttacaaattgacaccactctttatttgcaaagaaaagataataaaattttttataccaaaaagagaaatttttcacataaaaataaaaggtggaatatataaaatgggtgaggatatccagaaccttccatgtaacatgagtaagaaaaatcccaacaattaacaaactcatttttcaatggcctattaatcacagaattaaacaaccatgtaaaaattaaacctacttatacgttgaaatacattttaattcatccataaattcaacacactttaaaatgggtagaaaaagattttaactagcttaaaaaacccaaaatagattacttaaactgatgtactattgcttaagaagtatctctggaattctccgttagagactcctgatagttattttctgaacatatcttggaatcagttagtacttttaagttataaatctgtggaaaatatcacataccgtatgtgtaaaacaattagaatttaatttatgacatttgatcgtattttgataaaattttatggacagtgtaaacaatcttgatacccaattgctttaacaccattattttctattcacaagttgcattatttggcaatgataacttcattttgagtttgtagtttggaagttcttttaagtcaaggaataatcacctgctttattgagattgttgtaacctaaaagagcaatatggaactcctagttaaatgagacctctgacccaaacttggcaattctctcagctagccagggaaaacacttgcagggttcattactttcttctgtcatcttgagagattctaccccatttttctcttctactgaccaacctttgacttcccagacttgtgtttctttccaacagaggcgaataaacactcttggtatgtgaagattaaaggcccatggcccctgtaggtgccctgaagcaaatttgttcagaattaatttggcacttccacttgtggtttgtttaggataggaaaccagatagaattcaatattgtatcttgaatcttaggacccagtacttttgttacaaacaacagaaaaagaaaaggtttaggtgccagtaacatttactcttcaaaggaaagtttttgtctttctgtgcctggttatcttcaaaagttgcagagtacaaaagaaaatttcagtggaaatatatttctttctgatatagaaaagacctttaaaagagtcattgttgacatgaaagggaaaacattctgattttctgggatgcaagccttagaaaacaagccggagtaaaagaacatgtagaaatgaataacatatgactccaggagatgacctgttgtgaattatttcagaatttagtggatatctcagatggttgatttttctctacatgtttgctcctatgaacttaccttcctgagtgggcatcagatttgttttagaggtgaaaatctattcaatgaataccactgttctaaatacataaaactgtaaaccattgctatggaacataccatgtgatatgtactttaaagaacaaaataagtttctgtatgactaaagaatataaggaagcatttctctaagaaattgtaatcattgatcagtctttagcggtgggtgacttggtttatagattttagaatctaaaactggtagatgtgttttgcctattatagtttggtaattctggcatcatataccttaatctggaaacagtagaagaatcaagaaacagagaagcaagaaggaataaactctttttttaggcacctacttgccaccttttttgtggagtgggcaacaaaagatgtatctcacaatattaccaatgcagtggactcctggaagtttgttgattatattttatgtaggaacagaaaaagccaaaagcaggcatttgataatacttctgagataggttggtcaataatacattcagaatcatgaaaggatgcttctctttaaaaattgagcataggacagatttaactttgttaaacacaaataccatcatcttattgaaaacttcttggacaattatagtaccttataaatagttatcaaagacagtttttcagtcctctatggttttaccgtagtgaacctttcaaaatttcattgggtagaaattttattacagccttttcttttttttaggagagatatgctcagttctcttatttgttggtaaatctagactttgaattgttaatttgaggataaatagaagagaaaggagagatgggagctatagaagcatcttaattcagtaatgtcatggttcaggaatattttcattttttttcattttaatttttttttatttgccaggttcaacattgacacataggaatattttttaaagctgtatttttagtgttggggtattataaaggttaaagcagaagactccgaccatggctgattaacttactcattagctctgagaccttgggcaagctatttaagttctctgtgcctcagtgcctccccgcttttctgtaaaatgggtttaataataatatctgctttgtggggttattttggggattggataagttaactttttattagactgcctggcacatgacattatgtatgttgtagccaacattactgttagttttggcacatttaccaatatgcccacttttaacaattattttacttagagaagctataaatacagttattgaattaaatccctttaagaatgatagttgtttctgaatgatatctctcttgaaagactgggcccaagatagcaaagctaggcaaagagttaggtatttcctggtgaatgttatgtaatgggccacttagaaacatcatttagtgcccatgtgtgcagagttctgttttagcttcctttgcttgctggattgcaacaagttcaaacagttcaaatcagagggagctgggaaatggtgtttcttagaggcatttgattcaggaaggcagctagttatggcctggaagatcaaggacttgaactgtagtccacatagaggcgaggctgaactactggtaccttgatgcagtataaaggaacaagtcacgcttttctttttccatctattgaatcagtaccatggccaacctgggagaaaatattttagttcatggttaaaacagcagtcagaagtcttttattgttgttgataactgtttttcacttagagaaattttggaagatggttatctgtttagtgctgccaaatatattgttattatgcagaccctgtgggcagcagctgcagttgttttccaaaggacatgcaaccaatctagctatcatgcttcagcattgctggctgtatttggtctttttattcacaattgcatgcatactaagactttcagtcataatattaaaaccgaaggatgggtactgtattttgatgatctgtcttctctttcatctgttcttatttttagtcttcaaattacccttatttttgaacatttctgatcacaattatatattcaatttctatgtaatatattcttttttagggagttcagggaagttgtatatgatgtgctgaaatgatttgctttgacttgacccaattataattttctttagccctgagccagctgaaataagattgagctaatttatgccactgtttttccagtaatgttgaagtagggcagaactacttattatgataatgttctcttccaaaataatagtaatattattataatttaataataatcaatattattataatttagtaatattcacaatttagtaatttaatatttactaaatattaaatttataatactagtttaatatttactaaatattaaatttataatactagtttaatatttattaagcctgtgctttgcatcaatcaggcactgggctaagcccttattaattcacaccaaacaataatttttgaagcaggtactactagtatttttttattttacagatgagataagagacgcttagaaacgttagcaaactcttacaaagccagttttggagcagggatccaattttagttgtttttgactttagtgttggggttcttattccctattctgtttttaccaccttccatgctataaattggcaagcagtcttggcagcaaatagatgttcactcaaatggggtaattgagagagtagaaatgaacaaagagacactagcaaggaatggtgaagcatcttggcactaacaacaatgggaactattaccgttcctgtatctgaaagggccagagaagggatttgttattggatcctgcagagagtagtgtagctataagagagggccatctgataggagctgttgccttagattgatggacacaatcaatcctggagactcagcagggagggaggtgaggaagttaatactctgaccccaccttcctccctctctccagtctcttgccaatgattttcattggccaaactcaactggaagccagagggaaagggatccttggatgcagtggtcagcttctggcatggagcagattggaaacagatgggaagtttgcagggcaaacagaaaatatccagttcacagatgctgtactgagaaaatactttctcaatgtcaaagcatcggtgagccaggattttctatttttgtctctaattatttgaaccatttctttttaattttaattttaattttgtcttcttaattatggtaggggaaatgtagaccaaggctctttccttgcagttgccagggttataatttggattttggaaaaattaactttggatatgactttccttgttttttttttttttcttctgtaaaatgggaatagcaatatcaatactatccctgttctgtgtggatataagaaggattcatgaaatagtaatgaactctggacacttaataacatttagatatattcatattttaaccttcctccttaatgttcttccttctaaatcttcaagctgctatctgagattatttttccttctgcctaaaaaatgctctttactgtttctttttgtatgggtctactgttaagtaaatctgtcagtttttctttgcctgaaggcatttaaaaaaatctgtttattttttgaaggatatttttgctgggtatagaattttagattagcagttattttctttcagcactttgaagatatcagtccattggtccatctggcttctgtaggtattattgagaagttagctatattattataattattacttctttgaaggtacctgtccctttctggctactatatttgcttttatttttgtgggtttacaatatatatgtgtgtatatatatacacacacataaatgggttacatgagatattttaatacaggcatggaatgcatgttaaaatcaggataaatgggatatctacattagggtaaatggggtatccatcacctcaagcatttatccattgtgttacaaataatataagcatattcttaattatttttaaatatataattaaattatttttgagtatcatcttccttgtatgccagaaaatataagtcttagtcattctttctatttttttaaatatggttaaccatccccatttcctcccaacctctgaatagcattcccagcctctggtaaccatccttgtgctctccatgcgttcaattattttaatttttagctcccacaaataagtgagaacatgcaaactttgtctttctgtgcctggcttatttcacttaacataataacctgaagttccattcatgttgttgcaaatggcaggatctccatttcttttttatggctgaataataataatattctattgtgtataggtaccacattttctttatccgtttttctgttgatggacacttagtttgcttccaaactttggctattgtgaatagtgctgcagtaaacatgagagtggagagatctcttcaatctactgatttgctttcttttgtgtatataagagggagtgggattgctggatcttatggtagctctatttttagttttttgaggaacctccaaactgctctccatagtggttgtactaatttacatttccaccaacaatgtatgagggttcccttttctccacagtctcatcaacatttgttagttcctgacttttagataaaagtcgttttatctgaggtcagattatatcttattgtagttttaatttgcatttctctgatgatcagtgatgttgagcaccttctcatatgcttgtttgccatttgtatgtcttcttttgagaaattcctattcagatcttttgcccgtttttagttgtattattagatttttttcctatggagttgttagagctccttatatattctggttttaatcccttgtcagaaggatagtttgaacatattttctcccattctgtgggttgtctcttcacttggttgattgtttccttcactgtacagaagctttttaacttgatgtgatcccatttgtctatttctgttttcgttgcctgtgtttgtggggtattactcaagaaatctttgagcagtctaatatcctggagagtttccccagtgttttcttgtagtggtttcatagtttgatatataagatttcagtctttaatccctttttatttgatttttgtatatggtgagagataggggtctagtttcattttttgcatacggatatctaggtttctcagcattatttattgaagaaactgtcctttcctcaatttatgttcttgacacctttgtcaaaaattagttcactgtagatgttttgatttgtttctgggttctctcttctgttccattggtctttgtgtctgtttttatgccagtaccattgctgtattagttatggtacctctgtagtataatttgaagtcaggtaatgtgattctttcagttttgttcttcttgcttaggatagctttggctattctgggtctttcgtggttccatataaattgtacgattatttttttccatttctgtgaagaatgtcattggtattttggtagtgatatcattgaatgtctagattgctttgggtagtatggacattttaacaatattgattcttccaatccatgaacatggaacatttttccattttctcttaaatttcttgcatcaatgttttatagttttcattgtagagatctttcacttctttgattatttcctaggtatttaattttcttcatagctattgtaaatgggatatctttcttgattcatttttcagattgttcattgttggcatatataaatgctactgatttttgtatgttgattttgtattctgcacctttactggatttggtaatcagttctaagtttttgctggagtcttcaggtttttctgaatataagatcttattgtctgccaataaggataatttcactttgtcctttccaatttgaatgccctttatttttttctgtagtccaattgatctagataggactttcagtactattttgaataacagtggtgaaagtggcatccttgccatgttccagatcttagagaaaagtcaatttttccctattcagtatgaaactagctatgggtctgtcatatatggcttttattgtgttgaagtatgttctttctgtacccagttttttgaggatttttgtcatgagaggatgttgaattttctcaaatgctttttttagtatcaactgaaatgatcccctccccccgccccttctttctttggtctccctctgttgccgaggctggactgtactgccgtgatctcggctcgctgcaacctccctgcctcgggctcccatgattcacctgccgagtgtctgggattgcaggcatgtgccgccacgcctgactggtttttgtatttttggtggagacggggtttcgccgtgttgaccgggctggtctccagctcctgacctcgagtgatctgcctgcctcggactcccgaggtgctgggattgcagatggagtctcgctcactcagtgctcaatgtggcccaggctggagtgcagtggcgtgatctcggctcgctacaaggtccacctcccagccgcctgccttggcctcccaaagtgctaagattacagcctctgcctggccgccaccctgtctaggaagtgaggagtgtctctgcctggccgcccatcctctgggatgtgaggagcccctctgcccggccgccccgtctgggaagtgaggagcgcctctgcccggccgccaccccatctaggaagtgaggagcgtctctgcctggctgcccatcatctgggatgtgaggagtgcctctgcctggccaccccgtctgggaagtgaggagcacctctgcccggccgccaccccgtctaggaagtgaggagcgtttctgcctggctgcccatcatctgggatgtgaggagcgcctctgcccggccaccccatctgggatgtgaggagcgcctatgcccggccgccccttctgggaagtgaggagcgcctctgcccggccgccccgtctgggaagtgaggagcacctctgcccggccaccccgtctgggaggtgaggagcacctctgcccggccgccaccccatctgggaggtgaggagtgtctgcccagccgccaccccgcctaggaattgaggagtgcctctgcccggccgcaaccccatctgggaaatgaggagcgcctctgcctggccaccaccccgtctgggatctgaggagcgtctctcctcggctgccctgtctgggaagtgaggagcgcctctgcctggctgctgtgcaatcttccaagtgtgaagtgacagcctttctgcaggtgtacccaacagcttggaagagacagcgaccatcgagaatgggccatgatgacgatggcggttttgtcgaaaagaaaagggggaaatgtggggaaaacagagatcagattgttactgtgtctgtgtagaaagaagtagacataggagactccattttgttctatactaaggaaaattcttctgccttgggatgctgttaatctataaccttacccccaaccccgtgctctctgaaacatgtgctgtgtcagctcagggttaaatggattaagggcggtgcaagatgtgctttgttaaacagatgcttgaaggcagcatgctcgttaagagtcatcaccactccctaatctcaagtacccagggacacaaacactgtggaaggccgcagggaactctgcctaggaaaaccagagacctttgttcatgtgtttatctgctgaccttctttccactattatcctatgaccctgccacatccccctctccgagaaacacccaagaatgatcaataaatattaaaaaaaaaaaaaaaagaaatgatcatatgggttttgtccttcattctgttgattagatgtatcatattgatcattttgcttatgttgaaccatgcttgcatccctaggataaatcccacttggtcctaatgaatcatctttttaatgtgtttttgaattcagtttgctagtattttgttgagaatatttgtgtcaatattcatcagggatactagcctttagttttatttatttatttttttgatgtacctttgttggtttgggtatcagattaatactggacttgtagaaagagttaggaagtattccttcctcctctatttttcagaatagtttgagtgggattgttattacttccttaaatatttggtagaatcagcagtaaagtcatcgtgtcccaggcatttctttactagaaaactttttattacagctttcatctcgttactcgatattgatatgtttaggttttggatttcctcatggttcaatcttgataggttgtatgcgtctaggaattcattcatttcttctagattttctatttattggcatatgttgctcatagtacctctaattatccttttaatttatgtatcattggttgtaatgtctccctttttatatcttattttatttatttgggtcttctgtctttttttcttacgctggctgagggtttgccaattttgtttaccttttcaaaaaaaccagcttttcatttggctaatcttttgtattgtgttcttcattttagtgttatttatttttgctgtgatgtttattatttcctttcttgtaatgattttgggtttggtttgctcttgcttttgtagttctttaaaatgcgttgtgaggtttgaggtttttctacttttttgatgtaggcacttatatttttgtttttgctttgtatttgtttttgctatatctcatagattttggtatgttgtgttttcattatcatttgtttcaagaacttttcagtttccttcttaatttcttcattgacccactcttcattcaggagcatattgtttagtttccatgtgtttgtatactttacaaaatttctctttttgttgatttctagttttattccatgtggtcagagaagatgcttgatattatttcaattttttgaatgttttaagacttgttttgtgacttaacatatagatgttaagtcacaaatctataatgaaggccatcatgctactgaaggttttttccttccatgtgcgaaattcattttatgtgaagtctctcatagtcagtcctgttactcaggacaagaacatgtagaaaacggaaaatatgaaactttatgatttaaaatatgagtcttttacaatcaataaattgttttggaataaaaatgatgaatggcttttcttttgataataatctgaaaaagtgtttgtattaaatccggtaagccagatatttgagttagtgaattgatattgtatgatggaaagtatctgaagcattttggtttcttgaaaggttatgttgtgaaaaatttgttttgtaagagtagacgtacaaaaagcatatgctattgttattacctagaatccaataaaagatagctttttgaaaattattaccacatgtgtgtaggagttgcttttgcagttaggttattttagataccagaataatttgtttcatattttaagcatagaaatgccccttcaaatttagtatccctgtgactctagcatgatatatgttagaaatagcacagaataaaatatcttggcaaataattgaagtaacacattctataagcaatctcttgaatgaaataaggatatttgcaggaacattgtatgtacgcggtatctgtgaggaatcttctcagctattaaatgcaagacttttgtcttaaacctcaaaattttaaaaagcaagaacacaaagcaatttgaatcacaattcactggtaaatgcaatatagcattcttttcaattttcaatttgtaacctatatttgcctttaaagtatcacttagttgtgtatatacagtaacaaaaataagattttctttcctacttgtggtctgagtttattggatattaaatgttggcaacattctgaagtcatttgaacccaaagggacttttcagcctgttgtaatagtggtagcagaagtaattagtaatcataaagaaggccaattcttgtttctcattttgaagagcatgtgtttgttgtggtctgttattattgatggtttatcataaaccatctagaatttcaaaaaagtttcttattagcagtgacatgtgtttacaaaattggcttgtccagtttagaagtataatctttgccttaactattgcattttttttttttgtaaacactcatcccttagtatgtgtgggagattggttacaggaattcctgcagatccaaaacctatgaatactaaagtctcttatataaagtggcatagtgtttgcttataacctatgtacatcttcctgtattatttaatgtcatctctagattatttataaaattgaatacaatgtgaatgctatgtaaatagttgttatactgtattttttagggcataatgacaagaaaaaagtctttgcgtgttcagtgcagatgcagccatcttttttttttttttagtatttttgatccatggttggttgaattcatggatgcagaacctatgaatatagagggctgatggtatttgttactaattaattcctcggctgtaggacctggtagtcatttattgaaatgttgtcactttatactctccaaaagtgcagttctaacacaaaccaattgctaggtattgttagcacatctccaaagtggcctaagtcgaaaaccaggtgggagtgaagtgacacgtgctcattggtgtgtatgtgtatagtggggctgggattgggatttcattgtgcaaatgaatagatgtcatcttctgactggtaaaaggcaggtaagcagcatgttgttagtttgatattctcagaggctcaggcagctagctgaatgtatgcctcatgaagacatcattagtaggaagcatagcaataaagggtctgcagcatctgctgagaaatgtggaatcatgttaggaaggactggatttggaggacacagctcattccagaccccgcttctctctttagagaacaaaataaggccagaattaagggatagactgcccaaagggtgtgaaagcaaatttagaaaaaagttgatttatcaagattagcctaacttttcatgtaggagtgaagtagatgagaaattagaaattacagagtttctgaaattcattgcttttactggagtgtactaacatgttatcattgctaaggtgtctgttcagaagatctggttattcactaacggtctgatgtttggcagcttgtgtttgtagaggtataggagagcactatccatcacagttctgtacctaggatttgtatttccctactgaactttgtaccataatgattctccatctcagtcagttgacagcttacttaaatgattgtggcagttttcaagagatgaatagatctctccttggaattttgaaaatgcaaacccacatcagtactttatgaacagtgttttaaaaatagactttgtacttattgttcctcaatcctgacgtagcttctatggggcaaatgagaagactccacctctcacttatggcctcttaggagccaccaactatacacatatgaaagaaaatgaagcatttttaaagcaacgtaaaaacaaatattatatcaattggtatagattgtatttttaagtaccagttgctttttggcacaaggaaagaatatggactttggaatcagagtgagcttggttcatttattagttatgaaattttgagccaatctgtcacttctctgagcctgagttttctcatctgcaaaatgtaggtgacagtaatgagggcttagatctatggttctcagtcttgatgacattagaatcactggagtagggggtctttaaataaaactgatgcctggattgcaggaggattacatagaagtagttaaaagaagattcttaggtgattctaatatgcaataggattgagaatcactagcctagactaaggtagtggtgaatgaacccaaggtttccaacacttcaaattataacacgtttgagtgaaggatggacccaagatttccaagacttcaaattataacacgtttgactggtgaatgaacccaagatttccaagactttgaattataacacatttgagctagaagtagtttaactgcttcattttagaaatgaggaaactcaagaagcaagtacataaattgatttggtgactttttatataggggcatgaagcagaaaaagaattattgttattctttggaacagaggtgatgggttaattatagtgatattataagaaataagaaggtaggaaaagggaccaggtttttgagaaagaaaagcttggtttccagcctgttgaatgtatggtgaccgaggtacatagatggaaataaatgtatatgaaagtcccttttaaactgaaaatactcatactcatgtaagttaatataattcaagtggaaatacttagaaggatccggccatgtggtattggaggttacagactaggggttaggctggcacctgtcagtgcagaattagtagctaatatagcattgaattctcagggagttagtggagcatgggaagaagaaaggtctgagtagaatatttagggattctcataattaggaggcaggatgaagagatcttaaaagaaactagagaaggtagagaagcaagagagttaagtccagtggcatcggagccaaaaaaggggcacatatcacaacaaatatctgtgtgtctgcaagacctgtactttccagtgtctgctgggtatcaccttagtgttgagtagctgtctcaaaatccaagcttgcttgccttgcctcctcaatcaccccacaaaattcagccctcctcctacagtgtgtttaatcttgatagatggcttcatacccagctttcccaggctaacacttaggaatcatctttgatttctttctgtcattgtttttctacatttaatcgtcatgtagtattattttttctatctttgtcttgttttttctgttcattgtcattacactatttctactaattccaaagcctactatatagatttttaaaaaaaacacacttgttggaaatgttataatttcttctatgttggaagtgaaaccatggtcattatgtgtataacaattcactcattctgggcaagagccaaaacacatccagatgggccatggataggatgacaatataatattcatccaaattgggatatttctgagagtaaaaggggattctgttaataattttaccaggataacaggcattaaaagggactgccttgtgcaaccaggatatatggctatactagctccctggttcccaactgggagcagttccctaccccaggggacatttggcaatgcctggggacatttttgaatgtcataaccggagcaggaagtgttgtttgttttttgtatttactggtagaggcctggaatgctgctaaacatcctgtgatacatgagacagtccccacaagaaagacttatttggctttttgcatttaattaattcagcaagtgcttatttaacccccttctctatgccagccactgtgctagattctggggatatattcatgagcaaagcagtcatggtcactgaattcatggaacttgtagtgggagagaccaagattaaatatataattgctcaaataaacatatcattccaacagtgagaagtactgtgaaggaatagtagctggcactttgggagcatataacaggggacctggcctagaatgtgaagtgagggaaagtttttctgacatattgaaatccaatggctaagcagacctgaaccagacaaagatcctttctaagaagaggtgaggaagagtgtaccaggtgccaaaggggcatggaagatgaccacttcagataagtggaagagggccagagtggtagagggacttagggtaggggatgggaggtaggtgatgagaggaggctgctgaggtgatccaggggtctgttcaaagggttttgatttctaaacaggaaaccattggaggtttctgatcaagggaatgatcagatttgcattttatagaaggctgcatttctgaaatattatctaattgtgtcactaccttttttactatcttgctttaaagagactgagtgctcacagcatttgagatctgtcctagctagacccatttgcatttgtgacttatctctcactctgtatattcttctcatatacccaccttgcttactgttagaaagctgccttgctttttctcctcaaaaatgtctacatattccgaggcaggcagatcacttgaggtcaggagttcgagaccagcctggccaacatgagaaaaccccgtctctactgaaaatacaaagattagccgggtgtggtggcatgtgcctgtaatcccagctacttgggaggttgagacaggataatcgcttgaacctgagaggcggaggttgcagtgagccaagatcgcaccactgcactccagcctgggcaacagagtgagactccatctcaaaaaaaaaaaagtgtctatatattaaccttccagtggcataaaagcaatggctattttttttctgactgacattcctctgtgcaatagaatgttaatctaaattgtaagaaacctgctttcccccatatggcatattaaaagcaattttaattttgaaagaaaaatagttcatccaagaaacatttgcattttgtaatacaaggtttcttgccaatgctttagccacactgcacttgcaatgacatacaattgtgtacccttaaacctctgttcctgctgctcctccaccagaaataccttttttctgtccaccatttttttgattacattctacttgtttttcaaatcctccatgaaacctttcttggtttcacaagattaacattttataatgttcttttctgtgttatgactgaattttgtgcatccatgatattatttagcacatagcgtcttgtgttagctagagcgggatataggcatctgtcttccttagtgactggaaatgaatatacttctgtaacctttatgacatgatgacatgtaatagtgttgcattaaaaatattgtttttaacacagcatcgtgtagctgcgcagtgaatgcttattgaatgagggaatgggaggggtgtgattaatattttcaaatgccgcatagatattgaggaggactgagaaaatatattgatttcctccactggagtctttccatagcttctcattggtagtggggtaaggcctacaacatcttgccagacattcaaaggccttatgcacctttcatttttatcataatttttccatttcaagcctcttggggagaaatagacttctctggctggtaggaacacatgtattttaatattatgcttgtgctgttccactttttcagaatgacctccctagccttaacacctttacaaattatacttgttcttctgggttcaatttgactcttaatttatctgcttaattttccttcatagcacctgtcatctttgaatgtactacatttatttcttttgttcattatttttctcacccctctaaaatttgaatgaactttttcaggacagagatttttgggttgtttcttcatttatagtctaattctgagaactatgcttgaaacatcattggtattcaatatgtattttttaaatgagtggttctggccttagtaaaatacttttctataaatgtgctgtactctgtggtgtgtgtgtgtgtgtgtgtgtgtgtgtgcgcgcacaggcacgtatttgtatttgtgtgctttgtggataacactttgttgaaatgccctacttcttcccttattgaattcttgcttaggtcatttcttctaggaagcattcttttccctcactgtctgatttttttggtcttctcctttgtttatttatcttatatatctctatattactctctttacttttaagttccttgaggggaatgaccagtgtaacttgcccatctttagcctctagcgtggtgcctgaacattgtaggtgctaaataaatattttttcattaatgaaagaagttgcgtcaaatatttataaacatattttgcttctggagtacgaaataggcacgtctgaaagttacatcattttctttttttctggttagcaattgtttagtctgtgaacataattagatttaacagtcttgtgttgactttctagtaagtctaataagagttagtttcaaaagaacagggtaacctctgagttcttgatacacaaacatttctttactacaaaaggtattttgttcagtctcccttctataacctctgtaatttttgcagttttcggtgacaacttctttttgtgcagaattcttgctgctttgatatctttgaaggctggccttggctcctccattttacttgtccttttcttgggcattttaattaccatgtccctctcattaagtaatccagctcttgattattgaggctaatggtgaatagcaataacaactgaaagccatttacataaacctcaaattgcaccttaaaaattatttaaaaatgtctactcttgagaagtcagcatggcatagagagcaaaacatacctcagtataaatcaggaaactgaggttctaggtttgattcttcctggctcctgggtttttgtgttcagaatgagctgtgtatgtggaaatgtattattacgaagcttttcctgaaagatggttatgtaagaaaggaccaacaagacatgattatttttaaaaatagcaaaagtagctccccagcacatatttgctaaacatatgcaggtaatttgctaaatgcttgacttatttccaggaaggggttaatacagtggaaaattctggcctagaatcatgtcttcttttatgtgttaggtaaggacttcaatatctaattttaatttcctttctttttttttttttcttacagattttctttatggaagcatttgttgcctcgatcttccactttagaaaaatgaagtttctccttttctttgggagaggatatatctgaatacttgccttcttggcatttatacattcaaagctcagtgctagattagagctattatttgcatagtcttttggtattgcccacttttggcattaccatattatttgacaattagaaggaatagggaaggaatattacatgactgtaaaagagttggttatattttatgttgacttcaagggttccatttgaactattatgggcaattaaagagttttacatttctttgttagttgattggtatctggagtgttgtagtgtgtttgtatttgcttataaataagtattatagataaagataaacttcataaagagtggatattttggggaaaatttcatgtggataatgtcatcctgtctggcattgacatacacaaattcaatctcacatagtctttgccttgagagagcgtacagtctattcaaagttgacacacatgcacaaaaatgcaataacattttatagatgctattatagaaaaactattttgtggggatagtgaggttataaaggtaggagtgatgtattttatctgaagatagtaagactggctttgggagagagaatttttaaaagaggagtgggtatttgctaggttgattgtgccaattagctttgctgtgtaacaaaccatcacaaatgtagtagcttacaacaatgatttatttaggtcatgattctatgggttaattttgggctggacttagttggatgatttttctgctcttggctggtgtattggtttcctagggctgctgtaacaaattacaacgaagttggtgacttaaaacaacagaaatttattctctcacggttctggaggacagactccaaaatcaaggtgtcaacagggctggtttcctctgaaggctgtcagggagaatctgttccatgcctctctcttagtctttgctagctgctggcaacccttggtgttccttggctagtagactcatcattgcagtctcttcctctgtcttcacaaggctctctcccctgtgtttctctgtcttttccttttctgtctcttacaaggatacacatcattggatttacagcttgtcttaattcggaatgatctcatcattctcttacccaaagcaagccacaaagtcagtccagattcaaggagcggaggaataaaatgattcctccgtaatttcccttgatgaaacgagctgtaaagtctcattacaaggacagcgaatacctagaggagaccattttggtcatatttgcagtctaccacactgataaagagaaatggggaggatgaaggggagggttaaataggggtggaagagaacatttgtagcataatatagagttaaaatgttaggcagtcctaggtcatgtcagggtagattttatgtatcatctttctaggtgtgttggtggtgtcattttatgtggatatatatgtgtatacatgtattaattttatttgtgatttttttaaaccatcagtttttttattatggaaaagttcaaatgcatacaaagtaaatagtataataaactcctgtgcacacagcactaagcttaaacaattatcaaccttctggtgtgcttgctttttctatacttccatctactcttattttttatggctttttgtaaggtaaaatttacatacattgaaagatacaaaccttaactatgcacttttgacaaatggttgtatctgtctcatccacacgtctctcaagttatagaacatttccatcacctagaaagtttccttgtgtgctttctctgttaataatcccctcttgcctgcacccaggtaactgctgttcatattctctttttcacaataggtttaagttgcctattctaaaactttatgtaagtgggatcatacagtaggtatgttttaatatttgtcttattttgttcaacgtactattttttaacattcatctgtgttgttgcatgtaacagtggcaatttatttttctattgctgagtagtgttccattcaatgaatataccataattaaaaaatctcttctgtgtaaatctttttgtggatttatgttttcatttatcttggctaaatgatgaggagaagatttgctgagttaaagggttgttatatatttattctttaagaaactgccaaaactttttgcaaagtagttagactattttacattcctactagtgatatgacagttctggttgctcaacatcctctccaacatttagtactatcagtctttttaatttagatattctaatgtgtgtatggtgctagctacttgtgattttaattagcatttccctgataactaatgatgagcatttttttcgtggcttattggccatttttatacttcgctctgtgaaatgtatattcatgtcttttgcccagttaaatttttttttggttgttatagtagttctttatatagaaggacgcaagtcctttgatgaaaatttgtttagtgaatattttctcccagtccttggcatggctattcattttttcacagtgacttttgatgagcagaagttttgaaacttgaagaggtctagtttatcatttttcctttaaggtttttgctttctgcatcctaagaaatctttatctattacaggtcatcaggatattgtcttatattttctttagagagctttataagtttagctcttttttaggtctgtgatccatctcaaattaatttttgtgtataatgtgaggcttatttttttccaaatggatatccaattgctccaacactatttattgaaaagactttcctttcctctttgaattactttggcatctttgttgaaaaccaattgagcatatgagcatgggtttgtttctggagtctttattctgttccattgatctgtttagtctcatgccaataccacattgtcttgattactgtatgtagatttatagtgtatcttgagttcactcgtgaaacccctccatatctattcctcttttttcaaggttgttttgctattttgggtttttttgcatttttgtagaaagtgtagaaatcaacttgttacttaaaaaaaaaagctggctgggattttcatctggattatgttgcatctgtagatcactggtgagaatcaacatctttttttttaacaatattaagtctttaagggtgtatctttttaaagcatatttctgttcaaataaagtagaggcaacaccttttcgtccataaggctattgggggattaaatgagataatgtggtttcaccccctaaagatgtttgagtttgtctcctctctcttcccatccatcttgcctgggctaccatcttttctttcctggatttactgtgttaactctatccaaagtggtctcttcacattgaaatcagaagagatctttgtcaaagatgaatctgatcatgtcactcctgtacttaaaacccttgcatgggccaggcgcagtggctcacgcctgtaagctcagcactttgggaggacaaagagggcatatcacatgaagctaggaacttaagaccagtttggccaacctggcgaaaccccgtctaataaaaacacaaaaattagctggggatggtggtgtgtccatctgtaattccagctacttgcgaggcttaggcatgagaattgcttgaacccaggaggcagaagttgcagtgagtcgagatcacaccactgcactccagcctgggcaacagagcaagactgtctcaaacaaaacaatacaaaacagaacaaaacaaaactctgtctcaaacaaaacaaaacaagataacaaaagcaaaacccccttgcataacttcccattgcttgaagataaaattcaccacctttaatggagtctaaagagcctgaataatttaaccttttgtgattccttggcccaatcttgacttaattgccctctgaattttctttgctcttgccactcttggcttctttatttcactggatgtttcatgtatttgcttcttttggagtctttacatatattggtccttcttgaaagaagcttttacaacatttgtcctcttatagctctgctcctcctttcccaagtctctcttctttgtattttggcttaaatgtcactttttcagacagtgaggtctcttgtaaccattgtccctacccttcaatcccatattctcactgcctggttcaagttcctttgagatctctatttatgtatctatatctagtctggctactttactttttaaataaaaattattattttttaaaaaatattttaatttccataggtttttggggaacggcggtatttggttacatgagtaagttctttagtggtgatttgtgagattttggagcacctataatctgagcagtatacactgaacccaatttgtagtcttttatccctcaccccccttcctctccttcccttccccagtccccaaagtccattgtatcattcttatgcctttgcatcctcatagcttagctcccacttaagagtgacaacatatgatgtttggttttccattcctgagttacttcacttagaataatagtctcgagagctgggcacagtggctcactcctgtaatctcagcactttgggaggccagtgtgggcggatcacgaggtcaggagtttgagaccagcctggccaacatgatgaaaccccgtctctactaaaaatacaaaagttagctgggtatggtggtgggcacctgtaatcccagctacttgggaggctgaggcaggagaatcgcttgaacctgagaggcagaggttgcagtgagccaagatcgcgccactgccctccagcctgggtgacagagcaagactctatgtcaaaaaaaaaaaaaaagaataatagtctctagttccatccaggttgctgcaaatgccattaattcattcctttttatggctgagtagtattccattgtatatatgtaccacagtttctttatccactcattgattgatgggcatttgggctggttccatatttttgtaattgcaaattgtgctgctataaacatgcatgtgtaagcatctttttcataaactgacttcttttcctctgggtagatacctagtagtgggattgctggatcaaatggtagttctactttaagttctttaaggaatctctgcactggtttccacagtggttgtactagtttacattcccaccagcagtatagaagtgttcccttttcaccccgtatatgccaacatctatttttttttattatgaccatttttttgcaggagtaaggtggtattacattgtggttttgatttgcatttccttgatcattagtgatgttgaatattttttcatgaccaagaacccaaaagcaaatgcaacaaaaacaaagatagattggtgagacttaattaaactaaagagcttctgcaccgcaaaaggaacagtcagcagagtaaacagacaacccacagagtgggagaaaatcttcacaatccatgtatctgacaaaggactaatatccagaatttacaaggaactcaaacaaattagcaagaaaaaaaccaaactatcctatcaaaaagtgggccaagggcacgaatagacagttctcaaaagaagatatacaaatggccacaaacatataaaaaagtatttttaatttttgtgggcacactgtagcattatatttttatggggtacaggagatgttttgatacaggcatacaatgcttaataatcacatcaaggcaatgggggtttcttcacttcaagtacttatcccttctttgtattacaaacagttcagttatactctttagctaaatatacaaaaaattattgttgactttagtcaccctgttgtgctagcaaatactagatcttattcattcttcctatctatatttttgtacccattatccatccttctcccactacccttcccagcctctggtaatcattgttctactctttatcttcatgaattcaatcgttttaatttttagcacccacaaataagcaagaacatgcaaactttgtctttctgtgcctggcttatttcacttaatataatgacctgcagttccatccttgttgttgcaaatgacaggatctcattctttttatggctgaatagtattccattgtgtatgtataacaacatttgctttatccattcgtctgttgatggacacttaggttgcttccaaatcttggctattgtgaatagtgctgcaataaacatgagactggatatctctccaatctactgatttcctttcttttgagtatataacagggagtgggattgctagatcatatggtagctctatttttagttttttgaggaactttgaaactgctcttcatagtggttgtactaattttcatttctaacaacaatgtatgagtgttcccttttctccatattttcctcagcatttgttattgcgtgacttttagataaaagccattttaactgaggtgggattatatctcgttgtagtcctgaagagtttcctcaatgtttttttttgtagtagtttcatagtttgagataaaagatttcagtctttaatccattttgatttgatttttgtacatggggagaggggtctagtttcattcttgtacatatagatatccagtattcccagacccacttattgaagagactgtcctttccccaatatatgttcttgacagccttatcaaaaattatttcactgtaaatacattcatctacagtgatgtttctgggttctctcttctgttccattggtctttgtgtctgtttttatgccagtaccatgctgttttggtcaccatagctctgtagtttaatttgaagtcgggtaatgtgatccttccagttttgtttttcttgctcaggatagctttggctatactgggtcttttgtgcttccatataaatcactggatttttttttgtatttatctgaagaatgtcagtagtattttgatagggattgagtgtatagattgctttgggtagtatggacattttaacaatattgattcttctaattcatgaacatggaatatctttccgtttttttctgtcctcttcaatttgtttcaaaagtgttttatagttttcattgtagagaccttttatttccttggttaattcctaggtatttaattttctttgtagcttttgtaaatgggattactttcttggtgtctttttcagattgttcactattggtatatagaaatgctactgatttttgtatgttgattttgtatcttgcaaatttacggaatttgttttttagtttttttggtggagtctttagttctttccaaatgtagtatcatattgtctgcaaacaagggcaatttaccttcttctcttccaattttggatgaactttatttctttgtcttgttgaattggtaggtaggacttttagtactatggtgaataacagtggtgaaagtgggcatccttgtcatgttccagatcttagaggaaaggctttcggtttttcccattcagtatgatattagctatgggtctgtcttacatggcttttgttgtgttgaggtatattccttctatacccagttttttgagggtttttttttatcatgaaaggatgttgaattttatcaaatacttttttcagcatcaatcgaaatgatcatatggtttttgtccttcattgtgttgatttgatgtatcacaatgattgatttgcatatgttgaactataccagcatcctagggatatatcccacttggtcctaatgaatgatctttttaatgtgttttgaagttgctttactagtattttgttgagggtctttgcatcaatgttcatcagttttattggcctgtaattttctgtttttgatgtgtttttgctttattttggtgtcaggataatactggttttgtagaatgagttggaaagtattccctccctctctgtttttttgtaataatttaagtagaattggtgttagtttttaaaaaaatatttggtataattcagcagtgaaatcactgggtctcaggctttttttttttttttttttttttgactgggaaactttttattatggcatcaatctcattacttgtttttggtctgtttaggttttggatttcctcatggttcaatcttggtatatttgtatgtgtctaggaatttatccatttcttctaggtttaccaatttattggcatatagttgctcatagtagccactaatgatcctttgaatttttgcaatatcagttgtactgtctcccttttaatctctgattttacttatttgggccttctgtctttttttcttagtctggcgaaaggtttgttcattttgtttatcatctcaaaaaataaccttttctttcattgatttttgtattgttttctttatttcaatgtcatttatttcttctgtgatgtttattatttttctcttttagtaatcttgggtttgatttgcttttgcttttcagattctttaagatgcatcattaggttgtttatttgaagtttttctactttttaactgtagatgcttatagcagtaaagttcccttctagtactgcttttgctgtatcccataggttttggaatattacatttccattatcgtttatttcaagaaaattttcaatttccttttaacttcttcattgatccactgttcattaaggagcatattgtttaatttccatgtgtttacatagtttccaaaattcctcttgttattgatttctagttttattccattttggtcagagaatattcttgatgttgtttcagttttttttgaatgttttaggacttgttttgtggcctaacattttgtctgtttttgagaatgatccatgtgctgaagaaaatgtgtattctgcagccgttagatgaaatattccacaaatatctgttacttctatttggtttgtaatgctggttaatccgatgtttctttgtttattttgtgtctgaaagatctgttcaatattgaaagtgatgtgctgaagtctatagctattattttacagggttctacctttgtcttttgctctagtaataatttgcttcatttatttggatgctacagtattgggtgcatatatatttacaatttttatatcttctggttgaattgagttttttttaaatcattatataatgacttccttcgtctctttttatagtttttgtcatgaaatctattttgtctgatataagtatagctactctttgtcttctttagtttccactggcatggaatatattttatcattcttttattgttagtctatttgtgtctttatatgtgaagtgtgtttcttgtaggcagctgatcattgggtctttttttaaaaaaattcattaagccactgtatgtcttttgattgtacagtttagtacttttatgttcagttttcattattaataattaaggacttactcctgccattttgttctgtggtttctggtcttctcttccttcttttcttcattcctgtcttccttttttttttttttttttttttgagacagggtcttgctctgtcacccaggctggagtgcagtggcatgatctcagctcactgcaacctctgcctcacgggttcaagcaattctcctgcgtcagcctctcgagcagctgagattacaggcaggtgccaccacacctggctaatttttgtatttttagtagagacggagtttcaccatgttggccaggctaatcttgaactcttgacctcaagtaatccacctgccttgggatcccaaagtgttgggattacaggcatgagccaccacgcttggacccctgtcttccttttagtgaaagttatctttctctggtggtacattttaatttcttactctttattttttgtgtccctgttgtatgtgttttgatttgagtttaccatgaggcttgcaaatatgatcttacaacccattattttaaactgatgaacacttaacactgatttcataaacaagcaaacaaatcaaagaaacaaagagaagactaataaaaactctacagttaactttgtccctctgctttttaacttttattgtttctctttatatcttattgtactatgtattaaaaagttgttgtagctcttatttttgattcagttcatcttttagtcttcttactcaagatagtttacacaccacagttacagtgttgtactattctatgtttttctgtgtccttgctattacagtaagttttgtaccttcagatgatttcttattgctagttaacatccattttttttttttttttccagattgaagaactccctttagcatttcttgtagggcaggtctagtgttgatgaaatctatcagcttttgtttgtctgggataatctttatttctccttcacgtttgatggatacttttgctggatatactattctaggaaaaagtcttttttttctttcagtgctttaaatatatcatgctactctctcctggcttgtaaagttcccattgagaagttttctgccagacatactggagctccattgtagggcatttgtttcttttctcttcctgcttttaggatcctttctttatccttgccttttggagtttgattattaatgatcttgcagtagtcttatttgtgtcaaattggcttgctgttctgtaacctccttgtacttgaatattgatatctttctctaggtttgtgaagttctgttattatctctttgaataaactttctacctctatctttgtctctacctgctctttaaggctaatgccttttagatttacctttttgaggctattttctagatcttgtaggtatgctttattgtttttaaattattttttcttttgtctcctctgactgtatattttcaaatagcctgtcttcaagcttactaattcttctacttgattagttctgttggtgaggcactctgatgcattcttcattatgtcagttgcatttttcaattccagaatttctgcttgattcttttaaattatttcaatgtctttgttaaatttatctgataggattctcaatgtcttctctgtgttatcttgaatttctttgtgtttcctcaaaacagctattttgatttctctgaaaggtcacatatctctgtctctctgggattagatccttgtgccttatttagtttgtttggtaaggtcatgttttcctggatagcctgggtgcttgtggatattcatcagtgtctgggcattgaagggttaggtatttattgtagcctttgcaatctgggtttgtttgtacctgtccttttttctgaaggctttccaggtattcagggggacttgggtgttacaatctagattttgggtcactgcagccatatctgcattagggggcacctgaagcccagtaacactgtggctcttacagtggtatcaccttggtggacttggttgagatccagaataattctctggattactagggagagactcttgctttcttcccttaccttttccccaacaaaaagagtctctctctctctctgctgtgtttcctggagctgggggagtagtgacacaaggactcccatggccaccaccaatgggagtatgctgggtaagagctgaatccagaatgtactgggtctcatccaaggcctctcataaccactgcctggctaccacttacgtgtggtcaagtccctagggctctacaatcatcaagtggtaaagctagccaggcttgtgtccttcccttttgggccatgaatttcctgtggccccaggcgggtccagagatgctctctgggagccagggtctggaatcagaaacttaggaatctacctggtgctctgttttagtacagtgagctggtactcaagccacaagacaatgtccttcctactcttttccctcccctcccctccccctcccctcttctcccttgaatctctccctattactaccacctctaggcttgcagtgagtactatctggctaccgctgatgttcactcaagccccaggctcttcagtcagcttgtgatgaatgctgccaggcttgagcagtgggttcccctctcagggcaggtcctaaaatgcttgctgtccgagagccaaggattagaattggggacctgaagagcttgcttggtgctctactccactgcagcccagctggtacctaagctgtaagacaaagtcccctttactcttctctctccttttctgaagcaaaatgagtctcccccatggcctttgcagttgggaatgtgctgaccggaagccagcacttctctgaattccactcaaggccaatgacgagtactgcctggctaccactgttgactattcagggcccaagggctctttaatcagtaggtaatgaaacttgccttgagtggatctttcacttaaaggcagtgggttcccttctggcccagggtatgtttagaaatgtcatctaggagctagggcttggaatgggtacccgaggtctctgctcagtgccttattctactgtggatgagctggcatccaagttacaagacaaagtactctttactctcctctctcctctcttcaagcagaaggaaggggtcttttccagagctgtgcactactttgctgggcgttcggggaaaggtggtgcaagcactcccttggctgcccaatctggtgtcttattaagtcttttgccctccatgtccactggcactgagcccagtgaagcactaggacttgcccaggaattgtggttcttgtggcctagactttcaaatttatttgggaccacagaacactttacctgcagtggcaaggtttcctggaactcagtttcctaccacttggatggacaatttcattttttattctggcagaatagaaaatgaaaatgaggtggaggaacatattatgtagggccttgaagactcttgtaaggatttgagcttttgttatgagtgccagaggagccaccggaggattataaggtaacatgaatatttttactgctttgttggaaagttactatagaggcacatgtatagaagtggagaggctggttaatagcagttatcaagggcagattaaagggtgtttgttaggcttggtgtggtggttcacacctatattcccagtgctttgggaggttgaagcaggaggatcacctgaggccaggaattcatgaccagacctgcaacatagcaagaccctatatctaacaacaacaaaaaaattagcttggtatgttggcatgcatctatagtcccagctacttcggaagctgaggcaggtcacttgagccctggagtttgagttacagtgagccattatcataccactgcactccagcctgagtgacagagtgagagtctgtctctaaagaagaaacactaaaaaacaaatatttgtttcatgcatgcagtagtgtacttggtgagaagtggttggattctggacatatttaaaaagtaaggctggcaatatttgctgatggaatttatgtggttgcaagaaaaagaaaagggagggggagtcaaggatggctctaaggttctttctggatgagcagcttaaagaatggagttaccaatagcagaaatatgaaagatgcaggagggtagctttgagttggagaggtggggccaaaatcaggaactcatgggtagccatgttgagctttagatgtctattggccttctaagtgtagctgtcaagtagggggctggatgtacatgtctggctggagatatagaggtgggagctggcgtgaagaaagtatttaaagtcattaagactgaatgaggtcaccaaggctggaatcctttgcctttattttgtccattgtttttcatctgtggggatctacttgtaggtcaagatccaccttctgcatcctctgccctgtgaagccttgctctgctctctcatgcaggcccattgcactctcttcttactgtgctctatctactacattggattgcaattgcttttatttaaagtaagtttgaagtcctcccaattagaccaaagatttttatacagcaagcctcatgtcttctttgcctttatagcttctgttgtatagcagatgctcaataaaaatgtctgaaatgattaatggtggattgattaaaatatgttcaagtgcccacgtccagtacttttggactgaggaagagctgtgtgaactgagtgtggctgactgcacttgaagggaaatgcctttcaatcatatgctccttactgaggtagaataaaatttggggtgcaataaatactatttagggttttaagatttccttggtatctatatatagtagtaaaaaccagactttgacaatgtgataacctacaatgttcctattttgcataaaatgaagccaaacaagagaacattaggtccaatgcatgttctttttatttgtttttaaaactagtattcttttgttttagtgtattaggaaatgaaagaaaccatttattttctatctattgagctatatttcaaataatttcatgttacacattttatagattggctttgttggaaaaataaaactagttaaatgtttttaatcccacaaatatttaatttttaagtcactgattgaaatttggtcactgggaatggaaaatagaactttttttttcttaaaaaaggataaggttttccttcttttatttatttatttatttatttatttatttatttgtttatttagaaacggagtttcgctcttgtgtcccaggctggagtgcagtggcgcgatctcagctcactgcaacctccgcctcccggattcaagtgattgtcctgcctcagcctcctgcctatctgggattacaggtgcacatcaccactcccagcaaatttttgtatttttagtagagatggggtttcaccatgttgggcagactggtctcgaactcctggcctcaggtgatccacccaccttggcctcccaaagtgctgggattacaggtgtgagccaccgtgcctggccctaatcttattttgtaactataagacaaaatgaaaataattcatcatttcactagttagggatagtcacatcctattaacatttaggtatttttcctaattcatgttttatacatatatatttataaacagaataaaatgtacatgcagtattatgttttacttttacatttattattttttctgataacagatatttgataagatatgatttttaatggtttctagacattctattatagatacaccacaattaaaaaatattccccccctatcatttgggttgtttctaaatttttaaaataaccatgaaagtagattactgcataaaagacaatagtatttttatggtttttgatatatttttctaaaatgttctctaaaaggattataacaaatttacattggtatcaaaagtatatgagagtatgtctccgtgtaccttctctaacagctggacacattattaaatacaatctttttgctagtttgaggtgttaatcaaatatacctttttaaaaagttttaaaatgtacattttttgattttgaaaatttttccatttatttattgactgtattatttttatgtgtgaattgtctgtagatggcctttatttaacctttttctgttgggtatagtatcattttcattgatttataagagttctttacatattagatttaacatataaaattgtgttttttttttggagacagagtctcgctctgtcgcctgggctggagtgcagtggcatgatctcggctcactgcaacctccgcctctccagttcaagtaattctcctgcctcagcctcccaagtagctgggactacagatgcatgccaccacacccggctaaattttttgtattttagtagagatggggttttaccgtgttgcccaggctgacctcaaactcctgagctcaggcaatctgcccacctcagcctcccaaaatgctaggattacaggcataagccaccgcgcctggtctataaaattgtttttataggtcaaaaccagttgaatatcaggaacttcacatggtttaacttaaaatgttgtattttatattggttgccaatgttttctgagtttgtcctttgttcttattatgtcatattcttaagcctataacaagtttaaaattttaatgtagtttaatttagagatcccttcctttgtagcttcctctgttgcgttcttatagcaaaagttttcttaccatctcaaagggagataaatatttttgtagtttcatatttttaaattgaactttaaaaatccatctggaattttgttttaatgtgttgttaaggcaggaatctgtttactgagtgatagaatcattatttacagattcctgagcaaaattctgttgtttaatttcatgccccattgctgaaattacaaaattaccaaacgtcctaggaatgtaatatctttgaccctgattcttcataaagtacattattctagtgacttagctcagtcgatgcacttcacagaccgataataattcagagaccttgattttgtcaatgttaatgatgcttttaagacagaagcaatagggtacacggtattggatttaattgatggttctgttcagcataacattctgtcattcatagaaccttacttattaacccacatgaacaatattgttaaaattttcattagatgcaaaaatcctcaacaaaatactagctaaccgaatctaacagcacatcaaaaagacagtacattatgatcaagtgggtttcattccagggatgcagggatgatttaacatatataagtcaacaaatgtgatatatcacataaacagaattaaaaacgaaaatcatatgattatttcaatagacacagaaaaagcattttataaaatccagcatggctttatgataaaaactctcaataaaataggcatagaaggggcttacctcaaagtaataaaagccgtatatgacaaacccacagccagcatcatgctgaatggggaaaagttgaaatcatttcccttgagaattgggataagacaaggatgtccacttccaccacttttattcaacatagtactggaagtcctagccagagcaatcagacaaaagaaagaaataatccaaattagaaaagaggaagtcaaattgtcactatttgctgatagtatgattgtatgcctagaaaaccctaaagactcatccaaaaagctcttagatcaaattcagtaaagtctcaggatacaaaatcaatgtacgtagatcagtagcactgctatacactaacaacaacaaaactgacaatcaaatgaagaactcagtcccttttacaactgccaaaaaaaaaaaaaaaccacacacacacacaactccccccaaaaaaccaccaccaacaaaaaatcttaggaatatacttaaccaatgaggtgaaagagctctataaggaaaactgcaaaacactgctggaagaaaccatagatgacacaaacaaatggaaacaaatcccaagctcaaggatgggaagaatcaatattgtgaaaatgaccataatgcccaaagcaatctatagattcaatgcaattcccatcaaaataccgtcatcattcttcgcagaactagaaaaaacaatcctgaaattcttatggaaccaaaaaagagctcgcatagccaaagcaatactaagcaaaaagaacaaatctagaggcatcacattacccaacttcaaattatactacaaggctgtagttacccaaacagcatggtagtggtataaaaacgggcacatagaccaatggaacaggatagagaacccagaaataaagccagacttcgagcgaactgatctttgacaaagcatacaaaaacataaattcagtaaaagacaccctattcaataaatggagctgggaaaactggcaagccacatgtagaagaataaaactagattcttatctcccaccttatacaaaaatcaactcaagatgaatcaaagacttaaatctaaaacctgaagtcataaccaaaagccacctgtaccccaaaaactattgaattaaaaacaattaaaaacaagaggccaggtgtggggctcacgcctgtaatcccagcactttgggaggctgaggcaggtggatcacgaggtcaggagttcgagaccagcctggccaaaatggcaaaaccccgtctgtactaaaaatataaaaattagctgggtgtggtggcaggcgcctgtaatcccagctactcaggaggctgaggcaggagaatcgcttgaacccgggaggcagaggttgcagtgagctgagatcacgccactgcattccagcctgggcaacagagcaaggctccatgtcaaaacaacaacaacaacaacaacaacaacaacaaaaacaaaaaagaaaaacaagattgaaggctttaatgtccctaaacaaattacatactatattatcattcttgatacagctttttgaaatttattcattcacccttgttttggtgctatgtgtttttttaaattgtggtaaaatacacataacataaaatttaccattttaagcattttaaaatgtacagttctgtggcattaggtacattcatactgctgtgcaatcatcaccactatccatctccagaactttttcatctttacaagactgtatctctcaaccccctcccccagcccctggaaaccaccattcaactttgggtctctacaaatctgactactctaggaatctcatctaaaaagaatagtttttagagtacacgtggtttttgcttacatggataagttctttagtggtgatttctgtgattttggtgcacctgtcatcgagaagtatatactgtacccaatatatagccttttgtccctcacccctctcccaaccatcccctcctgccagtccccaaagtccatgtcatcattcttatgcttttgcatcttcatagcttagctctcacttataagtgagaacataccatatttggttgtctaagttacttcacttagaataatggcctcctgctctatccaagttgctgcaaaatacattgtttcattcctttttatggctgagttgtgttccatggtgtgtatacacattttctttatccactcattggttgatgggcacttaggttggtttcatatctttgcaaatgacatgaatagacaattctcaaaagaagatttttttttcttcagccaacaaacatataaaaaagtgctcgacatcactaatcatcagggaatgctactcagccataaaaataaacaaactaagctataatgtctttttttttttgagaccgagtcttgctgtgttgcccaggctggagtgcagtggtctcggctcactgcaacctctgtctcctgggtttaagttattctcctgcctcagtctcctgagtagctgggattgtaggtgcctgccacccacacctggctaatttttgtatttttagtggagatgggatttcaccacattggccaggctggttttgaacttctgacctcaagcgatccacctgcctcggctttccaaaatgctgagattacaggcgtgagccaccatccccagcctataatgtcttttgcaattgattttttaaaaagtaaattgcttaagttctataattaccttagctgtcaagacattctggtgaaatttgttcttttggtgagggaagaccctggctactctctttaccacttgaacacgtgaaataccagtaaaaagtgtttttagagagtctgaagaaatatatgtattctctattatccaaactcttcctatttgaactcagaaacttaataggttcagataattttttagataaatggcttgtatctaaattgttgccatttgctatctaaattgatggaataaaactgatttagtaataaacctttcaactcaaagaccaactcaatttagataaggaggaatacttgtattgggtaatgctagcttttctgtatgatggactgttcaaaggatgaagatgaaatggaaatgcctgtttgaattcaaagaactgatgaatctcacattctctgagaagccccccccagaggtctgcgctttagcaccctagagttgcctgaggactcattgggttcgtagggcttagtggggctagctagaatgcggaacagactacagtcacaactcagagggaagggaagatttgctctcttgaaatgggcttgtcagagctgaaagttgggatttccatggccactagatggcttcagttacctgcaaagaaaggttcaaacccaaaggtactctggggttgcttttcatactttaagaagatcattccatttttggactatttgttttctgaggggtagatggcagaagcaattgataaaacttaaagtttttgaggattatctagtcttaccttctcattttacatataaagaatatttaggaaagctttcccaagttgactgagctctacaggagcagcatcagagccagactcaagtctcctgcgtcctagtctagttctttagctgttgaaccagtgacaacaatctattttttattcctctcaagtaatatgacagggttgcatgtcactgactatgcctgagtcctggagatgatgtgtattggaatgttgtgtttaaggcaggtggtgaagtggatgctggtgaccatcttatgggcagaactgagcaatggtagtatctactcccaacccagttgagcttttagattaatgaaatgactacctgccatgatccactgttggggagttttaaacatttttgttcattctaaataatcctagactcttacatgccttatctgttatatactttatgtccttttctcttcttcagatgaatagcaacatttaaacatcttcttttctctcacaatttttctatttttgtttacttttagagacaaggtcttgctatgttgcccaagctggattcaaactcctgggcttaagtgattctttgcctcttcaagtagctgggagtacaggcttgtgctactgtgcccaatttattatttttgattaatatctaacctttagaaccaagtagaaaatactttaaaaaaaaatcaaaagtttctgtagaaaacctaacaaacaaaagtgagtcaaacaaatccattatgtatcaactcaaaatggcttatcacgatgttgaatttttttgtttttatggcaaacttagggaggaagcaaatacagtattcatctcagctactttttatgacatgttcacaaaaacaactttaaaaaaattgtgtgctaaaattatccttaatttatatattatggctagtttctagagtaaaacagacctcagggagcctaagagagaaggaagagtgaaagaatggggaataaaaaagataatgaggatgagaagagtgatagagaaagagctagtaaatgggacaattggctgcttctagctaaaagtgaagagaaagagagaacaaaccagagggccacttgaataggagagcgtgtgaaggaagctgtgatgggaggacctgggaaagagggcaaacatgaatcctaagggtagagagggaaaaggatgaggaaagaccgggggcactttttttttcgcaagacctccgatggcttcccacatcaacttcgttggttttctgtcccctgggttgtcctgtcttcactcctgtgcctccttcctggtcttcagccagccagcagccccgctccatctcttggtccattgtacctccaaagtgttgttcacatgcttattacggaaatgccaagtagtagctggaaggaggattaaaaacagtacttaaaatgctcttagagcaggatttgctttgtagttaggtccccaaaagtggtagctattataataattaagcttttttcccggccttagtggaccttaacattgggaatacttctgtaaatacaaatcgtgtttgaaacatttgaattgagtctttgaagtaaaactttagaaatagatatatagttattttcttaatggtgtgttgatgctgaattgagtaaaaatgtagttggtcaagactaactctactgaaatttaaaattatgtctcattttctcttccttattgtagtgatttaaagggagtgatagtcactctgagtgatgatggtcacttgcagtgttcatacctggggacagatccttctctgttccaagctccaaacgttcaatctcgagaactaaactatgatgaacttgatgtagaaatgaaagaacttcagaaaatcatcaaagatgttaacaaatcacaaggtatctcatttgcagctttttattattttagtattcattatgaaattcatattatcttgtagatagatattattttgtgtatttgttaattttctcctctaggcttaattaaaatcatatttgtaaaaacagtattgctctttagcacacaaggtctttatgtctactttgtatgttatggcttctgaaaacgtattttatttaagaaagtgcttttgttgttaatgtttcatggacagcactatctagtttttttctttacatgctaagaaaggaagaagtacttctttgggtggtggttttaggccttgagaagagcattaaaatttagagtggtcatttattaacttcttatactcctgaaacaactttagttcttcttttaaaagaaaccaaagcacatgagctaccattttgctactaaaaatgtagtcatttgcagcttagtgacataatttatgtttgtagttaattaaccatccaaatggtgtgtagcttgcggtatgctgatttctaatgactcagaggctgatgatattttcagttcccgagttttgaataactcaatattatcttactttgggactcaaaagggtataatttttttttgtaaattaaaaggagaaacaaaacaccaatcctgcagtttgagttggacatgtgaaaagcattacttcaagttcccttttcagggtcaggtaaaagtatttttttaatgtgaaaaaatatggactattttcacataaaagaaatgttaaaacaagtaggaataataaaagaagcagagcatcaaaagccaaccaaaacaacagagccaatcttaatcctgatccaatcattttactagatttatgtacttttgagtctatgttaccaacattgtattcctctggtcctgaggaattgagataatatatttttaaaatacaaatattaaaataaagttattatgctttggtttcacacattcttttagaaagttttgaaagtaaaccagtgaagttcaggtctttcaagtacctccaattacttaaaaatctatttgttgtcagcgctgccatgtcaaatagagagtggttaaaatgggatgtgtcatatcgcagtatataattttttgtttcaatttttgttactagcatttttgggaataatagaattataagtcttgttttgtcatttaaaaatataattggggaagggtggcataggcatgaaacatgaaatttccagagttcattaaataatatggctttcatttcaaattttgtcctgagattttgccctttccatagtaatgttccaataatattttgattaacattaattgaatatgaaatttctcagaaaatcccttacagctaaaagttatttcttggtggttatagtgatgaccttgggtgagaaagtttaggctgttttacttgtcattaccttgatccttcagtatgtcttaaaataaccgctaattaagatagggatacacccacagacttaggtgtaaagtgcatgatttacataacctcaatttttaattaatgtttgaagttccttgccccttctatgccaccatcatttagttttatttctgggaaagaaacaaagggaaactttttaaactgagaggtatttaaaacattttatttctagatatggaaaaaaatttagtaacttgtacccttataaaaccatggtatgtttgtttattaaaatacctgtaattaataaaagcacaaaattgttttattacagttttagcttctctttattatgagaagttaaaatgctgaactttttgatgaccccattattcattttaatgtcacttattttagtttgggggctttaacttacaaaaaatgttcatagccttgtgggttatgttcagtacttaaagcttttaaaagtgttttcaaaggaagagttgcagcaaaatttaaagccagtttaaagagtacattttgttgtacacatggtgtatattatctaccgtaataaaagtgtttttgaagctgattttatgtgtgtaagttataagaggaatgtatgttgtaagcatgaaatcatagtaataatttctgtatggctcatggattctgaagcttttcatactcaactcattaatgtgaatcctgcctagtatttttgttaccagtagtcaacaacatctactcgtaggaactttcgaagacagaattttatttatgatttagatagttgatcatgttgtctacctggcatgagtatgaaggactgggtgcaacattgagataggtgcccatacagctgtgtcttcagaaagggacagagagcagtaagacgtggggatataaatgaaagtctgcactccatttgaaatgtccaggataactaagctgatgataacactgagtagtagaatcatttgtattttgtgacattgttcatttaggattctgtctggctacatgtcacaagatacccaaataagatagaggtttctttctttctcttgcaaaagaaacctagtgatgggcagtccagggttggcttggcagttccacagtcatcagagactcttgattccttctatctcggagtcatatattggtcctgcatggcttttggaactcctgccctcgcatctgctgctgagtcagcccccttaaggagctttcttggaagccacaccctgaatggctcctacttaaatctcaccagccactccaagctgcaaaactggctggggaattacatgacttagctgagtattttgttgcttagaataaagttgggctttaagtaaagaagaattgaagaatggttattgggatgggcaatgaacagccatttgtactctcattaagttatggaaattcccattccaaatcgtgcagtttggtgggaatgcctgatagcagttgtaggcagttcctttttttgtgagatagctgattcatattttcagtcagccatcctcagagtgtggggaatgtttcctctcagggtcacagggtgatctcagcaattctaggtgttatgtgcagatatgatttccagggaagaatcatcaggctatttctcctgagtctctcctcttattagggaggaatagctttcccagaaacatgtgccagctctctccactcccaacttcccttaccttccatctgccaggattaagtcccatgttcatggctaaaacaacaaatggtcagtggaaggaaatcatgatgattggatttgaccgtggagcctggaaggggtgactttctctgagatgaaggtgaatagctccacaaaattagggttccaatacacagagggaggagggaagaatggatgttaagtaggtagccaatagtttgatatgtatatatattatatatatgaatatatataatttaaaaatgttttttgtttaagatctttgttgatactatgaataaatatctcattatgcaacataaacatgtttaaaattatgaaaataacatgtgtatggtaaaaataattcagtactaaaaggataaataatgaaaggtgaatctttgttcaacccaagatcctagtttcactccttaaaggcaatccttatcaagagcttttgtgtatttgtctagaaaatattcatgtttatgtaattgttttgacacaaatatgtgcatattagacacattgtactacatcttgctttttaaaagttaatagatatattttggagtttttaaaatatcagtatgtaaagatggacagcacccttatttatgactttgggacattgcatagtacagatataccatgatttatttaataattagcctattaatagatatatagatatttaggttgttttcatttctgaaaaaataactactaacattagagacctccttgggcatggttatgggtattggatacattcttgggagtagaattaagtcacaggatatgtacattttacattttgctagttctagccaacttaccttcacaagggctgtactaatttgggcttccactagtagttacagagagggcattgagattcctaatgctggtcagtcaatggctcacatcttagcaaatatctgcagaaaaagacaatattttttaccatattatagagggaaagaattagcatcaagcttctaatactgtaatgcattagttttttcaacttgtgagtatgtttatggggttttttttatatgtggtatagacaaacctttaaagaaaaactatatatagaaagttttactttatgattaaataatttttctttttttaaatcacaggtgtttggcccatgactgagagagaagatgacttgaacgtttctgtcgtggtttctcctaactttgattcagtttctgtaggtgtacttgcagattttaaaggggtttataagagtggtaaactctgatgaattaggaccaaaatgcattggtttaaagtttggtcctccaagtagacacttcagggaggataacaaattgtaggccttgttattttctagataaaaacattagtagccccttagtgccagtaaggagctccttgggcaggatttctgttttaaaaagaagtggggttgtaggggaagagagagcagtaggagggcttcttgccctagttctaatcctacttaaaaaaattttttttcaaactttcttagtaccatagcattgacgtaatactaatgtagctgaataatactgaccctaccagatttttgttggagattcagttagataaggtttgtgagtggcctagctcaaagtttgatgatttctagtctttaatacattatggtggtggtggtggtagggtagcttaagagtatatagttggtccaatacttaatttttcccctgtttctatctgtgtgacacaaggcaaggtacttaattttcttagtctcaattttctcatccacaaaatgggaataataatagaatctactttgttgaatgttatgataattgttatgattgtcattatcatcaaattacattttacttctttctacattataataatcaacatcatcataatcattatgattatcacaaccatctatgtccatgagttgtcttgttcactgctgtatccttagtgcttgccaaataatgggtgctcaatatatatttgctctatgaataagtgaattaatacaactgagaaatagaaaggatgaaaggaggactattcttgattatattacttcatctcctcacttaagttttctataagcacttgttaggatgtgattgattatatctcactgactgcagtttatctgtgtagaaacagatgatcaccaacagaaattggtgtagaaattgatctgtgtagaaatctgtgtagaaattgatcaccaacagatgatcaatttagggaagtggttgaattcactcattttacaatatttggagttcatatcatataattctgcttgggaagtgtcttcattatttaggtatcagaacatactttaaaacgtatatcatgagtgtcaaaagattaattttagtataaacagccaatccaatttgtgataaaaatcacattaacattactatattatagtaaattgggtacacaaaaaagtaggactatatatgaaagaaacattcacccagctgagtcacatagtagaggcactgttttaaatattggccattcagcacacaccatttttcattctacctgaagggtgtagtctaagtggaacatttctgcttagttagctgacaaatgtacacatattttcttgctgtggaaatgacttttttttcctttgggcaacttatataagtttttctaggttctcttcaacataggctatttggaatgaggaattccctttctgttttttaggaacttttagtctttgtaggaaaattccttatgtagtagcactgtgttataatgtatatttccctattggtaaccctgaatgctatttcctcttaagtaggtgtctctttccagcttcattttccctgtgttactattttttctttcttaagagatttcttgagagtatcatattcatctcattggaaaacattagccctacaatttatgtggctttggtgccatgacgtcttcttatagccatttctttcttgctatagttttatgttcccaaaggactgctgtccttgaagtatctaggtgtttagtcatggattgatatgagcaggaaacaggagatgttggtttctcttctagatctgtggatagctaaatgtaaaatatttcctggattttaggtattagagcacaaagcctggattaatattttactttgaatcattattatgaaagcacacatctcaaaaaagtaatataatttatattagaatggagtctttcttagaggagataagcattgctatcccatcttccttactgagaagcaagatcatagtttaaatatggtttcctgtggagccataagtagaatatgaatctcttaactttgaattctgctgatgctcattacatcatagaatccccattgcttagaagtggcttagtttttcttagttaaaaatacttcaagtaaaaaaacgcaatggatcatattcattggttggatagagacataattttaattggtccccagaattcataacggtattattagaaaatatgtcaccccttagtcttattctatcatagagcattttcccctaccaatgtatcactctaaaaaataagttataagtgataagggaagtgttttatgtattatattatactatgtattctttaagaggaaggagcaggtaacacgaggtgacgctcaaagaatgcctattgaattagtttatgatatgcactggttaaaaaaaagtttcccttcccttccttccattcccctcccctccccgcccctttatttttgagacagagtctcgctctttcacccaggctggagtgaagtggcgtgatctgggctcactgcaacctccgcctcccgggttcaagcaattctcctgtctcagcctccggagtagctgggattacaggtgcctgccaccatgcccagctaatttttgtatttttagtagagacggggtttcatcatgttggccaggctggtctcgaactcctgacctcaggtgatccacctgcttcggcctcccaaagtgctaggattacaggcatgagccaccgcacatggcctacttttattttatgggtgtaaggccactcaatctttatatcattagctgcatgtcttagatacatgttgttaatcagaataacacataccttacacagggtgaaaatacagggacctgaaagaatggcataatatttttctgggacatacagggaggtcttcttctatgcaatataaataacaagttaatagaattaatactttcaatatttaagtaaatctgggaatggagtggtttgataaaatatgtgaccttttctttcctttttaggggatgagtttttttttttttttttttttttttgaggcagagtctctgtcgcccaggctggagtgcagtggcgtgatctcggctcactgcaagctccgcctcccgggttcatgccattctcctgcctcagcctcccgagtagctgggactacaggcgcccgccaccgggcccggctaattttttgtatttttagtagagacggggtttcacggtggtctcgatctcctgacctcataatccacccacctcggcctcccaaagtgctgggattacaggcgtgagccaccgtgcccggcccaggggatgagtttttaaatattagcttatgactttctggacgaaggcatcaaaaaagccagattgtctcttttagtctgtcattagagtaataaatcttttatagtttcctattttgatagtaggaaatatacattgcactcattgtgttcactcactgctgtgtaatattgacatcattctttcttgccttctcaattctgtgtttacagcaagcgaccgatgttgaggtgggaactgaccttgtcccttctgtcacggtgaaggtattgtaccagattttagactgtaatgtgcaaacaatatgatttatttcattacatctgtcactgttgagaacttgtaagtagcttacagaaatgtaaaataaacacttggcatttgtagatttttccccagccttgagtagtgaatagaaaacctttactgttacttgcaaatataaaactggtaattgcatttatagcaatatgtatataatataaataactattatgaagtactgttaccattatttaaatgtgtagcatgatccaggcttttttctttggaaataaagttaacattttaaatctgctaaaggaattgtgtcatcaccattcataatagaacaatcaagtagcatcatacatagtatactgtgaattgatattggagaagcacggggatggtaatatctttcttctacctatgattatgtggtgtttgaaaagaatttccagccatctctctgccttaactttaagtggatgtatttacagcaagaaaatattgaatgaagatgccacaaagttagaatggtaacaaattgatagtctggaaaatagaatattaaggatgtggttttggttaagatttttagtcctgtcattgtagaattttagaactagaacttaaatgtagaaccttcttaaagcatttagattaaaatatggtaatcagtcagcacattattaagctgaaaatatttatcatgcccagaccttggaagcaagggaaggttgtggattttggcaattcacttagtcaaaacttggatggggctttatattttcttagattatgggttgctctccttggaggagcttgacagggcaccaagctttaccaattgtgttcgcttacactggaaccagcgggtggcccaaatgtggagatctttggtcgaacttgaagggagctgaatcttacaacagtttcctaagctaagttttttggattcttgccactggaaacaagggtggtctttccccaacctcctttcccccagtccaatcaaaggctctatctcattaatacttccgaatctggaaaggcattagtggcaagaaatcaaacacttaagaaaaagaaataactgtcgagttccaggaatgatttgtacttttgtatagggacacctcttttaaatctatctactgataacgttcagacacatacatgtaataatttaggagtgcactgttaattgcaataagagatcttgtgccttaactagataacattgctcatgctaattgtacccccagccaaccaggaattagcaccgtaagtaaacatacctttccctcccatgcagttcttaagctttcatgtgtagtagccaccttaaaatgatggcatgacactactggaaaattctccttctgttcgtggaacttactatatttgagaatacctaagtcacaactgtctttctcattgccattataaaagcatgagaaagaatgcaacaggcaaggggtgcagaaaattggtgggactcacacagcagacacaatgtcttcctgatcctgtctgacagtttctatacaaatttctactataaatctctccttatgaccttttataacaacagcagccaagatatacaaccatgcaagtttccatcataataaatcctgttaattgagaaaatttttccatccgttccaagtgaatgaagatgtggctaccttgagtatgtgtgcatgatgcgtgaccatctattccaggcaactaggcgagtggttgttcatacctggcctctggtgttgtatttatatatctaggataaaaatttggtattatatttcctaagggttatatttcataagaggcagaaaatagcatggaaaattcttgtatcaatgttttatattttctccttaatattctataattattttcctgttaaaatataagacttgtgatctagccaagtctttaactcttttttggctcaaacacaactattctttgttactgttgttattttcattacctatctccttgatttgtattttgaaagggcctagcccattgttggggttcaataaatatgtgcatgagagctatcatgattgtgcaactaaaccaaatgcaaacccttcttgttacaatgtaaaattctgtgattattgtctaagtagacatcgttgtgccaggaaaagccagactgctctttttcaaatggcttattactacttaaaggaattttcatttttacttaaaactgagttctcataagactttcctggtcactattttcaactctctacttggattgatggctttgcacaggttatttaccttctctgaacctctattttttaaactgtaaaatagggatactttttcatctgcaaagttattttgagtcttaaccacagttggttaaaggcatgggctcaggattctggcagatagcagttaaattgtggttctgccacttgcaatcaaagtggccttgggcaaattacttagcatctctgagccacagtcttttgtaaaatggtttatgatggtacctgtcaaacatttttgtaaagagtaaattaaataatggcacgtaaataatttgttagcatggttccatgaatatagaaaattgctaatattttttatcattaatattattcattttatttaaaaatatatgtacagactagtattatattattataatagtagaatatttaaattgtgtcttgtttgtttaatggactagctagttgaaagaaagttgtttgtagcacttgcatggtgtcttcctgccataataaccatcagggttttactaaaaaggtattatgtttacaatggccagacatcattgaggaagtttagtttgtggcatgatgattccctgtgtattcccaggatttacaaagtaaaaattgaggattcattgttcatggtgtttatcatatttaattgcatcgatagttgtcttaaaaattttcctttgcaagtcaaaatttttatgtttttaacttatttttaagttgtgcagaatactcacatcacttaaaattaatacatttactgaatctaattatgtgttcataatgtttgtgggccacttgtatattcttgtatatataaaaatattatatatatttaatcaagaaagaggtaatacatgctttttattgaaaagaaacttcaaaactacttttcttaacaataagaatggtccttgaattatgttaatgtatgtatctgtctcatataacaaagtctaataactagactgaactgccgtatagaaaaggtaccatatagaatggtggtttattttatttaattttttttctcatgacatacgagtcaccatgatagaacattttaaaatagctttacttagatataatttagatactatattattcacttagttaaagttacaatccgatgacttttagtatagtgtatttacagaattttgcaactatcaccacaatttaattttagaacattttatcccacctaaaagaaatgccatacccattagctgccattccccatctctctcatccctaagcaactcctaatctactttatttctctatagattgcctattctatacatttcatataaatggatcatacaatatgtggttctttgtggctagattttttcacttagcatcatgttttcaaggttcacccatgttgtggcatgtaaatgaaataatgcacataaatttgttagcatggttccatggatatagaaaattgctaatggtttttatcattaatgttattcataatgtatttcatttcttttattgctgaacaatatttcattgtatgaatatgtcacattttgtttattcattcatcatgatgggaatttggattatttctgctttttggctattagcatattgttgctgtgaacatttgtgtataagattttgggtggacctatgttttcgtttctcttggtatagaattgtgaagttatatgttaaatttatgtttaacctttgaagaaactgccaaacttttcttagagtagctgtaccaatttacattttcactggcaatatatgagggttctagtttctccacatcattgctaacacatgttattgtctgtcctttcgattatagccattttattgggtacgtagtagtatctcattgtggtttttagtttgtatctccttcataactaaggatattgagcatctttgcatgtacatattgccaatctttattcttttgagtaaagtctgtttagcttttgtgcacagtttctacttgatagaatattttaatctattacttactgtattatgttttgtgactactcattttttcctcaggtaatattttctaattatttgctagttatgtttaagtagttacgatagtctatcagtttgaataaaatgtaattttctattgataacaatttctgtttccttaggtcacactgcagaacagagtgatattgcaaaaagccaaattatcagtctacgtgcaaccaccattagaattgacttgtgatcagttcacctttgaatttatgagtaagttttttgttttggctgaaagtctaccatggtgtgaattttttaaaaatactagtttgttcatttaatggctattatttcatgtctgaatggtgagattgggatcgtcccaaaatcaatgattgtgttgttttgcttatattttccctcttagcatcagcatgaacgttcaatcaatgattgttgggtcaaattaatcttttacgattacagatttctaggtgcttttctgaacttgttggacctataattgtttttgatttatttatttatttttgagacagggtctcattctcattggcccagactggagtgcagtggcaccatcatggctcactgcagcttcgacttcctgggctcaagtgatcctcccacctcagcctcctgagtagctgggactacaggaaaacaccacctgactaattttttgtatttttagtagagacggggtttcgccatgttatccaggctggtcttgaactcctgggctcaagcaatttgcctatctcggcctcccagagtactaagattacaagcgtgagccaccactcctggcctgtttttagatactaaaatttagaaggctttctttattggtgtttctttagtgatctatttattgaatcggtaatgtttgaagaattaatatggactttggagtttggcctgagtttgaatccagctctaacactcacttgatgtgtaaccttaggcaaaaactacattagtaatcacttggagcctcatttattttaatctgcaaaaagggggtaatgatatttgttttacaaggttgttttgaggatttgattaaaaagtaaatctataaaagatatccataataatgcttaaaatagtagacatgtcattaatggcaactcttagtaaggtttctttgtatagaatctcttactcccaaccatttatatccaaattgtcattagtcctgttaagataatctgaactacctttcaagtcttttttctttttttagtttactatagcttttctgctaaggcttctatctcttattcacgaagtcaagaacatatctttctttttttgcctccacataaccaacccatagctgagtgcctgccgttagtaggaattcaacaaatctttgcagaatgaatgaataaacgattgagtgaagtaacctcataggtgatacccagccattgaacttttgcttgcatttctgattttgtataacacttccaatttgtctttctaaaatacattctaaataatttattttttccatttattatggctctctaatacaggttgggggccagatatgttaacatagatgagcacgcacaatctgttaagtggctactgtgtaacactcctcatccattttctccttcagtctatgttctacccatgataaattgctattttcctcccaaattctcttgcccttttgtgtaccgttttctctgttcatgctgtctgttcctcgaagtaaagaacagcagtggtgtagaatgccagtttctttgtaccttgttctggagttaattcctagtagctgtgttaccttaggcaagcttctttttttgtttttgtttctgtttttgagacagagtctcactctgttgcctggactggagtgcagtggagcaatctcggttcactgcaaactccaccttccaggtgtcaccacgcccagctaatttttttgtatttttagtaaagatgtggttttctcatgttggctaggctggtcttgaacttctggcctcacgtgatccgcccacctaggcctcccaaagtgttgggattacaggcgtgagccactgtgcccggtcttaggcaagcttcttaatctctctgtatttcagttttctcatcataataaatgaggacaataatagtatcaacctcacaggtttgttgtgaagatttaaagagttacttcatgtaagtgcttatgacagtacctggcatgtggtgagtgcttattaaattttaactgttgttaataacagttgccccaaattatgtaatttatattatttttacattgcttatagcaccagatttgactagaacagtaagcttttctgtttatctgaaaagaagttatacaccatcagaattggaaggaaatgctgttgtttcttattccagaccaacaggtaaacatacaggcttaatcattactttaagttgttggagttatgagtaaaatgcttatgcatttaagatgagaaaacatactgtgaaatatcattaaatgagaaaatgttattttctactgttaagtaaaatcatgttttcattacttttatgtgttatgagtagttcgtgataaggctatttagctgatttccatatgtaatgtttggttccctcttttcagttaatagcaaatctgatacatttttattcctaatagaagaatgttatctagtcagacttcatttatttgaaccaaaggctagtattgatgcaggatttttgctccttagttcagccatatctgcgttcttatttcatgaccaggaagaattaggcatgcggacacagtgagtgaggagggtggaatttttaaagcgggtttccacctcacaaattgaataccagggctcccacacctgagctgatgaggccaggctcctcccctgcgtaaggcacttattccttgtggccccaccccatttccccagtgcgctcgcgggcatgtccaggcaagccataggtagtatttgaaaaggcagcattcgattggctaaaagacattattcagaaagaatcaattgggaaagggcaggcacacagggacagaagttcttctgggttctgggtttcatccaggaccagcagtacggtctttcagccctcaggctgttttaagcctgaaggtaagatttcacctgggacctttccgtatttgcttaggcgtttgtctgcctcctacctctatcagtatgaattagtagaaaataatattatggattactccaacattagggcagtaatcagagttttagacactgttttagtgactaaataaaactctttagcatcttatgtgttaaaatacttaagaacagatcttttaaaacttagtctgcatttttcaaccatttttggccattatgcttttctgcaatttgaaagacagaatttagaagattactaatcattggtattggttgaaagtgaattagaaattaacattgagagagtctgcagaatgccaagagaagcaaaaagagacgttatcaatagtattatttacttaaattattataaaaaagaggaactggattgactttaaaggggaaagttaaaagaaaataaattcaaaaagtaactggaaatattaatattatgtattttcccctttattgagtcttttttgctgtttggctagatcatatatctttacttgtttttttcccacatttacagtggaataacacattctcatagacttctgagaatggaaatataaataaatgtattgttgggtttcatttatttgtgttatactctcaattgtggattgacttgtgtttggagagtcatttaagtcatctgtgagaatcttgaaattttaatttgtattttaagcagatatgtgtcaaatttgtgttgtaactttaccacagataatttgttgccttcttttccccctacccatttttgcattgcctgtgatggacagatcgaaatcctgatggtaagtgtaaagataatttagaaaaaaatgaatttcagaactgaaatttgatgaattgaattggtattataccatgaatgaactctttttatggactgctcttttaactagaagaagttctttaggatgatacagtgccttgattctgctatggagagcatagtagatgtttccacagagacttgtcattattagttgtttcggagtcatgagaaagaatgaaattaggagtaaaaatagaatgtcttttttgaaaaatattaaaggtgttattgacaacttattactgcaagtcattggttatttagctgcatgctctgttattttacctaaaagaaagaaagagtttaaaaaaagtgtttgtcactgaattctaagttgtgtttttctacatcctccaagagattcacctctctgtgataagaatggtgtgtgtgttcgctctgtgggcatattccttgtcttgtttagaatttgtaggggaatgttatcaaacatctgactccctctaacttgcttgggtcagtgttgttactcactttgttttccccaaatcttttgtttgactctgctatgattctgatcacaatatgaacttaattaagtttgttccttaggttctccttttaggttttgagctttttgagggcaggggtcaagcactcatctttgaattgcatactaacagagtacatagcaggcactacaagtatctctgattatttttccctcttagatatagacttaatgtggtagtttatctttataagttattttaagatacattttagatagcaatattaattagtaataattaaataaatataatgaaatgacttaaagattgtggcaatatttactaatgccgtttgggtgatgccaacaatctgagttgcatagcacatgtcatcttgatatctggaagttatatatatatttatatgagaagtgttttaatagaagtaaacgattagcttaataacacaaagtatacttgtcaaattagaatttgggtcattaaaaaataacctgatattaataatgaatatttacattttaattagctagattgcctgtaatttttaagattttggaccaaattttgtaaaatatcatgttattatttaaatgattagttttaagtttaaaaaaatcagttaaggttattgttcaaagaaatttattccttcttactgtaaattcagcccaaactatgaggaaaaaacccacaatttatagaaatggtagtgtttcaatacaaagtgaaagctggttttaataatctctttgatatattttaaaattataattaagctttagggagtggagttgaaatattcagcggcacctagtaggcaagaaaataatatgttgccacttagatcttacttacacacaaggcttcatatttcaaagactgatccattttattgtcttgatctgttcgggctgcaatgcagataagcagttctgcttttatatgtggaaaaagagaggcaaacgaggttttatgttgtcccataagggttagtctccattatttctgcattaaagttacatggcgtgagcagtgtaaaacatgaatgcagatgaagcacagtacgtagccagacataacaggaaggaatcaaggaagttctggctaccagacattgctactgctttggggttccttgttttcaatatgaaattactctagcaggcccctggaaagagttctaaaggcattatatagatgtataatatataggtatggttattttattcatatatacttattttttttctatgttcttttttcctttatttctttaaagcacattttggcttccaatttgacagtgatactgggcttttggggtgtgccagatgtaattagaagtctcttcctggaagtaaaatgttctgttagaggtagttttgatgagaatattctctctgagtgttaaataattttgtgattaattgcaccatagtagttacgactatccatttcctctagtaggttaggaagggaaatgtttgaaggagaggtgattatatctggtaaaaagaactacagaacagtcagtgtgataaatgactaggccaatattggagtaaaataaatgacaaaagtttcttttctctcagcgtaacacttagagaattcagtaagccagatatggagactactttgccaactatagagagaaaatactgctgatggtaggcaaagttaggaccaattagtctctttcaactaagttgaaagctgttctgctagcaactgtgaaaagtctttaaatacatgtaattcttttccttctctattacaaacacatacacccacacatgcctctatgagtctttggcttcaggttcttagacataattacagcctgaagagtaattggtagccaaatttacacttcaggtttcctaagaaggtgtaaatcccagtagaaatgtgcctctgatgaacctcatgtctaaaaactagagattgtattgtaaaatccttggattttaatttgatagtgttataaaatagtgacattctaatttttcttttaagggatggtttctgtagactggtttttttaaaggatttcataactttttctccctaatggtaaaacttttcaagctgccatcatttaaaaaatagccataatcattttattaagtatgagtgtcatcatttttcaaagtaatgttttccaaatgtcctatgaaacaggcttataattcctgcagagaaaagatattctggaggggctctacaaatcttagcaactgcaaaccattgccctagtgtgtgatattgtcattaactgacctaactgaactgtaaattgagttacaatgtattttccttcttgggtttattagtgcttgcaatccatttgtttcgatttctgaaaacatatacactaccagtttctttagctctgggttcgtggagatgtagggtaataatcttcaaatatataggctcagtcacttataggcagtgttgttgattatatttaattttttttaactgtgaattcagtcagtacctggtccaagtaaagtagtggctacagttttagcagtatagttttggaggaacattcacagccaaattctggtttgagtaattagctcagaatttggttgaaagtgtatagaagatagtttctttttgtgcctgtacagaattgtcagaaaaggaagcatttgtttttgttgtactagtcattaaaaatgaagaagatggaaacaagtttaagtttccttgttctttccagactgtatctattaattgatacaatctgaaattttctctacagtttacttattgtagaggaaacatactcagtgggtgtatttccataatttgaggatatatagagtatatggaaatttccttgaagttggagaaagtagtgctttgtaattgttttgtggtgatattgacagtcgtgctttgtgcagtatcttagatcatgttaccataatattttgagtcaaaacatctcatcattgtaaagtacaaatacacatgcctctaaaaacctcacagaatgtcatgaaataataccctgggacttttcttaagagacaccagttgtaattcgcatctaggattccaggagaagtgaatttaacatctgttggttatgagcaaaaaatgagctacgtaaaacttgatggataatagattatattgaagagaatgacaaatatgctccacatgctctgaaaaagtatttaattgacctcatatatcaatatgcttgccattgttgatgatttctcactatcctagtgaataagtagtactggaaagtgtactcccagcttggatgtggagtaagacatacaattccaattgactttagcaaaatatattgctaattccagggatcctgctttgggatcatgtctccaaactaactgcttctgcttttgctatttttaagcagctccctgactcctctataaagaaataaaggaattaatgtgtggattcatcaagtagagttagaacattttgagtgttcagtttttctacagcactatggcacggcataggcttctatatattatctttcatcttaaccagtcaaaaacagagttctagaaaaaaggagagaaaactaggattttagtattgcttttctagatttataagtagagagcctaatttgctttggtttcaatttcattttctgtaaaaatattgaaaatgattttgaaaagctttatacaaattctaatatgaaactcttcattgtcgtatattcagctacctatttcagtatgcatgtatgagtattaaaatcatttaacaattgaatgactgtctaaatgtctaaaatgtcacttaaagtgatatgtaaagttaaatggcttgagaaaagtataattcatataaaggtaatattctacatattaatgtgtaaaatgaacatggacttcaatagaacttcagaagagcaaatcttgctttcatgttcataatctgaatcttcatcaagtaaaaaaagctaaagatttaaaatgtttttgagtagagaaatttttagatatggtaatatacagtcttaaagatatgatagaaacttcatattctttgctcatgtttgctgatagtcttggattagggctagagctctgaaggtcttaaagacttagttcagtaattgaatgtaagtgactataatgttttatatagtatccaaatgtgatgattttaaaaatatgatactattaaagacagatctcatgtctatgcttcttttaaaattttatttttgccttgtaccttttgaaaatagtaatgaaatatgaatcatgataataatttacagttatttcagctttgttaagcaaaataggcaggcaacaagcaaaccaagatatattgctgctcaaactattagtagtacaatttttttttgccaaattatttgtcaagtctatgaatctacatatctctcttttattttaggcattccgcgagttatccaatgtaaatttagacttcccctaaagttaatttgcctaccaggtcagccttcaaaaactgcaagccacaaaattactattgataccaacaaatctccagtcagtcttcttagtctcttcccaggtaagactgttgaaataacatgcctgcagcatcaaaaatgctaagaatttagaatggaatccttcatcagcagataatgatggggtaattatcagataattgttaagtaagagtataaaaatgcctcaaggatttttccctcctttgcctgttcaaaggtgaatagcttatatcaacaaggtaataaggtattccttttaagtttgattaaaattatcataataattattttgctatggtattcagaaataaaaatcaagtgtttctctttagactgaatttttttggcttggaatgtaaatatttattattcatctttatggtaggtttttggatatatctgtcttctaagtgtataaatatttattattttcattgtaggcttttgtatgtgtaccttttaaagtatattcttatgtctctgaaaagtaatcttataagtagatgctctttgtactgttttattctgctgtctacagcagctagagggtgtgcatcctgtgcttctggttgtttagaagggtttcatatttaatgcttcaatatcacagtgaacatttggggtaatttgtgatggtatgacttggagagaagtgtcagtttttctttctgagtggcttagaaactaaagaagcttttttggatcaaacatccttagtaaccaaggtttttagtgtgtcatgtcattaattttcttgatggtggggtagaattgaagaataaaatcttggaattaaatcaacccttttaaatccttcattaaaaatcagcactgttggctaggagatgcatcttcacctttgcattagtggataagatttaggatacaaacaatacttctcacaaggtttagaaatttatggtaagtcaacttttgtgttattaactacttaaagtgcttaaaatttattttttattaatttgcagtatttcaaaaattttatttatatataactctgaaaaatctccaagattaaatattttactacaattattctattcttaagtgtgaattgagtttggagatatatatgtatatattgttagcaaaatattttttaccttttgggttctttctcccatctcttcttttacctccttattttttagtcagttttcttgtaacaaacttggattatgaaaaaaacagactcactaccttttgtaacatcttgtataaacttattagtttcttgggtctcctatactaccttaggaacatagttggaaattatatgttgaacaccaaatttattggtggctttgaaaaacgtttaaacacctgacttctgaggaagggttgatctttactgtagataaatgcaacccaattagaattgaataaaaacacatgcctttgagcagaaaggtaaagtccataagatacgaattgtatagtgtgtactaaagaaagcttagatgacttatccattttcctcctgattttgggctcaattgttttgatgtcattatgctcatcagcatatatttgcttcttactcactttaggaatgggacacaatgacaaatttttaaaaatttcttctgggatccaatatatatgatatagagtggtttttaaaaaattcctggatttgtattaatgttaaacatgctggatggaatcatgtgcttgtttaaaataagtatcacttcactctgataaaagtaagacttagataaagttgccattgcaaatcttctgtgtctgttttttttaactgaaagaagcaaaattaatgagctttatagagaagaaataaaacaacttttactctacatgtcttcccatttgtttattccagttctctttctgtgaacaaatataggtatatttaaaatagctttaatttttcttattacaaaagaaatgtgaaatttagaaaatgtggataaccaaaaggaaaaaagtgaatgttactagtaattctactatccagcaatacctttttctgtttcattacatttttctaatctttaaataaatattttttctaagcatttatccccaaaaagaatttcacttgtcattctgttttgagacatctttttacaccattagatatttttgatatatgattttaatgattacatagtattctctcataaatccatactataaaatcatttgaccagcattatacttttagatatttacgttgtttttagtttattaatattgtaaatatacctgtgatgaacactgttgtaacaatacttcttcaaatttattatagtttatttgatgaatatttaaaagtggaattgctgggtgagacagagaatcagaatgtttttaaaacttctgaaatatagtgtgaaattgacttccttaaggaataccagttaaccctaacaacaatgtttgaataaaggcgtccagtaccccaaaccttgccaatagagaatcttataagaaaaaccttttaatatgcttaataattatatagaaaacatttatttacatatataaatagctatctggggtgcttctggcaccccagaaaagtgaattaagcaataaataccttttttttttttttgagacagggtctcattctgtcactgaggttggagtgcggtggcacaatcatggcttactgcagcctctacttcctgggctcaagcaatcctcccaccttagcctctagagtagctgagactacaggcatataccaccatgcctagctaattaaaaaaaaattattttgtagagatagggtcccactgtgttgcccaggctggttttgaactcctaggctcaagtggtcttcccatcttgggctcctaaaatgttggaattacaggtgtgagctactgtgcctggccaagacatttctttatctcatataaagaggaatccagaagtgggcagtggaagctgtggcagtagtttatgactgttatgaaatacctagcattttttctttttttgtaatctaccatctttagtgtgttgacttgttccacgacaataagatatttgcttcagcttcaggcatcatatcttactacaaggtaggaggtagggggaagaaatagctatatagtaatgatgataacttttatcagaaaaggattttttcacaagattccctaggaaatttctgcttaggtttcaatagccataatttttgtcacatggcttcctttagcagtacaagaggctgaaaactaaatgggctagagaaaagggggttgggaacatgtgttaaattacctgaccatcaatgtatgtcacaataccagtagttttatacaaaaattttacttaaatgtaataacagataaaatgtcatttgataatagtcttttatgttgctcaagtatgtttctacatttgcttgtcaatacatttatattttaatagttacataatattccattgtttggaggtgtcatgtacatacagattttttgtacttctctatttctcttaggagaaattctttggagacaaatgcttgagttaatgggtatgcatatttgaaaactttattcaaataccagctgcctttttgaaaaattgtatcacgttatactcccagcatcaaggttcatgcgcatgatagcagctggattcattaaatcttttaaaatttttgatattattaggtaaaaaatgacatttcatttttaacttgaatttccaatatgtttaatttttcttaactacttgcatttcttcttttaattccttcttttaaggtttatatttttaggtagtaaaatttcttaattactttcttcgtagtttcaggttttcatgttatgcctgcaatgatctctattctaagattataaaatacttacttattttttctggtacatttttatacacttttgttctcaaacacagcttcagtgcatatttttgtgcttttaaaaaagcttaaattgaagtatgacttttgtaccataaatcacacatttgaagcgtataattttgaaaagtttgatttctgtatttatctgtgcaaccatctcaacggttaagttgctgaacatatccatcactgccaaaagtttccttttgtctattagtaattccttatcctgcatcccaagcaaccactgatctgctttctgttactagagattaatttgcattttctagaattttataaaatggaactatatagtatatgttctttttcatttgtcttcttttgctcctttatttgatatgtgatttgcaaataatttctcccagcctgtgatatgtattttgattgtcttaacagaatctttggaaaagcagaagttcttaatcttcataaacccccccgtttatcaatttcttaatggttcataaatttactgttacatctaagagatatttcctaatccaaggttgcaaagtttctctctctttttttttgatagaagttttctagttttaaactttacatttaagtctcttccccattttgtgctgatatttatgtgtgatgtgagggatggatgaaattcatgtttttgcatctgggtgtctaattgttacagcactatttttcagactatccttttccactgaattgccttttcaactttgttgaaaatcatctgaccacatttatgtgggtgtatttctgctttcttaattttgttccattgatatttttgtctattgctatataccaataacattgtgttttgatgactgtatatttataataagtcttgaagtcaggtagtataatttctccaactttattcttctcaattttgttttggatattttaggtcctttgcattttcatatgaatcttagaatcatcttgtaaattaaataaaactggctgttgggattttgattgggattgtgattgtattgattccatatatcaatttggagagaaccaatatcttaacaatattgaacatggtataattttctctctgtattctagtttttttaagatgaaaatgcagaccatcgttcatttatttagggtctattttgtttctctctgtgagggttggtagtttttcatgtacaggttttacagatcttttgtcagatatatccctatttcatatatttttatgctattgtgttttatttcaatttcagattgttctttgctaatacatagaaatacaatttattttattttcttttgatatggagtctcactctgttgtctaggctggagtgcagtggtacaatctcgtctcactgcacccttcgcctcccaggttcaagcaattctcctgtctcagcctcccaagtagttgggactacaggcacacgccaccatgcctggctaatttttgtatttttagtagagatggagtttcaccatattggtcagggtggtctcgaactcctgacctcaggtgatccacctgtcttggcctccccgagtgctgggattacaggcgtgagccaccccacttggcttacaattgattttcttatatcaatcttgtatcatgcaacattgttaaaccacttgtgggctctattagcatttttgtagatttaatcagtcagattttctacatagatgatcatgttacatgcaaatcaaaacagttttacttcttccattccaactggattgtttgtttttgcttgctttttgccttggctagaacctctgggataatgttgaatagaaatggtgagaacagacattgtctttcaccattaagtatgttttagctataagtattttttagattttttttttttttttaaccaggttgaggaagttcccttctattcctaggtcgctgagactgtaatcaggaatggatattggattttttcaagactacttctacatcagctgagacattcttatcgttttcttctttatttgattaaatatggtggattacattgattaatttttaatgttagcccaaccgtgcattcttgagataaattatagatggtcatgatatattatcttttcactatatttttatttttttttttattttttatttttttttttttgagacggagtctcgctctgtcgcccaggctggagtgcagtggcgcgatctcggctcactgcaagctccgcctcccgggttcacgccattctcctgcctcagcctcccgagtagctgggactacaggcgcccgctaccacgcccggctaattttttgtatttttagtagagacggggtttcaccgtgttagccaggatggtctcgatctcctgacctcgtgatccgcccgcctcggcctcccaaagtgctgggattacaggcgtgagccaccgcgcccggccttcactatatttttagatttaatttgccaaactgtattttagaatttttgtatctatgttcatgagagaaattgatttgtaatttagtttttttctacagttatgtgaataatttttactccatccccccacattttatgttttgatgtcatgagtttcttatatctggatatttatacttctctccagatttggaaggttttctcttattgttttgcttgattctgttccctaaatcttgcagcctttcttctttcctttcatttttttcctcctctcactgtattttctaataatctgactttgagttcacagattctttcttctgcttaatcagttctatttttgatgttcttccttatattttcccccttccccctcctctcccctccccttccccctcctctccactccccttccccctcccatcctttcccccctccccctccgcccttttctcccatcctgtcctcctccccctcctctcacctcccctcctctctcagggtcttgctctgtcatccaggctggagtgcagtggcatgatcatggcccactgcagccttgacatcctgggctcaagcaatcctccgacctcagcctcccaagtagctgggactacaggtgcatgccatcacacctggctaattttcttattttttgtagagacaaggtttcactttgttacccaggctgatctcgaactgctgagctcaaatgatgtgcctgcctcggcctcccagagtgctagacttactgcgcccagctgttttcatttcattcattgtattttttcagctccaaaacttgttattcttctgggttttgtttctctttttttttcttttttcttttttttcctggtttgttgagcttcctgaaaacaattattttgaattctttgttaacctgtagatgtccatttctttggggtcagctactgggaaatcattgtgttcttttggtagggatatgtcttctttgtttttcgtgtttcttgttgccatactttgatgccggcacatttggtggatcagtctcctttttccaacttcgtgtgctgattttggtacgaaagaccttcttctatgggaaggtcaagggtgctggcagtatgagatgtagaggttctggccctggcaagggcatagcaatgtaaactgtttgcagctctcttagctgtggttggtgttggttaagattgctggtatcctcagttgccaactctgtgagtgttctcagcaatagtgagggctattgggatctttaatggcagtggatgctagggtactcccaatctctttttctcccaccagggaaatcatggccaaggggatccctcttggcactctatctggcttgtgggccagtttccagtgcctgatgagtggtacctatggagatgccatggagccaagtcctgaagcatgggtatgtgtaaagggactttggttctgggctttgggtggtaatggcaccagtgcctggggcacaggaacccccactgctgtgttggtgatggtatgtgaggcattagtgtttatgaaacagccggggagcccgagatgggagcatggatgtgtgcagttactctggctctgggttacaggatgggaccttgtcctctatggcaggtgatgtaatgactgaaccataggaatacgcagagagaccttagctgtaggacctcgggtgtgagctggctcactctggtggtagctctggtatctgagacatggatgggcatagtgcagccacagagccagtgtctgaagtatgcacattcatgaagtgactgtgacctgggggttaggggaatgtgcaaggtttggagaggtggtggttttggttctggggtggtacaacagcagctacttcttgagcaagggaatatggagccatgccttcctctctggggttccctggtggaaatggctattggttacctcagtggcaaaagatgctggtgtcttctgtgaagcaggctgctgggaaccatggaagttcccactccacggctgtcaccaataggctgttgcctttattctttgtcactagccatctgtaggcatcttaggtatgccgatataaccagccatttgttccgttttgctgcagcttcttacatgggcccttgagctcccacagggctattatggtgtttgaatagctgtctttctctctctctaatttttttgctggggatgaagactagtgtcccctactttaccatcttggtgacatcctttacccccgtgatgatgtttaatgtttctttttttttttcttttctttctttttttttttttttttttgagatggagtctcactctgttgcccaggctggagtgcagtggcacgatctcggctccctgcagcctccacctcctgggttcaagcgattctcctgcctcagcctcctgggtagctgggactacaggcgcatgccaccacacccggctaatattttgtatttttagtagagatggggtttcactgtgttagccaggatggtctcgatctccttacctcatgatctgcccacctcggcctcccaaagtgctgggattacagtcatgagccaccacgcctggcctaatatttcttttctctgtcactttgtctgtaaattggtaagttggatctacagctagcagagtcaagattgactattctggccggagttcttcatggatggtagtatagactttcagcaaacagagggcacataatatttgtttgtctttttttgtgtgtgatggtaacagccattgatatccaatgctgagatccattagttcactacaggctgaaaaatagatattttgtttctttcacactttcttcattttttagctggattatttctacagagagaacctttcctttagtagttgttatatggtgcagtttgagtagggttttcaggataaatgcttggttctttccctttattactaatttttaaaatattttaaataaatagagcttaaaataaatagtattgattctctaggatcatccaatagtgaccatttgtttttattttgtttttaagtctctgtatgaactcatgcctttaaacatatttgatgtgttttactccattgcaattattattttctttgatactctaatatttttatctctggccagtagtagtctctttaagctggctttcaagttgttttcataaaaccctactggctcggtaatagcttccttgctatctggcatgaaaagatattctaagttcatcttgcacgtgttctgtctcatatgtggaatcaaccattagaataaatgaaattaaatgactccagagttttagtgtaaggcagaaatttcattaattggaagctactatggaaatcaaggtgaatatattatagctcacacatggagtttatacatgactagtgacataaaaaacacgcatcattcaactaaggttcctatttcaaatgtgttcattttgccttctggttacataaggtgatttctctcttttctttgtaggttttgccagtcagtcagatgatgatcaggtgaatgtaatgggttttcacttcttaggaggtgctcgaattactgttcttgcttccaaaacttctcgtaagtaaaaccatgttatcattgctttttaaatttttttctaaggataccacatcacagaggatactcacatcaataattcctgcaaagggtgatgttcatttagatttcagtaactaaaagccatgatattaagtagataggatgtgaaagttatgaagtgaggattgtgttttattagagaacactgatgttgcccaagattaccttaccatgatctaaatttcaccaaaaatcagatatgtaactgatatattcactttatcagagtgtatgtaatttttgtcttggagctaagaagagtctaagagaggaatttaaagaaatgaaaaatatttttgaggtaggtatatggtgaactagatttgggaactcctagaacttggaatttttttgtttgcatatattcttgtttattcattttggacattggcaaagatgacagtgaaagtggatagcttttgctgagtgtaatttcagtaggcagaaaggtgtagtaactatatagtcaagtttgaatttaaatatgctttattgatttggttgctttatgtatgcgagaataatagtcgaaactagtcaatgtaaaactagctcttgacatatgtagtatactgaagctactgagcttactgagttatacacaccttcatgggaataaagtaagatattaagaaaggaagtatttaacgaatctgtattgagagaaaaaagtacacacacacacacacacacacacacacacacacacacacccatacccccttgaaatagtctggctcaggacattccaattaaaaaaaaaactctagtttttctggtgagctttcactttctacccatgcatttgcagttgtagttggttattgcttttctaataataagagtacaataaggccatctgtttttgaaaaagaaaagtattagcaggaggaacagacatcccatttagaaactgtaacaatgtttttatggctaaaatcataatagtttctggaatatgtcaattggtgactggtaaaatagactcagatactattgaagactcaataataggtcacagaaataacaactctgagaagaaagaggagattctttattttcatgatttttctgattggtcatgattgcagtattctttacattggcatcattttttaaaaaacaaatcattttattttgataagaagacttaacatgagatctatccacttaaaatttcaaatgtatagttcaatattgctaactgtaagtacatagcaccattttgctttgattagctttaatctccagttggatggtagaaccattttggtgcatttctcttagtttaacagttatccttggttaaactaaaaaagttatgccaacatttctttgggaaattgtacacatttgtttgactgcagttgatggtgccatataatgaatctgcaaatgagaccattaaaaaaggcaaaaatttttgcaaatgaatatatttatatcctaatgtattttatttataacttttaatataaagtaacaagtagaaccctgatgttgcccacgattaccttactgctatctaaattttaccaaaaatcaattatatatctgatttattctctttgtctgaatgtatggcaattccctgacttagcatagtgtaggtacacaaaatcaaataatggaataggacaggaccttttaaacaaggagccaaataaactgtgtaaattgaaacctgaataatagtcattacaattctatgatggtttttggctacagtgacacacagaatcctacctaggagatgcctatggtgatggagagagataggtataaggagagtgtacttttctgagattgaggcagatgttggtgctcctactgctttatcagagtattcattcctaagaaaggaatgaagtaatttgtacccaatctgtgtttgacatttttcattttttgaaaggtacctagtattaattgtagtccagcaatctgctttacagaaaaatcctacaaatgaaagaacctagtatttcttccatagtaaacagtcaaatgattcataagtcacatagaattgtccttgactcttggatagtattttctgtgggttccgtgtattcatctctttttaaaacctgcttggtaatcaaccaagccttcatgtatgctgtatggcgattttagttcctttttctgattcagtatagaccagtcaaagcaaacaagagaaaagtaaggtgtagctcattgtctcagacaccaaaccaaattccctggggaactgagtaggattatatttttagaaagcagaatagtagctgggtgtagcagcttacccctttaatcccaacactttgggaggccaaggtgggaggatcgcttaagcctagcagttcaagaccagcctgggcaacatagtgagacctagtccctatttaaaaaaaaaaaaagaaaagaaaaattagccagttgtggtggcacatgaatgtagtcccagctattctggaagctgaggtgggaggatcacttaagcccaggaggttgaggctgcagtgagctgagattgcactactgcactccaacctgcgcaacagagtgagaccctgtctcaaaaaaaaaagtagtgcttaaatttgggaaaaatatgctagcaacatttctgaaaactgttatcacagtcctaaattaaaaataacgggaaagttctacttttgtgagatcaaatgtttttataattaatattgcaaaatatttctgcgtggatgtctataatttcgagtgattcagtataatgggatttcagaaaaatatgctattatgtaaatacgtgtatattcttacgctgctttcctaaggtccagatccacatagtgacttattaccatatacaacaaacactgctagctctctctccccagtctctcctgcccctttctgtttctgtacttttcttggtcttgcctctctctggttctgtttttatcttttgtctctatttgtacattgccttgttctacttgcttcttaaagaatttagaagagtttaaaagtatccaaaatatgaaaagagaaaataagtatttcaagaaatcagaaagagaaaatcagagcaggaaactaataaaggtagaaataagattaatactcagaaatacatactgtatgatcaaaaaggtgctagtcacctaaaataataagaaatcattttgtttccattttcagagtgttcaaaatattaaaccttttgttgaggagatgcacaccctttactgatgctgagtcaaagatgaaatttcgcttatgaatattcaaaaagacagttcctttaataatatctctatagtttatataattataaagattatgcttaagtaattatgagaaacaaatttcacagaactttagaaaataatgataaaactccatttattaaatataattctccctgagcccaaatcagtgtggtctaagctgcagcctgatccaaggataaattttgagtatctagttttgcaagttttcagtatctagtgttttcaataaggattgagcaaccaatttcagtaactcagaattgagatgtaggatgaaggaggtgtgtattttgtttttaaatgagcaatattagaacatgtttgaacattaatttaaatgattgagttcagtgggagaggttgatgatcaggaaagagaagtggatcataagtccgtgaagaagagagaggggatgggatgcagaagcttgcgggagggtttgaggaataggcctttgtaacttctctgtaacaggagggatcgtatgtacacctagggagactttgtagatttgttagtggagagataaaggagctttgataatgtataaatctgaaaaaaaatagtgagaaaataagaaagcaaactcatgagggaaataggcattgtggaatttccatctagagtttgagatcctacattttgaattgaaaccagccatcctttttaggtgattttccctggaagtgatttgtttatcagcatctaagcaactaaaaacagggctcagattttaaaacagaattacagataaaatgtttttaatgagactgattatcataatggactaccaaatctgagatggtaaggaaatcggtgacgattagagaaaactgatacatggtgaaaaattaatgggttcacctgatcaaaattcttgaaagtttgaggaagtaaagtagtaggagttatagagcaagtgaactaggttaaaaaataaaagggaaaaaaaaggtagtggtcagagaatggatcagatattgagaacaagagttcagagagattgcagattctgataatggcaagctcatcactgggggactggattgctaaagtggagagaagaccaatggggacaaagatttcaagaaaatgaggtatcacagttgtggatattgaaaaggcctgtttgtattgaggtacattccttgtgtacctaatttattgagtttttttaaaatcatgaaaggatgttgaatttgtcaaatgctttttctgcatctattgaaatgatcatatggtttttgcccttcattctgttaatatgatgtatcatgcttattgatttgcttatgttaaaccatccttgcatccctggaatcaatcccacttgatcatggtgaatgatctttttaatgtgctgtgttgaatttggtttgctagtattttgttgaggatttttgcatctttgttcatcagggatactggcctgtagttttcttcttttgttatgtccttatctgattttgttatcaggataatgttggcctcatagattgaaatttgaaagtattccattctctttgatattttggaatagtttgagtagaattgttattagttcttctttaaatgtttgatggaattcagcagtgaagccctcaagtcctgggcttttctttggtaggagactttgtataactgattcaatcttcttactcgttattgctctgttcagattttctatttcttcctagttcaatcttggtaggtttatgtatccaggaatttatcatttcttgtaagttatccagtttgttggcatatagttgttcataacagtttaatgattccttgtatttctgtagtatcagatgtaatttctactttttcttttatttgagtcttccttctttttttttagtccaaaggtttgttcaattttctttatcttttcaaaaaaccagctctttgttttgttgatcttttgtattgttttgatgcttagcacaatgaatgagaaagtacacgcacactctctctttctctctccctctcagacaaagcattgtggaattttagagcactgaggagcgtattcttaaagattagaaagaaaaaaaacaagttactcaagatatgaatcaagatggcatttagcttttcatcaaaataattcgatgatagaagacaacgcagaagttttctccaagattggagggagttttcaacttagaatgctgtgtcttgctaagttgataatctgcaaagaatgctgaatagacacatactctcagtgtcacaaagtgacactgacaaattgcaaatacaggtcaagcatcccaaatctgataattcaaaatccaaagtgctcaaaaagtttggaagtttggagcattttggattttggatttttggatttggaatgccaaactgcttaagtatataatacaaatatccccaaatctgaaaaaatctgaaatccagaacacttccggtcctgagcattttggataaagtatacctaatgtgtagcaaattggtatagccttaggtaggtgtttgaaaaatggaaaaggtaactaatacatcggatgtttcaatatcctgaaagatttttaacatgctaggaagagtgattgaattgaataaggtcaagtttaaaaatcctttttttggtccattttgattattttgctttcaggtataatagaaggattgtagtcacatatgtgaaaaatggttgggccttgaaataggatttcttttgcatcttccaaaagaaatcatatgtcatcttgaactgtgttatacaaagtacctggagaaaaaggaagtgggagtattattttacttcatcttggtagacaatacatttattcccttttcattcagcagacatgttaggtataaacactgttgtggctcttgtggagctcctacactaatgggagagacaaacaggtaaagagaaccaataatagaatgcttgatgtgcttatagaagcatgttttttagtgctgttatatcccaaaggattgaaactcgatagaaattttgtttgtagagggtcttgaggaaggagtaggagactatcaagtggaggtcattctaggaagaggggaaagtatatcctgatgcttgataaagcatgaggtttcaaaggattagtgaattttcttgtgtgctgaaagttcatgtggtaagggctctgtgacagtcctttaatgaggtcaggaaacttagggacaagtataataaccaaatctaaggtcaactgatgcccacctcatgccccgagaatagtttaacttatacagtgattcagcaatatattactgttaatatttattttaaaatttcttagcaatattatcaagtgacaatgagaatattatataaatctagcttggaaaaagcctgttgaaaagtaagcgttgagaaacaatccttagttgctaatattgaagaggttgtatatttaaaatgttaaacctaccaaaaggccgggcgtggtggctcacgcctgtaatcccaggactttgggaggtcgaggtgggtggatcacctaaggtcgggagttagagaccagcctgaccaacatggagaaacctcatctctactaaaaatacaaaattagctgggcatggtgatacctgcctataatcccacctacttgggaggttgaagcaggagaatcgcttgaacctgccagacggaggttgcagtgagccgaggtcatgccattgcactccagcctgggcgacaagagtgaaactccgtctcaaaaaaaaaaaaaaaaaaaaaacctattgaaatagtttatgttatttcctcaacattttggtttaaaaagcattcatctgcttttctgtctctcatttcaaaatttccaaatagcatgaattgtatagttcactgtttatgatacgaatacaagcattatactgatgaacttgagaagatgttctgacacacataaagactgatgtgatgcatttttttaccttccttaattaaatatattcttttctccatttgtaatagagtgttatggaaattgtctaggctttgatcatctaaatttattttatctggaaactgaagtggttatttccactgagctactattgcaagatacaaaagaaaagagataaacaaattgagtgttcattttgacagctattttgattactaatatttcaagggcacgttttaaaatacaggttcttttatgttatattataaatagaaaaattcatttctccctccatgaaatataaactctggaaagtctccagggatagtattaaccatcttggagtactaacactgagaaaatgtttagtaatcaaaataatactttataaatcttggactcattgattctttggatttttggtaatctaaaaaaagcaaaaaatgttgttgtgtttataaattccaagactaattgcaaatttctttctttctttctttcttttttttttttttttgagacagagtcttactctgtcacccaggctggagtgcagtcacaatcttggcttagtgcaccctctgcctcccagttcaactgattctcttgcctcagcctcctgagtagctgggacttacaggtgtgcaccaccacacccagctaattattttgtatattagtaaagatgggatttcacgcccaggctggtcttgaactcctgagctcaggcaatctgccttccttagcttcccaaagtgctgggattacaggtgtgagccactgtgcccatcctaatggtaaattttttattccagaaaaattgttttttatttttcttctgtatatgttgatgaaaaattaagaaagaaacagaaactaaaaatttaaagttactgaaaatatcacacctttttaaatgtttattatgagttttacattaaaaaaacttttaggttcaggggtacatgtgcaggtttgttatataagtaaacttgtgtaatgagggtttgctgtacagattacttttctcacccaggtactaagtgtagtacctgaaaattattttttcctgattttctccttcctcccaccctccactctgaggtaggccccagtgtctcttgtttctctgcttgtatccatgtgttctcattatttagctcctacttataagtgagaatatgcagtatttttttttgttgttgttattgttcctgcattagtttgctaggaatattggccaccagcttcatccatgtttctgcaaaggacatgatcgtgttctttattattgctgcacagtattctatgatgtatccctaccacatttccattatctagtctattgtcaatggacatttaggttgattctttgtctttgctattgtgaatagtgctacaatgagcatatgagtgcatgtatctttatggtagaacgatttatattccttttggtatatacccagtaatgggactgctggcttgaatggcagttatgttttagttttttgaggaattgccacactgctttccacaagggttgaacttaatttacacccccaccagcagtgtataagcattctttcttctctgcaatcttgctagcctctgttattttttgacttatttttaatattaacatttctgactggtgtgacatggtatctcattttggctttgacttgaatttctctaatgatcagtgatattgagtattatttcatgtgcttgttggccatatgtatgtcttcttttgaaaagtgtctgttcgtatcctttgctcactttttaatggggttgctttttttttctggtaaatttgtgtaagttccttatagattctggatattagacctttttccagtgcatagtttacaaatattttctcttattttgtaggtcatctgtatactctgttgatagtttcttttgctgtgcagacgctctttagtttaattagatcccatttgtcatacttgcttttgttgcaattgcttttggtgtctttgtcatgaaatctttaccaattcctatgcccagaatgatattttctaggttgtcttccagggtttttatagatctgggttttacatttaagtctttaacccatcttgagttgatttttgtatgtggtgtaaggaagaggtccagtttcaatcttttgcatattgctagccagttattccagcaccatttgcgtgtttttgtcagctttgttgaagattagatggttgaaggtgttcagcattatttctgggctctctcttctgttctgttggtcgatttgtctggttttgtaccagtatcatgctgttttgtttactgtagccctgtagtatagtctgaagtagggcaatgtgatgcttccaattttgttcattttgcctaggcttaccttggctatttgttatattttttttgtttcatgtggattttaaaataattttttctagctcttgaagactgtcattggtagtttaattggaatagtatagaatctgtaaactgctttgggtagtatggccatttcgatgatattgattcttcctgttcatgagcacagaatgttttttccatttgtttgtgtcatctctgatttatctgagtagtgtttttgtagattcttattgtagagatctttcacctcccttgttaattatatttctagatattttattctttttgtggtaattatgaatgggattgtgttcctgattcggctcttggctttatgtacaaaatcattaggaatgtgaggtgtagactcaaattgatagtttagatcccagctctagcttaaaattcttctgaatgactttggaaaaattaaataaccattaaaaaatttattaaatggccctaaaatagtactgtagtattatatatgaatcaaatgaaataacccctaaaaagcacataataatttcctgatgcattgtaagtgctaggtaaattttggctgcttgtattattttcatccttattaccattagtactatccactgacgtcaccttctcaatgtggcctttcccgaccatagcatctcaagaaaggccacccatttgtctttatcacagcacctttgtttctgcatcacagtattttcataggtctgtttcatatgttattcacttgtttattttctgcccttctcactagaatgaggactaggatcatgtatgtgttgttcactattatctccctagcacttatcactcagcaatattttttgaataaatgaatagatgcagtgttaccttgagtcttatttaaactataaacaagaattatcttctattacctctcttttataaagagaatttcgtccctttgatttgtctctttcctttgaacctactgcatgtgatgtttctctgttactttatctttagagagggaagtctttgcccaatatggggggattgagatgggcctttcggagagctcataggcccctgttgaggtaatccaaatttttataaaaggagaagagaaaagcttagacttattcacatttcattttgtcagagatttttttgtttgtcaggacagtaaaaggaaggagctccataggcagctgaggcagacacttgacttcgctggaggaagagtttggggcactgctgcctttcttggttagcccacagcatcccccattttctttcatacaacacacatgcccagtgtaagctatgagtgaagactcagcctagcagtttcactgaggtattggagtaggtcctaattgggtttgtctttcctcatcaagaactcagctctggccagctgagcttgggcatgctattggtgttctgctgagaatcatgtccatgttttttccccagtgataaattctgatcaattttcacagtaacttatggcggataggcttgcctggacgtacctgaacatgctttgtttccagatgtttttgcaatacctacatgggtgatttaacagaagctggtataatgtcttgttatagtgcaacataaaaactgcttactgcacttcagacgtactacgttcctcgtctgtgttttataaacacatttctgcctcagtgcctttgtccctacagttcttttggcttgcaatgctctttccatagatttccccatggcttgctcctttacttcattcaggtaccttgaattatatatgtgtctttttacttctggggccagatgatacagttctttaaacgtgtgataataatcctagttgtttatgtttatcttttttaagattgtaatacattttcactgaaaatttatagttgaatggaataaattcctctctacagctctattttatttcatatataaagaattttattctttgtatatatttaggctaaccccaagttttttctatctgcatgtggaagcttattcagaatccttctagaaactgaatgaattgaattttctttgaaaaattagcactgtgaaatttctgtaaaaatttacagctatatttgaaatgacagtaaatcgtatgctaaagaaaacatattttattaaagatagttgttttgtatctgctatgtgaaagttacttgattagctgggtgctgtgtaggtccaaagaaatttatgatatctctgccctttattttataataaattggggaaagtaatgaaaacaataatgacaataagtaacatttattgagtgcttaatatgtcaagcattgttttaagtgttttatttaaaggtacatatacgtgaaaggaaatgagcatattaaagcagaaatttcagaatctgggagttgtaaaggatcgtgttcaaccttacgaacctggtggaagctctctaatgcttttggcaggtattcctgcaggatctccataggaattcacaagaagggctctgagctcctgaaggagaagctgcacaaagctcacaaggagctgcagctgaagggcgaagactgtgagcagctgttcctagtgcaggagcagctgcacgggagctggaggagctgatgactagcctgtttgaggaagcccacaagatggtgtgggaagccagcatacagcaggcagtgtcagaaaagcagctgaatgcggaggcatggggaaagatagacatgctgcaggcagaggtgacagcttgaagacactggtcatcatgtccacaccagcctctcccaactacaagctccacctgcacctgctgagccccactaagggtgggccctgcaaggcccactgccaacctaagagcaccagcagtgccctctccttggccttgtgccccactgtgagacatgccctcaccttggacaaggaggtggatgtgacactattggcagagttccaagcctggaaggaattacctaccttggacaagacctgttccttgctgcaaagggtgtagtgggaggatatggacccctgcctggacttcacagtgcagaatctcttgccacaggtgtaggcctctatgggggacaccacactcactatcaagcctgtggctctgcagaagctgcctatagtgagggtaactgtggtcaattgtggcagtgccaatatatgtgtcttgagcaatttggcccatacctgccaccaccaccacatctggctttgtgactttgcgagccactaccacatctcactgtcttctcaggccaggatcactgcagtgtgcaactttttcatctatatctgctacatccacaaggcctggtgcgacaggatttgaagccagtgttctgggagatcacaaagctgtgaaaagagatacagctggccaaactcagctccccctagaagcctagggtgttacctgggcctagatgtgggctgcctaggatggacagacacacataaaaataaggatcctggtacaagatctgagacaggtctgtacctcatgaaatgatctttctttcacaccgagttctgcaactcacaggtggactttcaagaaaataccaaagaccagggggttcagagcctgaaaaacacttttaatggcagtttttcctgaggcagccatgagcatctatcattgttaatatagttcttatcatgtattgtgccctttgcatctctctagctgttgtctaattcttctgttatgtgataggccttcctatacttgaaaatggtagtgtatcttcttgcggggaggtcctggcacccctgtggcaaggtcagccctaatgattggtcctgaatcagtgatggcagaagagtgatggcagaagcagtattcagtcttctgctatcaggctctctttccaagtctcctgggagctccttgagggcagaagctcttcttcccttattcctgattttatccccagtgtcttgcactgagttacgtaaatgaatgaaagtaaataaatacaatctagagttaatatgttggatctcaagcttagtgtggataagactagatttaaaaggttcttatacggtactttatcatcattattctcccatctacctctctacccctgccccgccacaactgtactatctctaaaacattaaaacttcagtgtcatttatttacaaaagtaaatatttggtggcatttattttaaaaagtattatctttgattaaggaaaacacctaatcagcattatgggcagaactcagcatccagaataagactggggtgaagggaggggtggtgaagcttcaaggagaatggggtatgacttcagcagcaaagaccagtgtgtttgcatggattgtgacaggcatacccagtatattttattctttatcattgtgaaagggaatgactagggatgagaggagatatactattgaattctggatggagatgacaaattgaagtcctaataaccaatccgaagaagtaattgcatttataaaatttaccacagttaccatggggaacataaagaaatattttatatgtccatgtatcatgctactctagctagatcttagattccctaagcaagaagactgagttcatctttgtactcccagtgtgtctctttatgacatctgcataatagatggtcaataagtgttgaattaaatggaatagaggacttagtcctagatctcaaaaaagtgtataattcctgacccagtgtggcagctcatgtctgtagtcccagcactttgggaggccgaggtgggtggatcacgaggtcaggagtttgagaccagcctgaccaacatggtgaaaccccatctctactaaaaatacaaaaattggctgtgtgtcattgcaggtacctataatcccagttgtttgggaggctgaggcatgagaatcacttggaccagggaggctgaggttacagtgaactgagatcatgccactgcactccagcctgggtgacagagtgagaccctgtctcaaaaaaaaaaaaaaaaaagtgtataaattcctttaaagggagcaaatgtaataatcttggaagttatataagaatgcatggttttacgtagttaagtgcctagtgaactgtagacatagtaagtctctatataaattcaggaagacacaatgttatgaggcagttaagattaatatctagtgttccagtgcctgctctcttactaactggctagtaacactatttctctcatagggctgttagggtttaaatgagaaagtgaatgtaaagtgcttaaaatgtggctggtgcagattgagctcccatggatatcagagaaatcaagatttgagtagatgagattaaagccaggtcctgatgaagaagtacgatttaggcagaaggatatgaactattaattctagcactggcatttaattgcttttgatctttggcaagtctgtgaaactctctgtgctttattttcctttgtataaaaaaggggctattgtaatcacagttcttggtacacagtttatgcccaacaaataatagctgttcttatcataggtgttattaccacctctcttaccatcattgtcaccattgttgtcatcattttcagggtagagaatagctagaaattggtcatcttggagtagtggagctgaggtctcagggaataaagggaaacaagatttatatttagaaaagggtctgactgcaaaatctctcttcaaattaaataactattagaaaaatagaaagctttgatcatgattacagtgaattatgctgattgcagtatccagggtattgaattttatatagaatcaattttacttcagtattttgaaatgatactaatgataacaaattgtattcttgcaatggctcttttctttttaagtacaggcctttttaaaggacccaaatttgggtgtttttattgtactgaagcctattataagatatataacaaaaaggaccatgctttacactttgccactgtgaccacctacctttggaattagatttgaaagtgttaagtggttgatgcagggagcaatgaaacagtgaaagtatttttataaagccagtgtaatcatatctttgttacaaaaatgaaatctttgaacttttaaagtcaggattagtgatagttcatgtagctttatctagtaattctgtgttactaagcatttttccttaatttttttctctcagaacgatatcgcattcagagtgaacaatttgaagatctttggctcataaccaatgagcttattcttcgccttcaagaatattttgaaaaacagggagtcaaagattttgcatgttctttttcgggatctataccccttcaagaatattttgagttgattgatcatcattttgaggtatgtatgatcataacccacatcatctataatccttaaatatatgaaagagaaatagatgctatagaaggattctgtatgcatgccattaggctatgtgcttctagttgtttttcttatgtggatggtggatttcgtgaatccattcctgcccacttgcccagtttgtgatcaattacagacatttacagaatggctgcctggagctaaccatgtcgtctggccctggaacagagctgatttaattctcccacatggagacttagcccttgaccccaataacccagtgttaaaactatttgagcttatcggaggccatttggctaactaattctagcaggccataaatgaggtgtgattataaagtaaagtgatttttctttttcttttttaacaagcataccagaacttctgcatctgaatgagggttaacacttaaaatattccccagtatctggcacagtgggtgcttactaaatgctgaatgattacatatatgaataaatgtgttctaacagtaactttgttgctctgaatattttgcatttcttctttggaagtgccttcagagcctatgttagattctcttgagtatttcaatggtgacatgtcttcatcttttgaagattgatttgatgattgggactagccaaatatttgttttgtgagtggatttgacagtgacagtcatagtttttttaaaagtcccatgtattccagtcatcaggctccacttacatagtctataaacactctacagacaatacaagaggggaattttgagagaattttgaacattatccaagtaagcattggttcttgggactacatttcagtttaggagtgtgtgtgcatgtgtctgtgtgtgtgtgtgtgtgagagagagagagagagagagagagaattaccagtcatataatttttcagccaaccattgaacattctaagagcattgactttcagctatgaagacttctttaatgtagtgtgaacataaaaagaaaatttcaggtgtatacaatcgaattatgaataattatgtcataattcctcatctatgatgaggatctgtgatgacaatattttctaggaacgcatgcctttggtcaaattgtagcaccaaaattgacacagtctgtaagagtatgtttaggtatcgtatggaatgagaatctttgcaattccttgggatatattttaagaaattcttgcttcgctgttggaaacttaagtgtagtgatttgtgaaagggtccatggaaagactataccaattatatatttgtaatatttgaaatagagaatactagatactattgactaataagtttgacatataattttccctttatactttctggctagtaagtaactccttggagcttctacatcaggggagtgtcttttctgaggagggacttagagaatatggtgaatgacaggcactttcatttgttacacacataaattaaggggggcgttgttatgcttcctttgttctctatctcctttctctgctttcagccattagtaagattttaaactttgaatacagttgggttttggaatccaagtgtgccttggagtgtaaatttcatgaaggcagaaatttttgtctgtattattcattgctttaatttctagtgcctggaccagggtttggctctgagatcaacagatatttgttaagcattgaaattctgacatgtgaaaacatttcaatcactgctgctttgttacacattcaaaggaatgataacctggttgatagtctgagtattgagaacatctttttaattttttagtgtatcaagaatttaggaaataaattattacagcagtaaattatacaattaaaagaatgaattattgataattaggttaatgtccttttaaaaactttattttaaaatatttttattacaggaaataaattatagcagtaaattatacaattagaagaatgaattattgataattaggttaatgttcttttaaaaactttatttaaaaatatttttattacttaatttttggtatttttttgctcaagggaatattctttgatttaattagctactgagtgcttctaaagagaacacttggacacaggaaggggaacatcacacaccggggcctgttgtggggtggggggagcggagagggatagcattaggagatatacctaacgtaaatgacaagttaatgggtgcagcgcaccgacatggcacatgtatacatatgtaacaaacctgcacgttgtgcacatgtaccctagaaattaaagtataataaaaaaataaaaaaataaaaagaagaaaatgtctctcaaaactgaagggtaaataaagacaaaatacatgaatacactttaaaaaagttaaaatttcaagttacttttatttcatatgtaattgtagaatgcatgcactgaaagggtaaggaatttggtttgttactagaaatgtagactacgatatgtttgacttctgagcattttgaatatgatgtttatttcagctagtttattactgttttgtaaagttgagttagtgattcacatgacctaatcttatgaagtgtcccttttaccctgtgactttgactagcttgctttcatttatttatttatttatttatttatttatttatttatttatttatttattttgagacggggtctcgctctgtcgcccaggctggggtgcagtggcacgatctcggctcactgcaagcttggcctcctgggttcacgccattctcctgcctcagcctcctgagtagctgggactacaggtgcccaccaccacgcccagctaattttttgtatttttttttagtagagacggggtttcactgtgttagccaggatggtctcgatctcctgacctcgtgatccgcccgcctcggcctcccaaagttctgggattacaggcgtgagccaccgtgcccggccgctttcttttaacaatattaatttaaatgagatgggttacagtgaagagagtcatttaggattctaattccccagccactcaatctcttctttggaggcagtgtttggtgtccagtttcttgtatatctttctagaaatatcctatgcagtcacaactatgttaatatataggtttcttttttttaaataaaaaataatggtagcacattatacatactattttgtattgttttgctttgtttcatttatcatatttgcacagcattgcatatcagcacatagtagtcttgcagaatagtcttccttatttaaccagttcccctattgatgggaattttgattattaataatgtcttactatgataacaatagatcaaacaattttgtaatgggtatcctgatatatacattacttttggcaagcatatctctaggatacatttctagaagtgggattgttaggtcaaaggcgtatgtttaagaggtatttgtattaacttttatgtaaaactttgcccatttttctattggattgttgctgatttcctactgatttctgttaggttgtggtctttttctcattgatttgtagatgctttctagatatgggcatgactttgtctctgtagttattgctgttattttttgcagtttgctatttgtcctattttctttataattttttaaaatcatgtggaattaaatgtttttgttttttttagttagtaatttatcaggggtgtgtttgtgtgtttgtttgtgggtgtggcttttagcttttgacttacactaataaaggcctttcctataccaagatcattttaaaaattctgatttttctggtgcttttattgtgtctaaacttttaatctctgcattgattttgctgtaaagaatgagaaaagatttctattttttcccatgtaaccaattattgaaaaacacttattaaatgatctgtttttcctccagtgatactggttaacttttacaattttccatttgatctgttccactgtattatctgtgaattagtgattcatgtaccaaataccacattgttttaattcccttaactctataatgcatttaaatttcttcattactcttttacttttattatcattgtgtgtattttttctttaaagatgttttttgtgtccatttaatctcaatttaagaaattattcattgcagctacggataaatggtgaaaaattagaagaactcttatctgagagagctgtacaatttcgggccattcaacgccggctactagcaagattcaaagataaaactcctgcccctcttcaacacctggacaccttgttagatggaacctacaagcaggtcagtataatatcagtaacagttttctattactggctatacttttttttgtcaccctagagtcatgtaccagaatatccaagataaggtactcatttccagtgctttaaggaacagtgaacagtgcacaagctttagagtcagaaaaacctaggttcaaagtcaaactctgctgctttctaattgtgtgaccttgggtaaattacatgagcgccctcagtttccacatattacctcccggagttgttgtgaggatttttaatcttttatgtaaagcaacaagaacaatgccaggcacgtaatatgtgcttgataaatagtagctattatgattagtattatgagacaattcttggtgcattccataattattaccataattctccaattgtcttaccaagcaactggctcatacttctagtattatgtcagttgatattttgagatggaattcttaagcatcatagttcaaaaagttctagttcaaaatatattttttcttcttgatcaccttccatccatagtttatcatttgcatggctaggtgatctggctgtcactcttaaggcactgtctctccaaaaactattcaaaacatctctcacttaaaaattattttttaaattttaaaataattttaaaaaatcatgagaaggcttctaccagttctgttataatgtctttgaatggttataatgaagactttgaatgactatattgtgtattcctatatttcttcacaatgttactctcctgtttcaaagtcagtgttgctggtatgaatagtctgttgattttttgaattgagttttttaattgagataattctatatttctgtgcagttgtaacaaataatgcagagagatctcatgtctcctttaactgctttcttccaatggtaacattttgcaaaactatggtataatatcataagcagtatattgatattaataaaatccacaggtcttattctgacttacttgtactcatttatgtgggtgcgtgtattaagttgtatacaattttatcacctgtgtagattcagcatccgccaccacattctagacgcttcaccacaggactccttcatgtggtcctttatcacaacatttctgcccttctcccctgccccactccattctgttgattttgaaaggacaaatcagatttttgttttcagaattaattttcctaggggacagaaaaatagcttactatgtttttgctcataatacatttgtttcttaaaattttcttggttaggctgggcatggtggctcacgcctgtaatcccagcactttgggaggcctaggcgggcggatcacgaggtcaggagatcaagaccatcctggttaatacagtgaaaccctgtctctactaaaaattcaaacaattagccgggcatggtggcaggcacccataatcccagctactcgggaggctgaggcaggggaatcggttgaacccgggaggtggaggttgcagtgagccgagatcgcgccattgcactccagcctgggtgacagagcaagactccatctaaaaaaaaaaaaaaaaaaaaaaaaaaaattcatggttatttgaaaattagcagcaatttaaaggacagtctatagtagcagtggaatattggaaagaacactgggcttggaattcaaacaccgcagtgttgttgcttattagatgtatggtttttggcaattcccttaccctcccagaacttctgttttgttccataaaatgagatgactactcttttgttacaaagattatattccataatgtatggaatttacaaaatttgttccacaaatatagactgccaatttcgtgtgtgtgtgctggggtaattatatgattcttcagtcagtaggcaccaatgccctgtctgttccacacctcttttcctctttagtactctttttgttttgttttgttttctatttccttccttcttttccttttcctttttcccatttctttgttcacttttctttctcattctggggtctaccgtcatccctgcctgccatacttgaggctgaaggtatggtcaaccttgtatttaatgatgctgtatctttttgtagacacaatggtggaagggcatttaaaggaacttgaagaggatgcttgatttaatgctttccagattttctatatagtaagacttcgtcttttatacatttaaagtgcagaggtttttatttttttctgcttagcctcaaggttgaggttttccatgatttgtaatattacagacaagacgatcaaaaccatggcttttcacttgaatgtatattgttaagtcccattccttttagattaatgaaaagaatgaataaacatttgaaggaaaaatatgagtactataaggattttgacttaatttttatgtaccttgccattcaattttattatatgtatatatttgtaataaatgagggtgaggtgttgattgttcaataagtttcatgagcataataaagtctattttaattccgtttagtcagttttttaatgacatacttaacacatgaatataatttcccaaagaaaattataacattatacgtaatgctaaatttcccatcttggttccttatcatctgctcagaaatgtaatcattcttactgtttttgtttctttccacacctctttttttggcacatagaaatgaaatattgtttcaccaggctaaagaaaaactccataaagagtatcatatgatatgtattaatctagctctcttttttctttttcttctaaagtatgtactggaactctttgcatattagtgcatagatgtacttctctatttgtaatggttacataatagtttatgatatggacagtctgtagtatggacaatcacagtttattaaaggacaaatcttaataatagttttaatgttgagtctaacattgagaaatcctttttcgacaactctcctgggatcgaacaagcataccacctaccttattatcacataccttctgttcagtgtttttcttatctttatgctttgcctaggtagggagcatgatttacttgatggattagtcaagctcatgaaataacaagccatgctagagtccattcctgtccctgtggcataactccactgcatgactttactagatttttaaagtcttttcccaacgtaccgctttaaaattagatctgctacctgtttagcgttttttttcctcctgtgatgggatcttttaatttttcagcaaaatgttctctatgagacacacatacacacatgcacacatacaccagcatacccatacatacacactaccttacaggtatgttgtaccagattgtagctcaaccaatagtgtatgaaaatgcctgctttcctaggtattattacttattttcatctttacaatttttaactgaaacagtaatttgattgttgttttacttcttacctcttttgttgcttaccagagatgctgcatatttttcacatgttaattggccatttgtatttcttttttatgacttgcgtatgtacacattttgtttaatattctatcatgttcatctttgtcttaccattttgtgtatattgagggataatctttggtcatactttcatcatgcatgaaaatacttggtacctatttatgtatgtaatctctcatacataaaaaagttttaccaatttatcatttgcctgttattttttatttgtaatgtatttttgacacatgaggtttaaaaaaacgtttgtgtagtaaaatctgtccatctttttcgtttaggtttctctgcctaggaaatccttccttatgtatgccaagagtatatgaatatcaatttataaattattctaacacttctatgctatgattctttaaatgtacttttttcactccatctggaatttattgtgcaatttagtgagaatctaatctccctgctccctggtgagcttagtgtctcagcccctgcttatcgcatattccattcttctactgagctaaaatattacctgaatcatttaacaattttactgtatagtaaaccatcccaaaccttagtggcttaaaacaacaataattcattatttattgttcatgagtctctggattagcttggtagttctgttgatctgggtcatgcttggctgatcttgattgggctcactcatgtgtctctggtcagctggtggctcagctcgggactggatagctaggatgtatttactcatgtatttggcagatggcttgcagttagctgaaataattgggccacttgtctctcatggcccagcaggctaggctgggcttgttcacatggtgactatatgtcccaatgcacaagcacttttcaagcatctgtttgtgtcatgtttctagtgttccattggctttggtcaattcagatcaaagaggtggggatatagactttgcctctttgttgaaggagtggagaattgtgtacttttttataatctatcctccttctttcaacatatattaaattagcaaactattttaaacgaacagttctttttgaaacttttctaacccttcaatttagtttttctatacttagagatgtcttttcttctatacttttgacatttaaacttaaatttttgttgtcattaaaatcttattcactcataagcagttgtagtctatggactctgaagataatttatctgaaaattaattaggtttgtcaagagttgtttaaagcaaacagagcaggctgggtatggtgactcacgcctgtaatcctggcactttgggaggctaaggcagaaagatcccttgagcccaggagtttgagatccctatgagcaacataaagagaccctgtctctacataaaatttgaaaattagctgatagaggtggtgctcacctgtggcctcagctactcaggaggctgaggtgggaggattgctttagcccgggaggttgaggctgcaatgagccatgattgtgcctttgtattctagcctgggcaacagtgtgagaccctgtctcaaaacaaacaaacaaacaaacaaacaaaaaataaataaataaaaaataatgcaaacagagcatcagtgttgtttttaggcgaataaaactgtctgaatatttgcccatgttcttagttatggtcagttctttgaaggatggaatctattatccagttttttaaataggtcttcaccttagctttgtccagtactggcttcatgggcatgtcacctgcacagtcacacagagccctgtttttggtttaatgctctatagtagccatactggatttcttaatacttttagaacaaagggtcctgtatttttattttgctctgggcacctcaaataacgtagctggtcctggccctgttaggataataacaactttctgatgagtagaacaagacacctgggagttcagatgcagagcaaagttcaaatagagaacagccttattacccctacccccaaatcacatgtaggcctttccaaagatgaagaaaacaggatgcaatggacatcagtggtagctcttctggatagctcaagtgcatctttttgggacaaacatattggttaatcggcaatgaggcaaccatccacgaagggttatctcatttaggaccatcatcctgcagttagccctctcttggcctattgtgggtggcagcctcttattatatttctaacaggtgggtcactggcttcaaggtgcatcattaatagttttgagttttggtgcaaaagccaaccacttccctccctattttcaaatgcaggttatttcctgtatcctgtataggaaccctcaaagccacatccccatcttatttttgctagcatgccttgcctacatagtgtctactactgcatcatactccactaggaacatacaacaagcacccttatggaggccaacctaaggttgaagcaaggagaggggacctgggattatcaatctgggaaaagcagagcatgattcttacaggggaaggatttggcctctagtgaataaatatttttcagttgtccaccacagtttcagtaattatgttgtatttatgcagccataaaaaagaacaagattatgtcctttccagggacatggatggagctggaggccattatccctagcaaactaacacaggaacagaaaaccaaatactagatattctcacttaaaagtgggagctaactggtgggaacacatgaagacatagaggggaacaacacacactggggcctactggagggtggagggtaggaggaggggaggatcaggaaaagtaactactgggtactaggcccagtatgtgggtggtgaaataatctgtacaataaacccccatgacacaagtttacctatgtaacaaacctgcacatgtacccctgaacttaaaatacaagttaaaactaataaaattttgggaaaaatatcattctttttgaaagaattttcatctttacttctagctttggaggtataatgttgaaagaatgtaaccatgttgagaatgtcttcttttcagtagttagaaacctaaatttcctcatttgtaaaattggaatactgccttctcaatcaactgaatgtatttttggaggacctaagaaataaagtaggagaaaagaaaggaaattcttatttgttgggtgtctgctgagtttgaagtaaattttatttattacttcatttaatacttagaatcatcatgtgagggtggcattattgtttatagaggaagaacctgagactctgagtagagttaagaaacttgctcagtgttacacagatattaagcattgtattccaaagtccaggctttagaatatcaagtggcaattttactttaatcattgtcaggtgggacatagacagcctagattttctttagcaaaattatggtcagggtaaagaaaaaggaaatgtgtgcgaactgtttgtacatgttcatgctacgtatatgtatattcatgatcatctaatagtcattgtatacacacctattagacaggtaacaaaatcttttggagagttccctcaattctgaaattatatctgaaacaagtatcagaggactttttttgggtgtgtgactttgttgatttcacttatacctaagtttagcttctttgccttcaaatgctaatgctgattggcagaaaagctttgccaaataaattctctattttattataacattttcacataaatttgttagtcaaagcaagactgattggttgagtaaattgaaatggaagaaattagacttaccctatgacttggcttatgttttgatgctattacatgtgctgaggtttttctcctcacttcaacactaaccctctgttgtagcagagggaaaatgtttactgatctaaaagttggtgtcagatgacatatgtgtgatgtaatgactagtagtcattaatgttctagagaggcagatggctgacttttctcttctacaaaagaggctgtattaggcataattttaaatagagatcctgtggtttggagtttgctatttgttactttttctgtactttaaacttccttccactctgtttatttgtatggtattgatatataaaaatcattttaagtcacgcagaagcctaagagctttttggtccatgggtttttaaatgagcatgattttggctgataacacagaggaatatataatgaaaccattcagaggcccactttcctcattgtcatggacaagtaaaaataacatgctgagagactaagaaggagctttcatggatgtggtgatgttgctgggcttgtttttcatataaccacttaagagctaaaaggaaattctttctcagaaggtgatagagtaaataggtgagaaaggaggaggaagcagaaatttgcaatcgtatgtttgtggatgaacaggggtggtaagtaaaaacaaaacaaaacaaaacaaaaaaactgagatgtcagtaaaaaaaatggaatttgtacatttttaccctataattttactcttgaatatttaggcaaggaaatagttcacaaagaaaaaaatacattcatcaaggtattcatttatattattaattatctttgcaggaaattgtaaccagctttctagttggaaagtgattaggtttatcatagtactactatttgaagtgatatttcatatcattattgtgtttcattattttcaaaaccggaatgatataaaacattttatataactgaaaaaagcagattatgaaatagtatataataagttacaaataatgaaatagatgtgtctataatagatacatttgcaaaaaattgaaaatggtgtatgtttattttagatgactttacatttttatgcaatttttaaaaatattataatttgttgaatgcatggataggaagaatcagtattgtgcacatggccatattgcccaaggtaatttatagattaacgctattcccattaaactaccattgacattcttcacagaattagaaaaactattttaaaattcgtatggaaccaaaaaagagcctgaatagccaagacaattgtaagcaaagagaacaaagctggaggcatcaccccacctgacttcaaactatcctgcaagactacagtaaccaaaacagcatggtactggtacaagaacacacacaaagaccaatgtaacagaatagagaactcagaaataagaccgcacacctacaaccatctgatctttgacaaacctgacaaaaacaatcagtgggaaagaattccctatttaataaatggtgctgggagagctagctagccatatgcaaaaattgaaactggacctcttccttacaccaaataccaaaactaactcaagatagatcaagactatcatcagagtgaacagacaacctacagaatgggagaaaatatttgcagtctctccatctgacaaaggtctaatatctagagtctacaaggaacttaaacaaatttacaagaaaaaaaatcccattaaaaagtgggcaaaggacatgaacagacacttttcaaaagaagacatacacgtggccagaaaatatttgaaaaagctcggcatcactgatcattagagaaatgtaaatcaaaactacaatgagataccatctcacacaccagtcagaatgggtataattaaagcatcaaaaaacaacagatactgatgaggttgaagagaaaaaggaacacttttatacgttggtgggagtgtaatttagttcagccttgtggaagacagtgtggtgatttctcaaagacctagaggcagaaataccatttgaccgagcaatcccattactgagtatatacccaaaagaatataaatcttcaattataaaaatacatgtatgcatatgttcattgcagcacagttcacaatagcaaaaacatggaatcaacccaaatgcccatcaatgatagagtagataaagaaaatgtggtacatatgcaccatggaatactatgcagctgtaaaaaggaacgagatcatgccctttgcaggatcatgggtggagctggaagccattattctcagcaaactaatgcagaaacagaaaaccaaacactgcatgttctcacttataagtgggagctgaatgatgagaacacatggacacattgtgaggggaaactacacacactggggcctgtgggagtggggtcaggggagggagagcatcaggaggaatagctaatgggtgctgggattaatatctaggtgatggattgatctgtgcaacaaaccactgtggcacatgtttacctgtgtaacaaacctgcacatcctgcacatgtacccttgaacttaaaataatagttgaagaaaaaaaaataaaaattaaaaaaattgatgagcacaaaaatagctttttcaaagcaatgtgaatgcattaatatactgaatcgtacacttgaaaatgaggagctgacaattctctatgcctggtacggcactatctaatagatagccacatatagctaattcacacttgaaatgtgaattttatgttatgtgtgttttaccagatatattaccacagataacaactttttgaaaactgggttgtagtcatggaactcctgttcttcattggtatttctgagggagccgttttctctttcctgtctataccctatgaacttgtttctctggtctcagaatgtttagagttttgaattattccatatatgagttagtttattcctgttcactgaaaagagagcagttagataactgaatggtatgcttgagtgaatgtaaaggtggatgttctcttactctgtctgacccttgctagtttctcagccaaacaagagcaatatacaaagctctttcaaaattttgtaaatttttctttattcgggtcagagtaatctccaaagagtgtttgttataagtatgtccctgatgtattcactatctgtgtgtgggtatagagtctagccaaactgtctgacagaaatttgttcaagtcacaaatgtgagccacatgtattatttttaatttcctagaagattaaaagagtaaagtgaaacaagttaaagtaattttaaccatgtattttatttaattaattaatttattttttgagacagagtctcgccccatcacccaggctagagtacggtggcattatcttggttcactgctgggactacaggcacgcgccaccaaacctggctaatctttgtatctttagtagagacaggctttcaccatgttggccaggcaggtcacaaactcatgtgacccatccgccttggcctcccaaaatgctgagattacaggcgtgagccactgtgctcagcccaacaatgtgttttatttaactctatatattcaatatatcatttcaacatgtagtaaaattaaaattattaatgaggtattttatatttcatagtatgtcttcaaaaatctggtttattttatatgtgcagcacatttcaagtgtgaattagctatatgtggctatctattagatagtgccgtaccaggcatagagaattgtcagttcctcattttatattgtttcttgtgatgtcttttttctttatttttttttctttccattagtctttttaaattcttattcatgaatagactatcactgagccaatgattttcactcactggatgtgaatagcaggcagttgtgaagcactcttaggtggttagagaatcaccagaaacattagctcgtaaaaactatacattcaaatattgtttaaaacaatgtcatcaaattttatgtcaacagacttgagtcctagtcccagttctttctggtgctttgactttgggcatatcacgtcatctctctgagcttcaccttcttcactttaatctgtggaccctgtagatagaacttgtctgtgtagcatcttgcatggtgcttattttccagtaaaattctcaataaatgtttattgtacctgcataattgttatgaaaagggacttagaatcttaaattttcatcaattcggaatttcagaaatcaatggggacttagggatcatctagtgccagctcctaaactggggtgaggttgttgcccagtcagcatttgttaggtatactgtaatgacaatgatgtaagttatagggctttgtgcaactgaattagtttcagaaaagatatgtaagtgcaaagtattataacattggagttatggttccctggatttaggtatgtaatgctaattgacattaatgggggttgtacatacttcaaggggagaacagacctattatcgtatgaaaacattctccttttaataaccatctggtatgctttacttccctggggcgtgttcactttttataaattgaatgcatgcttctttatcttcatgttcttcaatcagcatttgagttttctgcttgctagtgttagcttgaacaactggctgtattgtaaatttaatattaggattttatcttggtaagtttatcagattcagaaatttgatcacttttctgaaataaactattctgagtcagaagtaatcagtgtgtcccctcttctgctaaaattttgttctgtttgttgtttgatctttaaaaaaaaaatagtcctttgagatatactcagaaacaagatgtttctaatattacaataaaactattaatgggctcattatgtggaaatgaaaatcttatctttttgtgtcagtgatgacagaaaaatacataagtggcctccaattatctgtaattgtatgaggatttctttcatttctgttatctatcttcctgtttaatcccatctggcacaattattctttttgtattagttttttgtaaaggagttctgaacagtttgaattgtgaattagcgattattacaacccttataaccctcacaatcctcccgtccaccttccttcccttaccgtcattttctctctctctttaagtagaggaaaacaaagccagtttccttgagagattattttgtgatctttctcagcaaaagaaaaagatgtactgtttttataagcatatctatgaacagctgagcagttatatcaaccccgatatgtttctctgtatattaatacacagagagctaatagtgctcagagtgttgcttgaaagtaccaaatataactaaggataaattaaggtgctgtacttcctaaaaagttacttttatgaggcccagctgtatagcctggaacaatctagcagtaggaaaagtgatttaatgtaattaaaataaatgtactttgaacatttgaccttaagtggatttaaatatatttgtcacactacctgagaatcattgatagaatgtcatgcagtaagatcaatacctatccaactttaccatgctcccagatgggccacctgtatttttgtttttaacttcctttttatatgatttccatatctcttatagcaggatattaaatttcagagaattaggccctcagccaaatattgatttccccactttactccaccccatctcatctaggactggcttctagcccatcacttaatattctttttcagttgattcccagttagaatgataagccagaagccatattcttggagatgtttttcctgtggaagtgatagattttcatgggaccatttccctccatcttttttcccacttttgtgattcaaggtaaaagtatttgagaggatctgcctgttgacaaaaagaatcaaactgtagaatatttgaagagatttattctgagccaagtgtgagcgaccagtggcctggggcacagtctcaggaggtcctaagaacatgtgcctaaggtggttgggctacagcttggaattatacaatttaaggagacatagacatcaaccaatacatgtaagatgttggtttggtctggaaaggtgggacaacttgaaggggtggggggcagggcttccaggtcataggtgaattcaaggattttctaattggcaattggttgaaagagttaaattgctgtctaaagacctagaatcaatagaaggaatatctgggttaagacaagagatcctggagaccaaggttcccttgatgcagattaaaccttcaggcagcaggcttcagagaacagactgcaaatgtttatcagattcccagttgattctgtctagaaaaaaggcctggaaagggaaggggattctacagaatgtagatttttttcccccacaagagacagctttgcagggctatttcaagatttgacaaagaaacatatttggggtaaaatattttgatttccttccttatataatatcatgtgatgttatgccagagtcaggttggaaagtaagtcatgttatatagagttaaataaaacctctctgatgatactttatggtttgtagagtgtgtctcctcacgcccttgctaaatccaggccatggtcccaaggaagcccacaggtcctggtccttatggtcaaatgtgtcaacaaattgcctcattagatgaggttaattttatgaatgtaattatctgtggtttttatttgtttgtatttgtcttattccaagaccttcaaggggatccctgttgcctattagattacattgaaatttctcactctgacattcaaaaattctgaagagttgcacccaatttcttctaatctcatctcctatttctgcagaaactacatgctggtcaagctaccctatcctctgaaaaagaacgcagctttattgatatataatttgcataccaaaattcatgcgttgtagtgtaccatttaaggatttttagtaaatttgtagagttgtgcaccactaccacaatccaattttaaacatcaccattcccccaaaagcccccttgtgtccagttacacctaatcctcactcccactccaactacaagaaactactaatctactttctgtcttcataggttggtcttttctggatatttcatataaatggaatcatacaatatgtagtctttagcatcttttacctaatatcatgtttttgaggttcatctatcagttttcctcagtggttgctcctttttattttatttcctcaacttttatcttagaatcaggcagtacctgtgcaggcttgttacaaaggtatattgcatgatgctgaggtttggagtatgaatgaacctgtcacccaggtagtgagcatagtacccgagaggtagtttttcaactcttacctctcttccttcctccccactcttatatcgctccagtgtctgttgttcctaactttatgtccatatgtacccaatgtttagttcctacttataagtgagaacatgcaatatttggttttctgtttgtgtgagttaagtataatggcttccagctacatccatgttgctgcaaagatatgatttcattctttgtttatgactgcatagtattccatggtgtttatataccataattcctttaaaattttttaaaaaaataatttcaacttttattttagattcagggagtagatgtgcagatttgttacatgggtatattgagtgatgctgaggtttggggtatggatcctgtcacccaggtagtgaacatggtacccagtaggtagtttttcaactcacacctccctctctccccactctaatactcccagtaccacattttctttttttttttttgagttttactttatttttttttattttattattattatactttaagttttagggtacatgtgcacaatgtgcaggttagttacatatgtatacatgtgccatgctggtgtgctgcacccattaactcgtcatttagcattagttatgtctcctaatgctatccctcccccctccccccaccccacaacagtcgccagagtgtgatattccccttcctgtgtccatgtgttctcattgttcaattcccatctatgagtgagaacatgtggtgtttggttttttgtccttgcgatagtttactgagaatgatgatttccaatttcatccatgtccctacaaaggacatgaactcatcattttttatggctgcgtagtattccatggtgtatatgtgccacattttcttaatccagtctatcattgttggacatttgggttagttccaagtctttgctattgtgactagtgccgcaatagacatacgtgtgcatgtgtctttatagcagcatgatttatagtcctttgggtatatacccagtaatgggatggctgggtcaaatggtatttctagttctagatccctgaggaatcgccacaccgacttccacagtggttgaactagtttacagtcccaccaacagtgtaaaagtgttcctatttctccacatcctctccagcacctgttgtttcctgactttttaatgattgccattctaactggtgtgagatggtatctcattgtggttttgtttgagctttctacatatggctagccagttttcccagcaccatttattaaatagggaatcctttccccattgcttgtttttctcaggtttgtcaaagatcagatggttgtagatatgcggcgttatttctgagggctctgttctgttccattgatctatatctctgttttggtaccagtaccatgctgttttggttactgtagccttgtagtatagtttgaagtcaggtagcatgatgcctccagctttgttcttttggcttaggattgacttggcgatgtgggctcctttttggttccatatgaactttgaagtagttttttccaattctgtgaagaaagtcattggtagcttgatggggatggcattgaatctataaattaccttgggcagtatggccattttcacggtattgattcttcctacccatgagcatggaatgttcttccatttgtttgtatcctcttttatttcattgagcagtggtttgtagtcctccttgaagaggtccttcacatcccttgtaagttggattcctaagtattttattctctttgaagcaattgtgaatgtgagttcactcatgatttggctctctgtttgtctgttgttggtgtataagaatgcttgtgatttttgtacattgattttgtatcctgagactttgctgaagttgcttatcagcttaaggagattttgggctgagacaatggggttttctagatatacagtcatgtcgtctgcaaacagggacaatttgacttcctcttttcctaattgaataccctttatttcattctcctgcctaattgccctggccagaacttccaacactatgttgaataggagtagtgagagagggcatccctgtcttgtgccagttttcaaagggaatgcttccagtttttgcccattcagtatgatattggctgtgggtttgtcatagatagctcttattattttgagatatgtcccatcaataccgaacttattgagagtttttagcatgaagtgttgttgaattttgtcaaaggccttttctgcatctattgagataatcatgtgttttttgtctttggttctgtttgtatgctggactacatttattgatttgcgtatattgaaccagccttgcatcccagggatgaagcccacttgatcatggtggataagctttttgatgtgctgctgtattcggtttgccagtattttattgaggtttttgcatcaatgttcatcaaggatattggtctaaaattctcttttttggttgtgtctctgcccggctttggtatcaggatgatgctggcctcataaaatgagttagggaggattccctctttttctattgattggaatagtttcagaaggaatggtaccagttcctccttgtacctctggtagaattcggctgtgaatccatctggtcgtggactctttttggttggtaagctattgattattgccacaatttcagagcctgttattggtctattcagagattcaacttcttcctcgtttagtgttgggaggatgtgtgtgtcaaggaatttatccatttcttctagattttctagtttatttgcgtagaggtgtttgtagtattctctgatggtagtttgtatttctgtgggatcggtggtggtatcccttttatcattttttattgcatctatttgattcttctctcttttcttctttattagtcttgctagcggtctatcaattttgttgatcttttcaaaaaaccagctcctggattcattaattttttgaagggttttttgtgtctctatttccttcagttctgctctgattttagttatttcttgccttctgctagcttttgaatgtgtttgctattgcttttctagttcttttaattgtgatattagggtgtcaattttggatctttcctgctttctcttgtgggcatttagtgctataaatttccctctacacactgctttgaatgcgtcccagagattctggtatgttgtgtctttgttctcgttggtttcaaagaactttatttctgccttcatttcgttatgtacccagtagtcattcaggagcaggttgttcagtttccatgtagttgagtggttttgagtgagtttcttaatcctgagttctagtttgattgcactgtggtctgagagacagtttgttataatttctgttcttttacatttgctggggagagctttacttccaagtatgtggtcaattttggaacaggtgtggtgtggtgctgaagaaaatatatattctgttgatttggggtggagagttctgtagatgtctattaggtctgcttggtgcagagctgaggtctttatccaatttgctagtctgtgtcttttaattggagcatttagtccatttacatttaaagttaatagtgttatgtgtgaatttgatcctgtcattatgatgttagctggttattttgctcgttagttgatgcagtttcttcctagtctcgatggtctttacattttggcatgattttgcagcggctagtaccggttgtgcctttccatgtttagtgcttccttcaggagctcttttagggcaggcctggtggtgacaaaatctctcagcatttgtttgtctgtaaagtattttatttctccttcacttatgaagcttagtttggctggatatgaaattctgggttgacagttcttttctttaagaatgttgaatattggcccccactctcttctggcttgtagagtttccgccaagagatccgctgttagtctgatgggcttccctttgtgggtaacccgacctttctctctgactgcccttaacattttttccttcgtttcaactttggtgaatctgacaattatgtgtcttggagttgctcttctcgaggagtgtctttgtggaattctctgtatttcctgaatctgaatgttggcctgccttgctagattggggaagttctcctggataatatcctgcagatgttttccaagttggttccattctccccatcactttcagatacaccaatcagacgtagatttggtcttttcacatagtcccatatttcttggaggctttgctcatttctttttattcttttttctctaaacttcccttctcgcttcatttcgttcatttcatcttccatcactgataccctttcttcctgttgattgcattggctcctgaggcttctgcattcttcacttagttctcaagccttggctttcagctccatcagctcctttaagcacttctctgtattggttattctagttatacattcgtctaaatttttttcaaagttttcaacttctttgcctttggtttgaatttcctcctgtagctcggagtagtttgatcgtctgaagccttcttctctcaactcgtcaaagtcattctccatccagctttgttccgttgctggtgaggaactgcattcctttggaggaggagaggcgctctgctttttagagtttccagtttttctgctctgttttttccccatctttgtggttttatctacttttggtctttgatgatggtgatgtacagatgggtttttcgtgtggatgtcctttctgtttgtttgttttccttctaacagacaggaccctcagctgcaggtctgttggagtttgctagaggtccactccagaccctgtttgcctgggtatcagcagcggtgtctgcagaaccacggatttttgtgatccgccaatgctgctgtctgactgttcctctggaagttttgtctcagaggagtacccggccatgtgaggtgtcagtctgcccctactgggctgtgcctcccagttaggctgctcgtgggtcaggggtcagggacccactagaggaggcagtctgccctttctcagatctccagctgcatgctgggagaaccactgctctcctcaaagctgtcagacagggacatttaagtctgcagaggttactgctgtctttttgtttgtctgtgccctgcccccagaggtggagcctacagaggcaggcaggcctcctggagctgtggtgggctccacccagttcgagcttcctggctgctttgtttacctaagggagcctgggcaatggcgggcgcccctcccccagcctcgctgccaccttgcagtttgatctcagactgctgtgctagcaatcagcgagactccatgggtgtaggaccctctgagccaggtgcgggatataatctcctggtgcgccgtttcctaagcccgtcggaaaagtgcagtattagggtgggagtggcctgattttccaggtgccgtctgtcacccctttccttgaccaggaaagggaactccctgaccccttgcacttcccgagtgaggcaatgcctcaccctgctttcgctggtgcacggtgtgctgcacccactctcctgcgcccactatctggcactccctagtgagatgaacccagtacctcagatggaaatgcagaaatcacctgtcttctgcgtcgctcacgctgggagctgtagactggagctgttcctattcggccatcttggctcctcccacattttctttatgtagttcactgttgatgggtacctgagttgattccatgtctttcctattgtgaataatgtggtgatgaacatatgggtgcatgtctttttggtagaacaatttattttcctttgggtctgtactctgtaatgggattgttgggttgaatgatagttcaactctcagttctctgagaaatctccatactgctccccacagtggatgaactaatttacatttccccagtagtggaagtgttcccttttctctgcagtctcacaagtatctgttattttttgactttttaacaaaagccattctgaccagtgtgagatggtatctcattgtggttttcatttgcatttatctgatgattagtgatgatgaacatttattcatatgtttgttggctaattatatgtcttcttttgagaactgtctgttcatgtccattgcccattttttaatgaggttgttttttgcttgttgattcgtttacattcctttatctcattctttaggttgtatgtttcttctgttgataatttctattgccgtgcagatggtctttagtttaattgggtcccacttgcccatttttgtttttgttgcaattgtgtttgaggacttaggcataaattcgttgccacagctgatattgagaagtgtatttcctatcttttcttctaggatttttatagtttgagatcttacattttaagtctttgatccatcttgagttaattttattacatgatgataggtagggatccagtttcattcttctccatatggatagccagctatcccagcaccattcattgaatagggagtctcttccccatgcttatttttgttaatgtgttaaagattgatggttataggtgtgcagctctatttctgggttctgtattatcttctattggtctatgtgtctgtttttgtaccagtaccctgctgttttggttactgtagccttgtagtatagtttgaacttgggtaatgtgttgcctccaggttgccctattttatttttcctaccagcagtgtatgaggattctgtttctttacatccttacatcacttattgttgtctgtttattttttaaaaattatagtcattctagtaggtgtgtagtggtagctcattgtggttttattttgcattttcctaacgatgttgaacttttaaaaatatgtttattagactattattttttgatcaaatttaccatatacatttctgccaccgtgcatttgctgatgttatttttgctacatgtatttccctttttttccctcatcttcctttatggaagcttcctatagataccctcttgtctttcaagcttttcctatttcaccatgccttttccagttatctgtgatctcttctgcctttaaaccttaggagtgctatgattaaacctctgttgtgaaatttacttatattattctgtcttatgttatggtttcttgggtacttccatcttttctcctggtgagcctggacaactggggccatttctttgcttgcccaccagtgcacagaacagtaacataattgaaataattcatgactgtttgacaaagacctcagagaaaaatgtgtgttaaagaagagatggcttattcttcaatttattttcatgttccctgttctctttagggcgtggaatccagtactgatcatctcaaatgttttcttctctgcacccatgagtcccttgctttatatcttacttttctttaggaagcttagcctcatcagaacactgtctcttttcctgttgttgcttgaaattcatacctccctactcatttgcctaaaatcttagtttcatcttggtcagtcacctctcccatttctcccaggtagtcagcaggctaagtagtgactcagccccctctctgtcactctcccaggagacaaccttatattctgtcttgtcagaaagattgagactctcagctatgtctccctcattgtctcaccaacccttctagaaacttgtctacatctattcccaactttcctgctgtccttcttgtctcaaaggatcaggtacgttatttctctttaagatcaacccttcccttgatccctttgaccttctgctagcttctggaatactgatttatataaaagccagtttgtctggctgttatatttttgatctgtcccttgctcttttgctttcttatagcctaaaaacatgttgaggtttatcccaacatagacctgcctcctacaacttttctttgtgtttctcttctagatgcaacctttttctccttttcacacacgtctcgtaagatccatagtacttttatttttttgctttctcacctcttatttcatgtatccgtctaatatatatatatatataatcttggccacagaccacagaagaacttaaaatgttggtgttttttttttttttttttttgctttatatatctccaatatagtgcagaccctgtatatgcatacgggaataattatatgcagaaatgcagccttcttttagccggaaaggatgcctggaacatgtggataagcttggatatttgtctaatgttaattggaatgttggttttcagttgcagatgccaaatcttcataaaagtaattggatttagcttcctatttagcaaactacttcaaatccctgaagtatcccacatccgaaactaatttttcttgattgtatcaagttcagtcatgagtagaacaagggttgacatagttttttaatattaaaatatttcttgacaaggtttcaacactcttgcttgtccacaaacctattgttaaacacactcaatacagatgcaatctttgtgttttgtggagctattttaaaaactttgcaagactgtcttcttgaagtaaaccacatttattcctttttcctatacatgtaaatttaaacttagattttgatcagatttcaagaaacaacgcaaaaattgtgtatttttattgctttttatataaacttatatatgtacttaattaaacttctattgattcatcctaggaaatacattttatggtagttttgagtcttaaaagtgttattcagtctacaaatgttcaatgtaatatgtaagaatatttggggatactagggaaaaaacctcttagaatgaatattatttgatcattaaaatttagggattaagagattcaatttaaaggattgtgctatcaaatatttatcaagcagctactctgtgtaggggtctttatgattagaggaggtatataaagatgtttataatatggtgtatagcctcaaggagcacgatgttttatacagataataattataagcatggacaaatgttactccttatggtagtcatttaccattgaggatgattatttaaatatctgaaaaaataaaatggtgcttaagtgaaatatgagcagatgcatcatactttttttttaaactaaaatgtattatgtgaaaatcattttggttgaaatcactagtgactaataggaactgtatagctcaacaatagattattctaatgtatttttgtaatagaacccattttgttagaaaaaaattcatagccatgcttctatgtcattttttcttccaagacgtcaaactatttagcaggtaaatactgcacaatttagttgaattggattttcagtctgtttttagttcatctccagagtaggactaactgccagacctaacgttcactcctgtgccacagtgcttaacatagagcctggtgtgatgcattctaggtgctcagtacacatttgttgagctctctggtcctgtcccaagggcaactggcatttcttcagtgagtttctgaaggtatgccttctgtttctgccagtaatttccctgggaccaggaaattattttgctaatgagatatgcactttacaacttgcatgcctatgcttatcattcctattcctggagttcagcagtcattgcagctgctgtggaaagtactcctttgctttgactgtgttttaactatcaagttgttttgggactcccagttttgtcactatggaatttttaagatccttttttgcttaaaaagcaattgtcatcttggaagaagaataggtctcatcatctttctggtgttaagttgcaaacctttgaaagtttacgcttatatcatttgaggtaaattacttgctatatcccaattaggtatacagttctttttaaagcatgtttttcatgagcctgaatcataggactagaagtgacattataaagtacttcatcttttcaaattttgctttctagcttgataccattcttccttgagttagccttttattcttaaaataaaaaatgattttatgtaaaattttgaaagctgttgactacaatgtttgatatagtttagtagggaatgttatggaacaattggatactcacgacctagaaaaagagtcattttttactatgagttaatttttctggactcctcttagttaacactgggtaatgagttagatggtagttctgatagccttcaatcaagaactgactcagagaaaatacagtttcaatagtaaaggtggagaagcaggcattcctacaactctcagtatctaaaaatccttgcagtctcactcctactgtcagctgttttaactatcagttttatttaggtggagaaaccactgggaccatgaatgataatttaattaacattcctttattaagacaggctgagtttaattttttcttttgactattctttttaaataaagattattttcttaagataggtttctacaatggtaattacaaagtcaaagaataggagtattttaaggccttaatataaattagctgattattactaattttatgagttgatgcggcatagaaaatgtgcaggcgattctttaagtattccctcacactgtcttcattagtaagtacatcaatatcactgttttcagagcatcttatggggtttgccaacagaatgtgccttccttcatggtcttgtcttacaagaccacctagcacagctggagagagccaacagttgcgtgtaaaaaaaaaacagaatgtggatatgaggagctaaagacagggactggctattggccccttgtttatagtgaattaaagccagaccaggccgggcgcagtggctcacgcctgtaatcccagcattttgggaggccgaggcaggcagatcacctgaggtcaggagtttgagaccagcctgaccaacatggaaaaaccccatttctactaaaaatacaaaaaaattagccgggcatggtggtgcatgcctgtaatcccagctactcaggaggctgaggcaggagaatctcttgaacctgggagtcagaggttgcggtgagctgataatgcgccattgcactccagcctggacaataaaagcaaaactccctctcaaaacaaaacaaaacaaaacaaaaaacgaaaacaaacaaaaaaccaaaaaccaaactgaagaagaacccagcttcccagaggagactgagaaggaggcagccagcacatgagtgctcctgtagtgttatcttgttttgggatttagatcagttagtagtaatttcccttcaggcctacacatatcttcatttttctaaaagaaaaaagagagaaaaggggaaatgatcaaaagggggctaaacaatgattgacttttgattagattaaatgagtttaaattctactttacaaagaaaatttttacaaaggcccctttcagaataatcagaaatactttcacattatgtacttttaaacaaagctttttaaaataattacattaaatattatcattgtagaaaatttataaaattcagataaaaataaacacaaaaatgaaaatggaaaagcacccatagttccctgtgaacattctcctgtctctttgtgtgtatacatgcatgcattattttaaaaattgggatcatcatataaaaatctgttggaatcctatttattcctcttaatttcatctcaagatgagttttcatgtcattataaatattataataccaatgctatatagtgtagccatgtaaaaatcaatttaatcagtttcctagtattgaataatttgattgttttgaccactttattactatgaacaatgctgcagtgaacacttctggaggtaaagcttgaaacattcatgactattttcttagaataaatttttagatgtggagatgttgggccaggttctgtgtatatttgtaagtgttcctaatacaaatgttcacttcagagagatgatatcagtttaccgtcgactatttggaaaaattataataactagggtagtggttttcacatttttttaaaaattgaaatcacaacttcaaattgaagcctaatacctaaaacaacaacaataaaaacctgagttatttggatcgaaataccttcctaccctttatcttgatggttgtagaggctctactgaattcctggggttccttaagtcccattttggaaaaaccaatgaccttcatggtgggcttcttggggtaggaggaaaggatgcaaagtctatggcaaattaaagaagggagatggacttagagtcacaatctgaagtaaaagtatgtcagtgtgtcttgtaaaatgttccagtataaagtactgtgggtaagaccccaagttagggagaaagctaatagaaatacaaactgagaactatagttttccccatattccttgagtttggaaagcatgtataagagaagatgcctctaagagacctggagacaaactagatgaaaatacttaaaaacttggtcttggattgagagctctgcacttcagtctccataaccaacattagggcctgaaagaagaagtagctcatcccagatatcaacaaagatagggaccaaagcctaaccacactataaattcacagtaaaacagtaagacaccatttcatctataaaactggcaaatatgttttttaataattcccagtgttgacagagatatcaagaagtggactttccagtttagaaggggctttgaggctgctaagttcaacctcctgcttgttgtatccttgatctgtagtcttcttagctttacttaaacactcccaagaaagcgtagtgctctctccctcttttgcctttaggaacagcataggaataagccagcttcatcttcttgatcagacattataattggctcacctagtggtttttaaaacatttttttaattaagaaaaaaaattttttgagatagggtctcattctgccacccaggctggagtatagtgatgcaatcttggctcgctgcagcctcgacctccctgggcttaggatcctgccacctcagcctcctgagttgctggaacaacaggtgcatcccaccacatctggttaacttttgtagtttttgtagagttggggttttgccgtgttgcccaggctggtctcaaattcctgggctcaagcaatctgcctacctcagcctatcaaagttctgggattataggtgtgagccaccatggctggcttcacatagtgtttctatcaaaacatttattatttgccaaaattaaaatctagaagacttttaaaaatttctcttgaaaaatcagtagccctggccatacgggacctgcatttcctcatggtgagaacaggctgcccccttcacatgggtcctgccttcttctgcttgacagccttcaccactggtattgtctcctgacacagcctgaggttctgctatcttgtatcatcaagttggtgttgctttttgtagtttttgtaaaactataaaaagaaagagaaattgttcttttacccacatttgtaaaaattagaaaaatgaacggcaggctgagaggttttgtatattttagggttcaggacactataatgaccagtacagatcccaagggggctctattgcatggagacgatagttactaatttattcattcatttatgcaacaaatgttatgtgagtgcctgttgtgtgccagaccactaagctgtgatgcacagtgatggccaccatgcctggccattgaagcctcaacagtgcatgtgacagccgtggtccccaatattaaggagtctataatctatggggttttccacgttattccaaatccatagcttatgagcatctcacaggtgtaagtggccattcgaagtcacatggaggcagtggaggaggcagccagttgtctccttttagtgagcaaaaaatgactctgaagctccattgttcccttttcttttatgtggatagaaaagcacagggacatttgctccttgatgctcctaggtttctttctatgaaaatctttcatttatctacacttgctcaatagatatttattagggaccataggtgagacagtcagaaaagtatacaaaatgtaattgaaatggtttctctcctcaagtagtttccagtctagttaggaagatgagatatgcaccccaatagctacaatagacactacgttttaacaatagttgttagattttgggtctggtctacaaagttgttttaaacttttattgtgaatattatcttaggcccttatcaatctatttttctagttttttatttgaaatgtgttctgattcagttctattttagtacatcatgggctaagggtctttgtggatgggtttgtgaaataaacacagtttatagcattgtctcactggggaaattccttctgtgggcttgaatactctactaatagacatacttttggaatgttataattcatttaagttggatacttcctctttttagaatttcatattcctagatttggggcattgcaactgaccttagtcatatagcccaaccttctactgggtataaaaactctgtcattcaatgcaatctaagattacattggcaaataattttcatctcctatgatgattttgaacaatttgtagtgactaccgaaaatgctgagttaagaaggattcttaggtttatccaggctctaagacaaaggttgccataactgtttagtggagtctgttaagatcatgggaattaagaatgttttagtatatgcctaactataagaaaggagattttctagctaatcagagtgagttttcatgtcagcttttggttaacagaagtcttagtaccattttctctatcaaatggccagtcttccattcagccaagttcattgggaacctcaccaaaagattaaagaacagaaaataaatcaggtaatgaggagagatagaaacaacaaaggtttctactgacttgctacgttcactttttgagtttgggcactcttcttttttaccaagggttaagcctggtgattgagactatattctggtgcagtgtgcagccactaggtcctaggttctttgaggacagggaccatatccatcttgttcactctaccaagcacagtgccttgcgtacagcatgcctagtatagggtaggtgtctctaagtttatagaatgaattactacagcccttggcatcttgggaggaaatttaaaatgagctctcagtgctctcaagcagcattgtattggtttctctggttgtgtaattaggtttttgattacaaatgtgtgttaatggacagatccatgtgttcatttgttgctggttgtggttgtgatacttccgttgagatttgcagtgtgttccggacatacagtgtgacatttctgtggtaaggcttctggtcagcggaagattgatgatgtattttaacccctgatgactaggaaacctctctcccttgggagactgagtgtgtggccagtgtttggcagggtgacttcttgcagtggaattctgaagctcagactcgtgttctatttcttttttgccaacctttggggctaggtcatgaagggtcttttcacagtggaaaccattttcgctcaattagttggatgaaaacaaaggctgccccatgccctgtggttattgctttacaagctagaggctcagattgaattgcaggctccctaggtcgctggagacaggaatgctgtggtggcttcacccccatggagagggctgggtttgaaagcatcttgtagccaccttgctggttgacttaatagggaagaaggtaaccctgcaggagaagcctttcccagtctagcgtagtgttgagaagacattctgggaatatgctaacaaaactccttaaaagttttttgatccatttccttttttaaaaaagaaacaacacacaaaacatgccaatcagatggcagaacccagagtctttcatgtcacaatgtgtccatttactacagcatttagtagatcaataatacctttagcttgaagtagttaacaagcatacctttcagtgttacttttattttctgctccctgtagcacttagcaaaatcccattatgcaattgggtagtattaaatgttaaaaagttaatttgttctgcattccattaaaattgcttttttttttcatgtgaattggtccttacatcttgtttaaaacctataatttaagctcaaactgtagtaaggtcttgagtaaccttttgcccttgctaccttaattattcttcatcacacacattatttcaggattgtgacaatgggttaactatttgctagttaatgaaaatatctgtcacttaagaaatatatggacttgaagttttaattaaaattgtatatcaataatgaaataaaatgtaccttttttgatgaaaatatattttaaaatattgctttctttctttttgaaataaccattccttggttaaggccaaatgattgattaagctgttgatggaaatggggagcttgtttccattttaaagtattaaaacatttgctttttaaatgtaatggttttctaattacattcattgtcaccttatataaatatgcttagagattgtcttataataataaaatgtcgtggaaccagatcctaatggtggtgtggcaaaaatgcctcatatttcttgattccaaatatattagataactttttttgtatttttcaaacttatagtgaataaataataagtaggaaatgaaatttcctgaaactaagctaaatatcttaagagcatttggtgctttgtttggcctgtttttatttgataatctgtatacttcattaaaaatcatcaggttcagagagattactgataattgcaaacttaattcttagcagtagagactgtctggcatacaaagcccttaaaattaccttgaattttttttagcctagagagtttacatctttatgtcacatcaaagagaaaaaagaaaacaaaaaattggtggtggtgggggcagatggtggaagaaagatatgaacagatcctgagaataatggagtttttaatttgaagaagttttggaaattaggttcagttacctcatttcacaggagaataaaaagaagcctcaaatattcaatgacctgcccaaagttctgcgttattaataactgagatgggacaagaaccagggtttctgagacaatttgttggttttgaaagagattttggggtcagacaaatctggttttcaaccctgactacctttgtaagctctggcagattattgaagtgctctgaacctcatttttatcttctgtaaaatggggatgatattccattgtgtgatttcatgagataatggatttgaagactgagcttcggttctgacccttccaaatggcttatcagtgctggctcccttccctttgctaggtcagtgtcttctctacaacacagtgttgtgtattgtagcaagtcacttatgccaaacaagaccctgactattttggcaatgaggtctgggtttgctgcctgaccagcaccagacacggggacactagtatgcacctggcttatgatgatactgttacgaggtttgggcaggaatccatgctgaagccatgcagcaggtgctttggttctgtggcctcgggactcctgcatttccctactcttgtttgatagcatagccgagaaatccacagagacagagatgatgctgaggagcccactgcttttttttcttggaaaagaaatgttccatggaaacttttcctgtgaaccctctttgagagatttatgcagattataaagtcaaaagaagcggtcattccagacttttctttccaggcagacaggccaaaacataattttagcaggtattagtaaaaattgagaagtattttgtgtatgctgggattcttgccaggctctgtgtttgcaactcccaagacattgctaaggtgaaagtttttcttcactacccttggaagattgttgaaacaagccggccactattcttttccattgcatccgtatcatcgaggcctctctagacactgttttgtggcatcttgggccaacacaaattgatttgcttttcagcgaaagaacttcatgcagaatgttgactgcaggtgtgttttggaggaggcagtaaaggagtagaaatggaaggattgatcattagataaagcaggtttaagtcatttggctatttaaactgtagaactgcctgctttaatttggtgaggatttttaattttttttttttttactgtaaacaaatgattctacaaactgtgagtccaagtaggtacgtccaaggaatttacagcgacttttacatgattgaagatagaactttgaatttgtttagaagaaaaaagatctagtcgtgagggagtgcaaaacatacaccatttaaaaatactccctgtcatacatcataatcaactattgcatgtgtagccatttattaatatgtgagcatgatgatacttggtgtgtatgtttgtaaactatatccattttgttagttgaaaatattcttaattattcatagaaatgtataaacctccatgagaacgttttaaccagatgtagcaaagacctaggcatactttattgatcattttgtacagaacattagggaatgttccagcagagtgcagcaaaagctagttattgcaaaacatactcttgtcttttcttagtcagtctggaatgttgagatatagagggatttaagattttaaaaatgatggaaacaaacagtagagatcttggaacaatgttctatgtgcactcctgctccccatcctctgagaaggcctcaaacaagaaaagcattctctaatttactaagtaacactgatctttcttaaagaaaggacatggttggtacctccagataacacttgaaaattagcatggtgtattttacttgcttttcttttcaatataactttttaaaaaagtacacaagtactaaatatcagaattctttgtcagaaaatacagaaaagggaagggaataaaaataaacaataccctaattgcaccacccagaaaatcatagtttaaatttagtatatagccttccagatttatgaatgtgttggattatgtataaatataaataagaaatagaaatatttttaaattgggtcataaggtacatactgtttggaaagtgctttttcttgtaaatataaattgtatgtacggttatagctgctatagcttttcgtaaatatagttaactctggttgctagtttcagttatgtttgtatggtatgctcctgtcttttaaaaaatgtgtgacatattacttcacagtaacatgtaagtaattcattttactttgtgaataaatattattctgatgcagaccactgtatatttgatgtgtaccacaaagaataaatatttaccatagcagaattagctgatttttcttactgttggtgatttactttaagaagcttctctttctaacttctagcccatttttagagagaaagtgatattttttagtggtttgtgattacatagtgatgatactttaattgtgttggtgtttttaagaatattggctaagtagtaaaatagttgcccaacttttcctgctttctagctaccacaattcaattacttttgattgtcctgctttaaattcctactttataataattatgtcttctgtttataatgtgataatttaagaatagaagcacaaaagattatatttggctctcaacaatgagaagacagctaattaccagagaaacagagctatcagatttttaaagaaaagtataattaataaatgcgaatgttcagtttattttttatttttattttttaaaaataaagacagggtcttgctgtgtttcccaggctggtctcaaactcttggcctcaagcaatcctctcgccttttcctcctaaagtgctgggattacaggcatgagccatccgtgcctggccttagtttatatatgagcacatctgtttgaattatgtctggcacatgaatgtccctgaaggaatactggctggaagagaacttggggtgactaggtcaatgacccttctatcagaactgaatgccgctttccaaacaggccaggacagtgatcatgagtgccagggatcggaacactttgctgatttaggaggtagaaagtcagccaaattggaagctgtagccatgttaaagatactacagaagctacctgctgaggggctgagacattaacaggcctggctacgtgataagattgaccacaaaagcacaagtgcggacccgattccatagcagagaacatctgcctctgctgctggggtcaggagcagcctggagcctgtgggaatacagcaggggaggcatgtatcaccttgctgtaaccactggttcttcaagcacaaaatcaaaaagatagaattttaaaatgaaaatgtataccttgggggtgtgtgtgtgtgtgtgtgtttctagctataaggggatgagaaaaacaaaggtttttgagtcagggcccacgggtgtgcacactgtgcttctggtagcagggtctaggattaagagggcctttcatatgatgtgtgaagaatatataaatgtagaaagcaaaaaaaaaaaagtatttaaaaatcttgcattgtttcagcaacacaattcagagtcagtaaacttcagaaattataggtgccccaggaaataaattaaaggcctgggatcattactttacaagaatgagcataccaggacatttcgagaccaaatttagtttctgttccttcttcaaagacaaaacttgaagtcttctttcagtatgttaatttaaacctctctaaaaaccttgtaattggggtaagcagccaccagggggtagccatgatttggttaaaattacaagtctgactagtaaagctttttcccaggtgggaaagtgaaaggaccactttgattcctttttgaagtgaagcaaataaaatgaaaagaaagttcagtaaattttactaaactttcaattaatttcttgattggtttaaaggacactttttgagttttcagctactcagtggcatttttttgctccggccaccagcaatacagtctgtctcaaacttgacattaactaatgatgaactttgcttttctcatcaccttgtagctggaaaaacacacacatacactatgtgtattgtatatttaaaaaaattctatctttttgatttcatgcttgaagaacaagtggttccagcaaggtgattatggaagaatataggaaaacttggcttatcatttccagagaatagagagaagattactttctattcttataaaaggagagaactcttccttttccaaagaacagttttctgctgccagctagatgctgcttgaaatgtatacatttgacactttagtagttctgaaatttgctttgggttcagtctggaggggaacattaaaaaatacagattcctgagctccacccttagactcaccaaatttcaaacgagaagagatgttttttttaaaaggttccctggtgattctgaggcagggtccaggaaaatgcctggcagccttctctcttgtaatgtgtgagaactacactagtaagagaatatctcaaaatgaacttttaaaaaagttcctgttaccagaaacaggtatttaaaaatatctaaaaaaagcacatgtaataagactttaagcagagggtttaacagaattttgtaggaaattttaatatgcagaccatagtgtaatgaaatttcttatttgggggtttcttcttttatactgatggccgtataattataagattttttttaatggaaatggaaatgtacttccttgtttagctgctatttaagaaggatctagaatatggagtaactgaagttcctgttataacttaagagatttgatcactcagagtaacagatgtgcaagtagatactcaccatcatgttatggtaaaaaaatttaaaaagtttatgattttttggatataaattaatattttaaaaatgtttattgacctcttcttcccctaaagtatgaaataaaggggaagtgatcacattctattttacagacaagaaactgagcagtgaggaggaaaaccacttatctaaggacattctaatctacagtaaacacatagaagagtattgggttattttgattcctgtgccattttgttatctaccattctacataaatggagaagttctcctcccttcccaaccctatgtctaaacttacagtctagttatagatcccattgttagtctttctacttagaccccactttatccagtggagctcaattattattattaatttttatcattacttattttaaagtatgatgataatacaaacaggcacactttaaaaaaattttttattttaattttaagttccagggtacatatgcaggatgtgcacgtttgttacataggtaaacgtgtgccacggtggtttgctgcacttatcagcccatcacctaggtattaagcccagcatgcattagctgtatttcctaatgctctccctcccccacagccccctccagaggccccagtgtgtgttgttcccctccctgtgtccatgtgttctcataaacaggcacatttttgagagacagtctagtcaggtgatggatgctgtgtcgaaatggacagcagcttgcgtgtctggtctttcctccttaaaaggctcagaaactaaaggcgctgttatgagaggagttggaagaagtggggaattaagagacttcttttgggacctagttaagcagagatgctattgtcttacttttgaaataccaagtgggccttgctgtattttattttagtgttgagcttcagatacctaagccagtgtcttttgctgctcacttatgagatccagcttgaccttacagtggcaatcatgttaaaagagaacaaactaaagtaagcacaaacagaaacttagaattagttctaaacaaatgtggatctaattttttacattaaaataaaaccaaaaggaaggctgactttaggtaacatttatcaaatttagactaaaataaaccaagaagtttataaggtccagtttgtggagtaaaatattggcatgaagagaacggaaacattgcatgtaggaaaatgtacgggagtagaattagagaaggaaaaatcactagtcatgacccgatgttactacagccacaccagcttacttataataggaattcagtgtgttacaacaaagagggttctgtaaatgcaccatgataaaaatggcaaatacttataatagctgctattttttgagcacttactgagtgccagctattgctaagcactttacctacattatctcaattattttaaagggttctgttgtacagagggactctgtaatgttttgccttcaataacttaatgcttttaaagagcatttctttatgtaaacacttccccgtggatttgggattctaggaaataaatgggaaaatattagctaaccttgtacaagagagaatgatggtgttgggcatatgctataaactctccccagatttcccaaactgtgatccaaggaatattcttctgggagatattaatagatgttctgtaaaaaatgggttttgaagcactgcattctgtgtccttctgctggggattcactaagccacattcggttgttaaaggatctgagaagttctgctttaaaaaaaaaaacggagttttttaaaaaactatgtttactatttccttaatttaactacagaacaccttgagaggagcggtcagggagagaggattggagaacattccatgagtgcctagttggtattgggagacaattctgctgggtgtcttttgtttctgtgcatcttgtgagcggagggactagtcagtgcctttgttctgtactatattctgtactatattttcaaaaaggatattttatagagaatacccttagacaacagaggtagtatctccctgcagagcagagggtaggttgtttactatctagtacaacaaacacaattaatccttccagaacaaggtttaagcatgattactgaccattataaaagatttgggttccctaagctcagggttcttctcctgtaacacaacccctccgcatgtgcagatgtcaccttcttggcccttttcacattacctgtgggaatctgggctcagggaactggcacaaatgctgatgttctgggtactcttgttgctttaagtagtaaaatcttttgcttctgacctagcagtcttgaatcttttgcaagcatccgtgaaaccatggcagataaacttgttaatttgcaattacagtaaaatcttagacctttcacaattcctgaagggttgggtggagtagggtgagagataagaatagagtggctggggcaaaactgtgaagaatggagaaaacacaggactgcaaagttaagcatcttccaaacagtctggactattgactttcctggcaatgttgctcctttgagccaattaatctcagttcctatagatttccttttaggttttattgactagatatcaattatgttttgctactgttcttttctgtgcttgatttttccaggtgtagaatttgtttatataatgaaataccaaatggtgctggattattagttttacagttcttgtacatttagggaaagaaagactaggcaatttactctgcttggcagtttacacgggttttctgatgtaatcattcatattattcaggattttggtattttattctgaaatttacatgtgaagaaatttgatgctcttcgaggtggttcttataatattcattgctatcatttatggagtgcttactaaacaccagctactgtgtagctaagcgtaggatattttcttatttaatcctcataatgaccctaactagttactattattatccttattttatgcatgaggaaactgataaccagagaggaagtgatcacccccaggccaggtaattagagctgtgatttaaatacacgtatgtatgtatgacttcaatatccagttttctctgttcccctccaccgtctgccaaattaaagttttatggcattatttggcttgagctgagggtgaccatgtagttataatccaaactagacattttggagaggaaaggggaacaatattaataattgcaccagaacaacaggtatagtccagactgtcatagaaaaacagggtgtgtgttcattctactgtgcaaatgaaatacccaagtaaatagtaggatagattttagtcacatttgtgcaattgatttttgacaggtgtggttctaggatattatctcccattgagtcaatatgccgaattcaaatagttttaaatattttattgtgcttttaaaagtattttattgccaaggtagacccacccttattgacagttccaatatagataaaatggattactgcacatccttttctcacacctcagtgttttatgggtttccagaacttagtgcagtccaaagtaaagggagtatttatgacattttaaaaagcaaaacaggagataattattcttttctctcttcctccaccccctcaaactgaagaacatgattgacttggctttatagggtacacattcctcatctaaatgaaacccagctgaggatggaaaattgcaacactatcttgtcctcctgatgtcaactgacaaaggataagatacttaaactttgctttccttgacatccttttcagtgagagttctaacaaagagagaataataattaatatacagatctataataactatgatagttttcttgtggtttatacataattgtttaattagcctctacaggctactatggtagttttgcattgattttttgttgttgtgctacttgttagaaattttttgacattggtgttaggctagctttgtaaatacattttgtgcatttttccatattgaaatatttttgaagagtatattctatgaaatgattctgtggtcaaatgatatatcttttggagattaacaatacacttataagcatgttaaagactaggtaaagtcctagagtgctagaaatagcttgctcactttgtttagtccagcatttcccaaacttagacactgagtgctttttttagtggagcatgtattaactttctgtggaagcacactttggaacacattggcatatgtgtagcagttttctttttcaaaaaaggccacctctatttgttgctatatctccttttattttataattttgtgttgccactctctccccttttttgcgtagcttttgccttgaaataaaaaaaaaaaaaattcagccagaagtgttagttatcagttactctaattcattgtactctgaatctccttttgcctgcctaccatgatttgctttgctcctttttcaaactttttactttaatgtttacatcatttatttttattctttaagaacactgaaagcatttaaggctatgaatttgtgtttgagtatggctttgccaacataccacatttaagtgtggtgatgttgcagtatggcttggtgaaaatagcattggtttaggaaacagctagatctttactaggatcctgccatggattccataatcttgagcctcagtttctgcattataaaatggggttaataatacttacttttcagaattgaaaaaaataaatttatttatttatttttttctgtagagttcatagcacagtacctaaaaggtagatggttgactaatgaatgcctttattaattttatgtttttatagatactctgtaatttcaatattgatttagttttgtcgcagtggtttcatagtagctgtttaggagaataactttacttgccaaatagcaaaattaaaaaacctatagttttgttaactgtttgaatttcatttttttctgagaccagcttctctatgggaagggagagttgcctttaggaagttctaagcctgcattagcttgtggcccatgaggaaagggtcttttccccatgaagtcaggtcgatttaaaaaaattggtctatgggtcttactggtaccagggagagtgctactaggatgggtccaacctggactacatgctcaggctggtggccatataaggttagttctgttaccaataagcagactaacacagatgtgtagcaattaaaaagcagcagtgaaaaaagctagatatggtctccctacaaccaattaactgaaattcgtgtattcactcacttactcaaaagatgttgagagtctgctctgtcaagtagtatttaggcactttggatttttcagtcaacaaaaagaagatcccagacttcataggacttaggttctactaaacatttttcttatttatttgttaataattatgtttgttctcactagatataaattccatggactcagcagcttttttcttgttctctactgtatccctagcatctagaaaatagttggtatgttatagtatctcagtaagtgtttgttgtatagaggaaacttgggtactcttctgggagaatacaaagtcttgttttactttgtggcctagtcacttatgtggagggaactctagttccttgtttatcgaaagcagtggataaaagtccaaattctagaatttatccttcatgtttttccttatctctgcttctttcctctatcaatctcatgtggatttaaaatatgataaaatctgggacaatgtttttcttacccaccagtggccaatggacagtggaaattgaataaacatttaataaatgagtgtttcgatcataagaaatagggcatgtctgcctctcccttgttggctgtttgcacacttgggatttgcagtcttcaatgaatatgaaaagagttggccgtaggtgtttgtgagggagaagagaaagatttgacaatggtactggcctggcatggtggctcacgcctataatctcagcattttgggaggctgaggcgggtggatcgcttgaactcaggagtttcagactaacctgggcagcatggtgaaaccctgtctctgtgagaaaaaaaaaaaaaaaacttagacaggcatggtgctgtgtgcctgtaataccagctacttgggaggctgaggtggtaggataacttgagcctgggaggcagaggttgcgttgagccaagatcatgccactgcacattccaaccagcctgggagtgtggaataagagtaagaccctgtctcaaaaaaaaaaaaaaaatggtactggttacctaagaaagctgttcttgtccaataaagaagtgactaatagcattctgggtttgggttgatgtagatttttgactaggggaaggcagtggattttggtggaactcttttttgaacttccagccttctctgctaaatgtggctatcctagtcagagtccgctgtgatctgaatgtttgtgcccttcccaccaaccccaaattcatatattgaaacttaatgaccgatgtaatggtattagaaggtggagccttagggaggtgattagatcatgagggtggtgctatcacaaataggatcagtgcctccataaggaggccccagaggttgccttgccccttttaccatgtgggaacacagctagaaggtgccatctatggactagaaatagggctgtcatcagacattgaattgttagcactttgatcttggaatttccagccacccgtactgtgagaaatagatttctgttgtttataagtcacagatttatgtgatattttgtttttgatgttttgctatagcagcccaaatggactaagacagaaagagagccatatgtttaatggaaattactcctgatgtgtggtcgacataatacaccatgaatgttcatactttgcactgctttgtaactgggcatctttttataatatatgcttttgagggaatgaacattgaaataggagaaaagagcaaatcaagcaccacttgatagttaccatgtcaattgaaaagtcccttatatttgtccttttaatgagcagcaatgaaagagtattttataatatccctaagaaactcattctagtttgttaaacatttttgccaggattttttttctttctttctttctttttttttttttgagacagagtctcactctgtcgcacaggctggagtgcagtggtgcgatctcgtctcactgcaatggtgcgatctcgtctcactgcaagcttcgcctcccaggttcacgccgttctcttgcctcagcctcccgagtagctgggactacaggtgcccgccaccatgcccggctaatttttttttttttttagtagagacggggtttcaccgtgttagccaggatagtctcgatctcctgacctcgtgatccgcccacctcggcctcccaaagtgctgggattacaggcatgagccaccgcgcccagctgattttttttcttaaattactctcaaaactctttattttgcagtgtaattacattataatgtgattatatacatcttctgtttcttttatgacaaacctaaagggttccatagaaaactagctaatatcatccaatttaaggtgttctttttggccattaggttaaagtattaaatcattaagacaactttatctctttgttgttttagaagaaataatttagcagataaaaaatgcacctagaaaagaaaagttgtctatgttgttattcgaaatggaagataatttgaaatccaaactatatcgcttttattaggcctatagaagagttatttacaaatatttctaggcaagtttttatgataagcatgcttttccttttttttttcaaggtattttccctcatttgtatcatatttggaacgttatgccctaaaaggttcccctacatgattttagagttaagaatccttttacctgctagtttcttctctccctcattctctcctggggcactgatctagtctataattcagaccctcagttgaaaaggaactgacatatatgtgactaagagagggtttatgtattccttgaggcatggtccatcaatcacctagccactttacctaaaggctgaaaactgtgaatcatttcctccagtaccacatgctaggaggcacttgatttaggaatatgggtaatgtgggctataattaactcttttatatattttatttctgttctttaacatatggcatataattttatactaattgcagagataggcaattaaaattttgcatttgctggtatcacaagtctttcgttaatgggtatacatagttacatgaaaacacatgtatattaatcaataatttaccttcaatcacagtcatctgtataatgcctttcctccaatacatcattggtagaggacaatttggcaatgagaaagcaacaattgttactgattttgcattgttttggcagagttgcaataattttcccataccgtgatccagcagagatatcagatagatttctagactgtacttgcatttgaaagttcttcctctgtttttattctgagtatttttttccatcagcttataacatcataatattgattagtgcaagtaatgtattattcatgccattctggtttcattccattagtgccatcggcattagtattcagtctgagagacacaattatgtcaagaaccctctggatcagctagtcttgttttgcatttgtttcacattcatagaagagacttctttgtagagtagatcttttttattttgttggtgccaactggaatgaaataagagattaatatgaggctgatgtaaatataaccttatatatttttattttacagataatcattatgtaaaatttgaaaaatttggaatgtgtaaaacttagaactgtataagtagggaaataaattcatctgtattttcatcatcctattgacaagttgattttactttctagtcttatttcttaaataataaagttcatgttgtatatgcagttttgaatactgatttttagcattatatgatgcatattttgccgtataacatttttaaaagttgatttttggtgaacatataattgtttatattattgtatcattttcaaccattcttaattttcaaatattttttcatagtttttttatcaataatgatggatatcttcatttataaatctttgaccatatctctggttatttccataggatagatttctggaagtgaaattatgggccaagaatattagcctttaaaaaactcttgatacatattgccaaacaactttctaaaaacactgaattctaatttcctgtttgctaaaaaaaaaaaaaaactccgttttagcttatgttgctgtaaagtcattttttttatttaatgtgtatctgtctttttagtaatatattcattaaaatagacaagttaggacatcattagattgctaaacaaccaaagcaactcaatagatagccttctagtgctaaaagccacctgacattttggtgggctatcttttcttagtgtgtaatttttgatgatttatattgctagatcctgtagctaaatatttgaacggaaatatggtgtaggggtctgagcattcagacagataacaacagttctgtaagtctgctgtggaaaaatgagagctgctatctgctacttcatcagtaataactgagatctcattgtgtttcacctgtgtttttagccattcatagaaccatttagtgacttaattttgtatttacaattatttcaaaattagtacaaagtctaggtaatctaatcaaaacaagttatgtttgaaataacatactgctgctcatatgcttatttgcatcttgaagaatggagtctaaaatgtacaatgatggtcatgacatgatattatatgaatttaatgtaatattgcggctttgacctcatgaaatatgcagaaagtgctaagttcaaagaaaatgtttaaattaaagtattgtgactccattacttcattttagccttctatcataaggcattttatgcaatactaggaaatctcatctcctttataaagactacataaaatgaataatgatttctgttcctctgcccaatttgcctgaaatacaattgtattgaattataaactaaccctaaaatttaggtataataaataccgcatgttgagaaggtcagttgattggtggtctttttagttgaacacttctctgtaggttctgcattggtcgatgtcttactgatggtaaaagggaggaaaaaggaagcatagggattatcagaatacttggagtcatcaaaaattctatgtataaaatttactggctatatgaccttttaaaatgtttactggctatatgaactttgttaatatcaaggatttgttaaatctttgatactttgtgagtacaatttcttgtctgttaatgaggaatgacattacctcaaagattgaattgaataatgagtaaaatatcccttttgtagatgttccttaataaaagtgtgttaatttcttatccttgtatgtaaaatatgtggaaggttaaggctagaccaaggactctattaagtatgcagcactcagaaaagtaatgccttcaaaaatgtttttgtcttctccttgcaatatagatgcatcaatagatactgaattaaataccaagcatagtatgtgggttggcaatatcctgtgtttgcaactgttggaaccagtttgccccatttgcaggaatcacaataatgaagataatattcacaaaatagcagtgcatattttatggagatatattttccgtaaaggccattcagttggttccaggagggtttgttgtgttctcttgtgacactgagtttttggtcccttgtgcttcagatatgtgaaaacttttgtgttcattattatcagtgctgaatattagccactcctcacagtgaagcaagagtactctgaagaattaccagtggattccttgggctagaggtatcaccaagtgtttacttgggggaggtggctttggtcttcccatgacctttagcagccttccccaattctttgagatagagaattaacgtatttgtagtcttttttgtaaagtgccgtgcaagtgcaactttaagacaggtcagctcgctaacttccaagtaggttgctgtactaaagctggagccaacacagtttgggctgccctacttaagcaggagttgttggtttgccattacctactgtgtttctgctacttaaggactccctgaatcctagagatgtgggagccctgtagcaaaacatacaccattgctattgctggtgatgtgaacttagatcatgtttttgcattgtgaaataagtgtgttgtagtgtacttgatgaaagatgctcatcggttaaaatctttactttgttattattaatgattaatgtaatagccccttgatcactgccccaactttgaatcatctgtcttctaacttcaggtgatcattcctcagaaagttagtttcctaaggattatataattgatacttgtaattacattatttataatctcaaactcatattagaaataatgaataaaaacattttgtttttcaagttcaaaccaaaggttctgaatttgttgaaattatttaaaatgaatttatttgttaagactcacctccattggtaactccctttgaagtcaagctgttctctctgccatcaactttttagatccaccttgaccatggcattgataacgctgtgttgcaattacttgactacacatctgttttgttaacaaagctgtgagctgattaacggaaggggacgtgtcttcttcactgatatccctaaatgttagtaagtgttctcattgttaatagatgccagataaatgttttccagattatcttgaatttacttaagcatggaatactgtataaaacacataagttataaagcattagccatctgagataatttctgtgtaacttgacttgtaactgtgacatagtttatttaacatgaactttggtggtgagatttgtacatgagtgaggaaatttaatatatgatttaaaatatcagggattgaataaaggaaaaagaaaccatctacagcttttaagtgtcaattggaccagtcttttggaatctatctgtccatcacaagcttgtctctgctttagccccatctcagacatttaatccttgtctagaagggtaattagaaaccatctaatttaggttatttctattgaggtaaattgagttaagataactgaaacttgccttggcatttaacctctttggagtcagagcatggctcaccctttgtgaaaggccacgcagctgacctctctgctcccacaccagtcttctttccaaacagcgacctgagagtgatcatcaaatagagccaagtgctatatcaggttaactccagggtatttttaatggatatatagagaagcatcagagtgttatctgtcagacacatttccaattctgaggggaaaattcttttgaatttcacataaattctttacctggaaatacagattgatttatattgaagattactactacacaagaagtcatagcttcttagataactgtgtatatgtccagcatatctttaagaacagtttttgggcagtgcctcatgcctgtaatcccagcactttgggatgccgaggtgggcggatcacctgaggtcaggagtttgagaccagcctggccaacatggtgaaactccgtctctactaaaaataaaaaaaaattagccggacactgtgttgcatacctgtaatcccagctactcaagaggccgaggcaggagaattgcttgaacccgggaggcagaggttgcactgagccaagatcctgccactgcactccagcctgggcaacagagtgagactccgttgcaaaaacaaaacaaataaaaaccccacagcttttgtacagctgttttgaacagcttttgcaactttttcaacatttttgctggacatggtgttaagttttgaaatatagaaatgaaaaacacataggctctctttcgtaattctaactcactgtcaacaaaatgcagaaaagcatattgtaacacctggtgataagggccataatgaacatattgtggtgtttttatttaaaataccacagaactaaaccaattggctatctatatataaaaaatgcaattggatccttacctcataccataaacaaaaataaatctcaagtaaattaaatgcctaaatgggaaacatataccttttaaaagaaaagggagaagcttatatttttaacctcagggtagggaaggacttcctaagcaagttataaaaagcacagccaacctttaaaatcaaagattgataaatttgactaaattgaaatataacttttgtataacaaaggaaaccaggtacaaaattaagataagatatttttaattcattctaccaggaaaggagtatgtaaagaatccgacataattaagaataacgggtccagtagaaaaattaggcaatggatatgtgtagaaaattctgaaggagaaaatgtaagctgccaaaagacattgaaagatgcttaaccttggtagtaatcagagaagtagaaattaaaacccatagggaaaatccatttcatacatatcaaactgaagaaaaagggaaatttctgataggatgaagtgttggcaaatacatggagcaatgacaaattcccatacactacttgtaggagcacaattagatacagtatttggagagcagttaaatgaaagaacttgggctatatacatgctaatatttaacgcagtctcaaaaacacaatgctgagaaagaaagaacacaggatattcatttcacaaagctggcgaatgttctcatatgctgctattctcttcttccattggaacagttagttcagcaagttatcatgactaaagctgatgaaggagtctcttacaaccttagtttatcataattggtaggtacccacaggatttttatcactttaccagtgctttggtaggtaagtcaccaagagtgaacacagagtgttcaagctttgggctgatttacaaacagccaaaaatgcctgtattcttggtcaagctttatggacccttcagccctaaagcctggggccagctcaggtctgagtgacatgctaggccgggccctagtttttttccctgggccagctgggaaggactatctcaccttttcttactgctgctcacatggccctgctattcctatatttgctctctccttttggaatcagtttatttcttgcaagaattatctcatggggtattgtgattttttagtgattatgtgagctcttactactttttgcatgtatcaaatggatttctctgagttttaaagaattccattttactatattaatttgggagaaatgctattgtctttctgatgtgacccatgatttcatagatttctacatttctcttctcagctttcattatttcagactgaagcattcctgtctccataagcctgcgcccacatccactttttccactttttctcttttttatcaccttttttttttttttgggatggagccttgctttgttgccaggctggagtgcagtggcgcagtcttggctaactgcaacctccgtctcccaggttcaagcgattctcctgcctcagcttcccaagtagctgggattacaggtgtgtgccaccacgcccagctaatttttgtatttttagtagagacagggtttcaccatgttgaccaggatggtctcgatctcctgacctcgtggtccacctgcttcggcctcccaaagtgttgggattacaggcgtgagccactgcgcccggccttttatcaattgttaaaggaaaacctttctctctagaggaagaaaagataaatctgtcttttctgatacctagggtagggcacaaggacttgactgtgaggtaggcaaggcaagtgagtcaaccttagtgtttgggttttgcgtgagatgcttgtctagagcagtacactgtataccaggagaaatttgatatgaaataaggtaatgtttccttgcagtgtgatgcaaaaaggcttagacgttagggctggcggttttccagctttgtgatcatggaaaagacacttatgaaaactcttgatcttggaaaagactcataaaaattctaagccatagttccatccattgaaggttggaaataataaagcttatctcatagagttgtgtaatttaacttatttgaaggtgcattgtaagttataacgtaccatacaaatttgagatattagtgttatcaatatttttctaaatgatgcctaacattcttttggtctcttttgccctcatcagtacatggtatatgttcttagttcagcacagagtaacagtcatccctattttcttactggcttttgttttctaaagaaagggtagttttaaatattcataaatgcatgacagctgggggcattccttttaacagataaaatttattaaatatgcaatggtgcttggtggggatgctactgtgtagcacatggaaggtcatgggccacagcttacaattttgaggggctgcactcaggtttattgaggcagtgcttaaaggtttgaggtcaagaaagggaagctgccagaattttgaatttcattcctaaacaagtcatttattaagaacctaaaaacgtactgaatcacagcacattaagttagttgatgttggacatagggaatttttgaatatggaaaaatttcagagtccatcagtataccattgcacgaggtagcccaagctcatatgaagcataagatctagtgcatggtgtatgccatttagcagtgatataatttataatttaataaatgggcatgatcaacagcaatagaagttagaagaatggttgcttttggggagggagaggcattaactagaaaaagaaatgtgagaactttgaagggtgatagaaatattccatatttttagtggggtattggttatacaggtagatatatttgtcagaattcattgaactgagaacttaaaatctgtgcattttccgaacacttcaacagaaataataaaataagaaaaatgtttaaatggaaaaaattactaagcatgaaagcaataatcgagtggatatagattgttatataacaagtagaatatctaattgtgagagaaagcagagtaaaagaatcatcaacataggctggagtggagtcaatccaggaatgctccctatttgtgtgtatgagctgggttttggggaaaggatgagctgtagatggccaaaaaaaaaaaataaaataaaagggtggggagaaaggtctttcaatctttcaaatcttggaaaccatatccccaagggctcagacagagcaggatgcaaactgaggcgagacgctagattgatttgcaaaaaatatttaatattcattttttatgttcattgttttaattcatctattcataaaatgaaaatcacaataataccttgtggaaacttaattcatcatttaatgatattttggattattactacataaattatgtctatttctttagaatgttctttctgagatcttgagcattctggttaataacacatgaagcttgaaaacccacatttgcacttatatttataatatctctattaaatcaggaagttaatgtttgcatggttgttaacccatttaattgcaactaatgtatgctttcatgacttttgttttatctcattacctttttgatttgatttctttcctaagaatccattatgaggacttggactcttgtggagctcagaaagtttaggatgtgttaaaggaattccttttataggttatctcaaagattgcccatcaattacagcaatgttttcaaccatccctggcatatacttttttttttttttttcccgagacagagtcttactttgtcacccaggccagagtgcaatggcatgatcctggctcactgcagcctccacctcctgggttcaagccgttcttttgcctcagcctccccagtagctgggactacaggcacccgccaccatgcctggctaatttttgtatttttagtagagacagggtttcaccatgttgggcaggctggtctcaaactcctgaccttaggtgatccgctcacgttggcctcccaaagtgctgggattataggtgtgagccaccgtgcctgactgctggcgtatgcttctaagaaatttccactttcagtcagtttgacagttgaatccatgaacacttggtctaaacgcccttgatactaattatcatattatgtttgccaaagaccaggaaagagatttagataacaatattttgcataattcaggctgtaaaataaatcatagagaatgagcagtgtggtttgtggtgtgtaagttgtttgtagaatacagatatgaacttttaaaaataaatgttctcaagaaagtatcagtggcatgtatttgaagtactttggaaacatttcatcaaattattacgtttgtagtggaattgaggggtgaacattaataatgttagaaagtgttttttaaaatagtaagctaaagttttacaattgattaaaatggaagcaagtgcattctgatctgacaaattattactttcttctgattgagaaagaaaagctaattagcacctcacaaatcaacagtgatgatgggaagctccactataaatgtgccaagtataaggattattgttcctcaaagaaggtgtatgcattaagcataatgtgatcaccttttttttggtctcattagcttggtgtttatcagatttctttagttaacccaggtctgcttatagttataagcagccattacctgcattggtccttgtccaattttcacactgtgtaaatatagacagaaagaaaaaaacactccttagaaatagctttgaaaactgaggaagtctattggaaacataaagcatatttggcatcttatatgtcatgtatgaaaagttaatggacttggtttttatgactggcttatggaatcggtctcattattgtactgtcacaccttgtatatggctaaatgggtagatcatgtactcatttctgtgaaaaattatgactactttgtagtagaactggcaccattaccaagaatttatgaattggagattgattttggtaaaaatggaacttgttttaagccaaatatcttaaaacccaaacccttcaatcctaactgttcatgagaatgacttgatttttgtttgatagaaagatggaaatggaaaaggagacttgcttgtcattatgtctgcttgttcataaagagaaatctggaaaagttaattccttcatattctgagacgtagctagtggaggactaattttgtcactgggattctcttaaatccagatatgctgtctttcatgcccttcactcccaccgggaaacccctatatttttcttccctatggactccatgctttaaaaattgtctctcaaggacaatatatcaattgtacatgcttttattaatactgcatagaactgcatgtaaaattgtttgatcagtgtgaaataattgctacaaagagacttgacattttgctttactttggaatccctattacacataagcgtgcagtttttgtaataaaaaagatgaaaataacttgttgatcttctattgtacctgtaagaagttcatcttggcattctcttgtagtcttagcaagcatggatttgtaatcacgccaaaatgggttacatatgacaccagaccccttctgtgtgaccatgaattataacttttaaaaaattactttacttgagacaagtttaaggcaataaagtgaatgcctgagaaaagaagtcatcagtgggagtttatgagttaccgaaacagggagctcaaactgtgctcaccacagtagaatagttttaaaaatcagtgaaggtgtttgaattgatgagctgtttgaattggtcctctgacctctgaaatgacctttcccattacctcctcaggtttgaaggataattgctctcctcttctttccccctgaggcaaccctagccagaatttcaactttgccttttgaagggtgatacctgtggtgcagcatattgggtcaggatatgaccttgcacatctgtatttcactagaccctcagaatagagatgcccaccactgttgctgtcttagatgggggcttagagaagtgcttccccaaatccaaatcattctgcatcttgatacctcaaggatcattctctattcttaaactgtttctttattgtcagttttgaagaacggtaactctattagggagataaaaatgaaaaaagttatttggaagtagtcactaaatatgattagttattttacatgatatagattattttaaatttttctgttttccaatgtggttaactactgtattaagcacttctggagctgccataatgaacagcttaatcagttcatataaatttgttgtgtactgctaaggactttaattggaaatataataaatcttttaagtaaggactagtcattatagaaagctgatttgcaatagttaaatgttcacattatactaaaatgagatataaacactcttttgtagcatgttattacaacacacagatgtcttggctccaaagaacgtgtactaaatgagtgctgcttggatttatgccagggtcaaggcttagtgatcttaagtaagagcccagaacatcgcatgatgggaggtcaactaactgctttttattctaggagctctagctcatgctttggagtctgtcgctggtggagaggacatgcccagtataatctattctccctgctcacaactgaagacaaagccttatcaatatatgcagaccttaaaatacagttgaaaattttgcgaaagctcttattttagggcaagtagtggctggtttagttgcttccaaaatggctggattgtccataattttcagctgtctagggaagttgggagggcagagtgcatctttccccgcatttagaaaaatagtacatgtatgttgaggggaagtgagtggagaaaggagaggaagaagaagaggaacaaggctgtacaataagttacatccctaggtcacattttaaattttgatggaaccggtctctcttggagaatctgtgtaaggacctacatcctgtaggaggaagcagagcctgggttttcaggcctttaagcattgactaactgctgaatgcaaatgctagcggagattgaactgtgctaatattcctattagaactgttattattttagctaatgctctgattacagaattgcataagttttgagtgctctgctcataatcccttttccctcataagccctgttattttcatagcaattttgcaaaacatgaagttttgcaggaacacatgtattgcatttatgtcagaaatgccagtacatcatggtaaatatctacttagtaaactacttgtatgttgatgcataaagttaaattttataataagacctcagtgaccagattgagaaattgaggtataaaaagtttgtgttgtcctccattagttggaatgttctctgtttattaaactgcttatcacattgttgaaactattttaatccatctaaatgatattgatatggtttggctgtgtctccgcccaaatctcatcttgaattgtaatccccataatccccatgtgttgagggagggacctggtgggaggtgattggatcatgggggcagttcccccatgctgttctcgtgatagtaagttctcatgaaatctggtggttttataagcatctggcatttctcctacttgcacttctttttttcctgccaccatgtgaagaaggttttgcttccctttcaccttccaccatgattttaagtttcctagggcttccccagccatgtggaactgtaagtcagttatacctttctttataaattaccctgtctcaagtagtatcattagagcagtgtgaaaacggactaatacagatattaatagatttttgaagcagaaaatgtataattgtattatcattctttcaagtaatatattaagaacaaaaactccaagcttaaatttatttgatttgagagtgagagatctaaaatatggttccttaagattaaaatagcaacagcaacaacaaaactctttcatcatggaatcatagtcacaacactttacaggtgagtaaaggaggccttaaaaattcagtctttgagagcaaagagaataatttactagagccaaaagttcctgtgcttctatgtctaatattaaggtacaattcttagtccatagtattgccatttggttaatatcttgatagtaaatattaagttaacatttaattattaagcaatattattaattaaaccaaatgttaaatctgttttttttgaaaaagcttgaaattcccttacaatgtaagatgtcataacttcattatatcaagtctaaaagcaggcaaacatgaggtatcaatttcacacctgcctattgccatgatcaaacaacctatctaaaagagaatgaggccttcatttaaggtttatttaaagttggaagcttggtatttgccccagaaaaggtagaaagtgattaaatgagaaagcagcttaattcttgccattttcattgtcttatctgcagttctttcattcatcaaagatgagacaacatttttcatggtcagcctattcactaacatgctatggagtgagtagtgagcaatattagcgaaagaaattgggttgtttgcttttccatttcctttgtctgaagcacaccaatccccaattcgattctgatgttgagcacttcagagggcttccggctggcatctggacaaagcctgaatatgtggagaacagattcagtctgagttgactgctaggctcatttcaccctagattggctaaaggtggcaagttctgccaccaagagaaggtttaatagtttagataggtgggaaagaaactaatgaatttatatgataatcaaagaagtatgttacattattgaaggatcaggccttagaagcatccatccaaaggccatgcaagtatttttaggattgtgtttcttacacattatcatggaggaagaaataggaaaacaaagtttgttaaagatgtgcaagaagaaacaaaccagaatataccactttttcctgattggtagtgttctcccttcacttctaggccagatggccccagattgatatcacaacaagaggcttgagatccacaattaattacggaagctgcggggaagcaatcatagtgggcacctctcaaagaaatagatgtcagaggaagacagtttggttagacctaggatttcagaggacaaactcattacactgagcatttgcagtacttaatacattaagtaataacaaataatcagcctttttaggagtcatggcttcagtggactttgaataggctttgaatattgtcctgacattaaaaaatttgcatatagaagttttagatctgatttaatgcttgttaggttagtcatccaactgtttccaaaaagactttttaaaatacgtatctgctactagaaatatttagtgttgatttagagaagtttactatcagggtgttaaatatttatttgatgcctgcggaatgattaggttaatgatctgagaaggctgctatgggtcgtgtatctgttacagaattcctgtgattttaaaatcacacaaatgctgacttttgatggcttttgcccttggtatatagcaggttatttttggaaagttccaaacaattaaagaattagagctgatttcaatgaataaggaaagatggatatatgttgttcaggttctgtgggttgcctacatgttatctaatttcattactagcaggactccacttttgtttgagaagtagggaggctagtggagaggggattgggtgagcaaaagttttactgatacctagtttgtaaaaaaacaaaacaaaaacacccaatctattttctaggctctttttcagcttagagtggatgtgttccgcagttctggccagtaagttggaagttgaaggcttcctgccttctttgatgttctgccactctgattcttggccgctagttttccggactctgcttgtcctgatagctgcagcgttgccttggtttcctgtgtgggaaaccaaggactttttctgatttcagctctgttcagacctctagaaattgccccagttcaggcctctctccctcccttgtttcctagcctttctgatgtatattctattgggcttgggttggttttccagatcgtgtcttttcctgtctgtgatgtagtctgagtgcattccctttgccttggcagttttccacttcaagggctctcatttactattctgaaggcggcatggggtaggactccagaacaaagtcagacagacctggatttgaatcttattatacttaatctccctgttcctcagtttcttgaactgtaaaagaggatgatagtatagctcaggactttgatgtgagaattaaatgaggtaaagcttgtgaagcaattggcccaatacctgtaatgtaagcattcagtaccattgaaatgatatgttaatgatgattatgctaaaccaacaacaagcattgaataggattgttttttcctttctaaagaataggaatctgagacagtttattcataaagtatcagaactggtgccaaatctgcaaatctaaatgttccctgagcagtaaccatgttggtctcattcactgctgtctccctagtatttgacataggccctggcatgaaggccctggcacataataagaaaaatagttaacatttagtgagcacttaatttgtatcaattttttctaagtgctttacatatattgactcatttcctcccagaggacaagagtaggtattattacctgcattttgcagttaaactcaaactcagagaatttatgtaacttgcacaaggtcacacagctcttagctggctgagaagaatgccagtagtctggttccagagtttcactgcctgtcaataaatattgagatgaacaagggaagaaagggagagaaaaggaagaaacccaggtcctgagtccttgtgctgggcatcaatcgtggtagttgtgctgtggaattcgtttttttgctgctactttagctggggtgtcagccctgaatggatgactttggggagaactgcaatgccctgtttattccctggggcttctgtaagggcagtagtaaaggagggggtacgtgaattaccagccatagacaatacatcactaacagaatggtactggctacaggcaattcccaatttatggacagatttgtttcccaaatttgtaatttcactgtttggaactcagcatgcttcaccaataaatagctaagttaacccctagagtaactggaatagttcttacggcccggagccctggagaggcttgggggctgggtggacagatgacttcctgtgtggacaggaagccagccgtgagggcttgggatggcctgaaggtttactatttttgagagattcatataagccaagtttaatgagtaagttttcacattattggaatggtcagcatgtatctgtgttagagtacaaagacattttcaggacatatctttctgtatgtaacctggaaacaaaacatttaaatgaaataaacgaactcaaccaactgtatttcttatgcttgtgattttaccataggaattaaggaaacaaattgtatcattcttggccaataacagagatactcttccatcccgccctccctttttattgtggcaaacaaacgcataaagatattaaaaaagacacacacgacataaaattcaccttcctgtttccaagtgtatagtacaatattgtccaccacatatacattgttgtgcaacagatctcagacccacccattccccacatgactgaaaccctacatacattaaacaacaactctctacctcccactccctgtcaggtcggcccctgacaaccaccattctactttctatttctttcattttgaccactttagatacctcataagtagaatcgtgcagtggaatcatgtctttttgtgactggtttatttctcttagcataaggtcctcagtattcgtctatgctgtataacacatgacaggatttctttctttttaaaggctgaatgatattcatatatatgccataccctagtttctttattcatctttggatggacatttatgttgcttcttccccttggcaattgcgaataatgccgcaatgaacatgaatgtgccaatatctctttgagatcttgtttttgattcttttggatatatacccagaggtgggattgctagatcatgttgtagttctattgttagttttctgaggaaactccatactgtttttcatagcagttgcactcttttacattcttaccaacagtgcacaaggattccagtttctccacatcttcactaacactgatgtgtgtgtgtgtttaatagtggctgtcctaatgggggtgaggtgatagctctttgtggttttgatttgcattttctggatgattactgatgttgagcatcttttcctatgcgtcttggccatttgcatgttttctttggagaaatctctattcaaattctttgctcattttaaaatcagattagtttttttgttgttattgggttgtaggaattctttatatattctggatattaattctttgtcacatacatggtttgaaaatattttctcccattttataggttgccatttcattttgttaattgtttcctttgctgttcagaagttttttttttttgtttttttgtttttttgtttttttgtttgtgagatggagtcttgctctgttgcccaggctggagtgcagtggcgcgatctcggctcactgcaagctccgcctcctgggttcatgccattctcctgcctcagcctcccgagtagctgggactacaggcgcccgccaccatgcccggctaattttttgtatttttagtagagacggggtttcatcatgttagccaggatggtctcgatctcctgacctcgtgatctgcctgcctcggcctcccaaagtgctgggattacaggtgtgagccaccgtgcccagcccagaagttttaataaagttttatatagttctacttttgcttttgttgcctgtgcttttggtgtcatagccaataagtccttgccaaatgcagtgttataaagcttttcccctatgttttcttctaaaaattatagtttcaggtcttatgtttcagcctttaatccattttaagtaaatttttaatatagtgttaaatacaggccctatttccctcttttatgtgtggttatctagttttctcaatattatttgtagaagagactatattttcacccactatgtagtcttggcacccttgttgaagataatttgaccatatatttgaggtttatttctgggctctctgttctgtcccattggtctacatatctgtctttatgccagtaccatactgttttaattactgcagctttgtgatgggttttgaaatcagtaagtgtgaagtctccagctttgttctgtctcactgtttttgttcttctggattctctgaggttacatatgaaatttagaattttcttcctgtttttgcataacatgccattgggattttgatagggattttagtaactctgagattgcttttggtactgtggacattttaacaatttttgttttctgtttttgcagaatatgccattgggaacattttttttttcttttgaaacagagtcttgctctgtcacccaggctggagtgcagttgtgtggtctcagctcactgcaatctttacctcttgggttcaagcaattcttgtgcttcaggctcccaagaaactgggattacaggtgtgcagcaccatgcccagctaatttttgtatttttagtagagagggggttttgccatgctggccaggctggtcttgaactcctaacctcaagcaattcacctgcctcagcctccccaagtgctggaattacaggcgtgagccactgcacctggccaccagtggaattttgatatagggatcttaccaacacaggatatcttctcatttatttttatcttttttttttttagcaatgttttatagtttttagtgtacaagtcttctactaccttggttaagtttattactaagtgtttgattctgagaactacctctttaacattagcttatagaattgagttcatttccaagtttgtccttccacaatgacactctctttttctgaaattcagcccttcttttccctcaccaagaactacagctttttgaatagtcaaaacaatgttcacaaagcctcttgcactttacttgtaggaaagtgctgtatatcctcacttggaactttgcctttaatgtctttctagcctcagcgttcttattttctctagtggagaagatcatatgtcccttatggggttgtttgaatattaaataaggtaatggacacaaagctctgagcataattcgggaaacatactaagtgttcactaaatatctattattaaatatttgttaaaatacctacttatatgtttagtggatttccaaaattacagtagagtagatgtcataaattttgagggtaaaaaggttattatgggaacacactgtagcaacagtgggaagtaaccactgatagtgtaatcagaagaaagagaacaaaaactataaatataaaagtgataataacgcaaaagttatagccatgtagtatgggatcaaaagagctttctgcctgtctgtaatttcttctggctgaataaatttataatcaaatatagcaattgatgttcataatggtgacttctgagtcatcaagaaaagattaagttacatgactgtgcactttatttaagaaggcagtggagttggcagtacaatttagaaaggttttccttcaaaataatatgttttactgctagctatacaaacattcatctcttccaaaatcttccatatgactgaaattttgaagtactggaaatcatgctaggtcttaactatggttatgggttaagagtggtgatatcattaagacacattctttttgctctttgcatggtcttatgttgtggaggattcagatttttttaaccccactcagcaaagcagctgagttaaagggaagaaggtactaaatggcctttgctctgctgatagtgtcaggctggatgtaaatacagttgacccttgaaccacatgggcttgaactacacagatccacttatatgttcattttcttgtgcctctgccacctcagagacagtaaaaccagctcctcttcctcctcctcagcctgctcaacatgaagaccatgaggataaagacctttatgatgatctacttccactaaatgaacagtattttctcttccttgtgacttttttttttttttttctgagatggagttttgctcttgttgcccaggctgcaattcaatggcacgatcttggctcattgcaacctctgcctcccaggttcaagcaattctgctacctcagcctcccgagtagctaggattacaggcatgcaccaccatgcccggctaattttgtatgttagtagagacagggtttcaccatgttggccaggctgatctccaactcccgacctcaggtgatctgcctgcctcggcctcccaaagtgctgggattacaggcatgagccaccttatgtctttcttaacattttcttttctttagctttattgtaagaatacagtatataatacatatattaaatatgtgttaattgactgtttatgttattgggaagtcttcaggtcaagagtaagcaattagtagttaaatttgggggagtcaaaagttgtatatggatttctgactgcatggcggggtgtgggggtcacacctttaatcccctcattgttcaagtgtcaactatacatgttactctggatggaacatggcttagtagcctttggggtctcttccctgggggtgagtgctgcctctggtcctcccccatctcctgccctgcatgggaggcaatatcatacatgggctttgagaatctactaatttgggatgctttgggctttaaataactgaaacccaacttagattggcttaaacaataaagaaatgtatgagttcatataactgcaagtccagaggattcagagttgtttttaatccagtagtttctattctgttgccctatcactcacttggctttgacttcctctgtgttttggtttctccctcaggctggtagtagtgagatgtctatggcagtgctggacctcacagctgcacacactatccaaaggcttactcttagaggaaataaactccaagaagctcccagcagacatttccttatttctctctggcctgtattttatcacttgtccattttggaaataatctttgatactggagaaggattaagtggcttaggccaagttccttaacaggtcactgccaagaggatgggattatcatgattggctcagacaaatcatgattcatttcgagacctggggtcaagacacctcaatcataatggctactgcactgttaggtagatggatgtaggcttgtgcacacctgctatatagtgagtcctggggaaggatttcaggagtggccctggaaggtagacttggggcagtttgggcagggaattctgtgctaaaaagaacatatttagaagggaaggtgcagtctctttgtacatccccttggttttatagacaactttccctgtggggaggagtttggccaggagtggaccccattctggcctctcaaaagtcagagcccaaggcaaacgtttatctttctggtgtaagagcagttccaatgagctgtaagaccactggcaagtgacaattcccctacaattcatttttcttttgtaaaggaggagcaatcccagttatatccagtttatcatgttgtgaggttgaggtgatatatgcagagtattcaataaatgctagctgcttttattgttcttgagtacttggtacacagttgttccctggctctgtcactccctgatgagaaaaccttggcaaatcacttgacctcctcagacttcagttcctcatctgtaaaatatggacgtgatggtggtacctcagagctgttggtactgtagtgggagggaacacgtaagacacaaagtccaccctctgtagttgtctttgctgtcaggaaacctcagtttctgagatgagatagcgattctgggctactgctgtccttcataattttttagggaaaattttccaggtaaaatcttcctctgactagaaaatttgttcatattttatagaaagtcagcttactaacccagaaagaaattcttgacaagttatcccttcttcttttttgtttttcgtttttcctatttcaaaatattgccttcatgtcccactactcaaggcaatctgacaaagttggtctggcttttcctaggctttacttcaccaaaactatccccgcaccaatgattaacaggtgactatggcattagaggctggaaaaccatcaatggtgaaaacacccccatgtggtgtggtaattagggtactgattttctttaaaaaggccgtgtctgaattgggtccccagctaaccaaagatcagaactacagaggattgtattaataagaaaaatctgggttggcctttcttgtgtttctttttaacagagctgttaatgataagtggttgcttatttggcccaacatattgttacgatattaaaaaagaagaaattgtttattagtgccattgagtaagtcactatgcctgccttttatatttgataacaagcaatttcagaaatatctggaatatgtggagataatgaaattattgtgctggggaaaaattagctctcaaagcagaggcatggggtcctacacgcatgtgcacacacataaagcccatcagccaagatgtgagtgttatgtaatatttgtgtcctttggtgaacaatttttgtttaatcatagaaataacagatatttttatagtacacagagggatggggactgagtgtcttggaactgatttgggaataatgtacatttaaacaaatttgagctgtaatttgaaatcctttaaactgctaggtaatgttgaatttcccataggctttgaatttgaatgtaaattctagaatttgttccataatgaaggaaaaaatgtgcatttaattaagaaaacatcatttacaatgtggcggctgtgttgctgtaatacttgtaatgaatgcaaggaaaggtagataataaaagaaataagatgctgtcttcacttcagtctttcctcttaaacctgtgcctgtactaatttatattagtctaatacaaagttatttttaagtggtaattagaaaactctcttttgctttgttctaggtgggttttatggttgtttttgagttaaaaaaacaaaacctgaatttaaacgaggactttcttcattttttcccctctcccctaagtatttttttttctatatcctagatatgggtaaataagtgtctctttcagatagaatggaaagttcaggcttgctgtcatggataacaaagccatgaatgttgtaggatgctactaaataatatccctacatctcttacagagtgtcagatggaactttgattaaaaagtgacaagatgtaacatctccaaacagttcaagttttaaaatagaacaaatcagtcataaatagaaggattattgattaacttcttataactgattctgatcattagttggttttcctaaatagaaaacatctgtagaacaaatgagtagcactgttaattaagtgggatgaggattaattaagtgggacaaggagtaagtgggggtgagatttggtcaccatggtgcaaggtggaaaatgtctacttggcccctaagagggggccatacgtgtacgtcagactattttaaagctagtcctttgggagagagattagggtttacccttttgccctcttctctggcttctgtgggtctctttagacattgtttacaccgagggtcatctttctggaagatgcatgggacatgctgattaatgagtcacggaagcaatcagccttataatactgtgtgttattggcaagagaccacatattttcctgaggtacaagaacaacgtcaagaatgaaataaattagcttatgcttatgtagaggagtttccgcttctacaaaactagtctcttaatattgagaaataggataggaagatttcaggacctttattccacctgtcctgagggtaagattttaagactttctctgtaccaaagaaaaaggactcttgggtcttggtcatgttattgttttaataagcactgtcactatagtcactcaatgagaaatgtcaccgtattcatttctgtatgttgagagatcagataccttctgaaacttacttgttgatggaataagatataatttacactaaaatacttcacagaatatatggaaaacatgtatggtatcttaggatgaaaagtcttttgaattttccttagctagctgatgattttgaactcaaggttagtttgtctggaagcatgatatatttatctgtaaaaaagaaactttcaggaaattgtgtctgaaaagagtgttaaagacctcaatatctctatttagagtttaaaaatacaacttaacttttaatttaaccacttttagtcaatgctcttaaagtgcccattccataaatcaccctatcgtttgccaaatagttgccatttatagatcaataaaagtccgaagaggttaagtgacgttcaagtaacacagcaagtggcaggatcaggaaaaggtttgaggcttttaatttctagtcttttagctctgagacaattagctggttctgctctgagatcagcactatccaatttaaatggagtcctcaggtgtgcttttaaaagagacaaaaagagacagttgtctggcctggatgactctgtgcacttttttgttttttgaataatgcttattatagaaaatgtctgatttagcaaaactgtttatatcactctttaagaagaaatgtgaaagtcatccgaggaaaggctgaatggaacacatctgaaaaatgtaaaaagttgattttttgaatgagagaaaaaatgtaaaagataaaaacaggcttcttttagtatttttgagaataaagttttcagaacagcatcccaatgtacctgtttgttcatttgttccatagatttcttctttgagagtatatggtatcagtatatataattagactttcatttaaatttctagtccatttgtggattaccttaccactttggggagtgtttatattaactattctgtgccagtttttctttgcggaaaatctttctctgctttttgctaaaataagtaacaaacaagaagctaaagattatagctaatggtctagaacaaaggattagaatccaattctggcagaagccaaatgagttacagtgaatttggcacagggtgtaaaaggaactagtctctgttaattgtatgttcctgtttgtaaacaggtgtttgcccaaggggagtacactgcacttcttttcaaatgttatggaagagtgattcactggaataggtgaacatttctcagtttcacaccccgaatacattatgacaattcttttagtactctgggctcagtgagttttattagtagcagaaaagatgggattccagaaactgtagcaccctccttatttggtgtttctgagtttaactggcaggctgttgtccttgtctttaattaaattacttctcaaccaagtgtctttgaaggacagcttttgtgaaatgtgtcaaacactagggcttttttcttttctgccatgaggcttgttggcagcagtgggaatgaagttaggggatcaggagtacagtgttaaaccagttattaaaagggccttattgccaattactgaagaggaaagaagaaaataaacactcaagaagacaaaacgaactcctttccattgagatccctcttccctttgcttgttctttaacgccagccagaatcttgcggtattgttctgcttgttttaactatcatgttttattttgctcagcattttggaaatttctctagagctgtggttctcaattgggagtgggatgatcgagactccgggacatttggcaaagtctgggggcatttttgattgtaacagctggggagaagggagaggataccattggcatctagtaagtagaggccagtgatgttgctaaacttcctacagagggcagagcagccctcacagcaaacaagtatccagcccaaaatgtccacagggctgaggttgagaagctctgctctataggaagaaattaaaaggcatttaaaagaagtggcccgtctctacaaattcatagccagtttgtgcaagcagatattcaaaatatctcatttcagtgcctttgcactgaaaatgagtttttgttttgagcacttccttactctctggcactacatgctgctccaggtttgtcttatatatctcttgccccctgctggaatcagccatttctccaaggagccctggtctttttattgaagaaaccaagatctgggcattaggtgtgcttattggcacttagttttttaaactccaaaatctaagcttaatttgttaatgagaccagtttttaaaacttggtctttaccatatattatataagtgtactttaaaaattcttttcttatgtttgagcttacatggaacattctaattacccaagtaatattgaaattcaaaatgaatctttataagttaaatgaaacctgcaataacatggattgtaaaatgtattgcttttataatatactgatggtgtttgagactactgttactttaaagcgactttgttattgtacactttttaccatatgtagttttatttagttttatttcatagcctcctacagctgaaaggcacttaatcctgccttgtctacaaatcgataatttgttctgaagtgtgtgaaaatctgcataatgatgaacctggctaaaagagttctattgtgatttacgttaaactgatagtccttcatttgggtaatgttcatatctctgtagaaatttaaggtttaaattctcctaagatagtttctggaatttcttggctttatctttaactgctttgtttatttcaaaaactgtcttctatgcccataattgattgacgtaacctgtcagggttttctctttaagtagcattgttgatttttaaaccattttaggtacaagggaaaataattttgattttaaaatgaatattttctcttattaaatattttttatgtactgaaaaactcttaagatttagacaaaattttatgttttatcacacttaaatagacatataaagaaaaatacaagcaaaataatttgttcaaggtattcttaatttttttttcacattcagagtctatttgggatcacttttaaacatagaattgtcaatgtctgtatttttccaaacattactgtcctctatatcatcagaagttttggtgatgtagcatttaaaaaaataatttgagatgaaattcacatgacataaaattgatcattttaaagcgaagaattcattgacatttaatgcattcacaatgttgtatgatctctacacctatctagttctaaaccatttccatcactccaaagtaaaacgccttacccaataagcagtttctttcattaacccatttccctagaccctggcaactaccagtctgagttctctctctatggatttatcttttctggatatttcatataattggaattatacaatatgtgatctttgcatctgacttcttttacttagcataatgtgctgaaggtttatccactttgtagcatgtagcagtactttattcctttttatggctgtataatagtccattatgtggctgtaccatgctttgtttttccactcatttattgatggatatttgggctatttccaccttttggttattgtgaatagagctgctatgaacatgtgtgtatgtgtttgagtacctgtattcagttcttttgggtatatacctagaagtagggttgtgggatcatatggtaattctatgtttaactttttgaggaacagccaagtggtcttccacagcagtggaatgatttttaaaagctattcctaactttatgttcattatcaaaatcaaaatgctcaatttggaaacatactttcctcaatgctttgatttttgttattaaaaatagattattctttaacatatccaccactttttccaaagttacttaaaaaaaaaaaactttggataatttccatattcatctcaggagagtttgtaagactctcagaaaaagattccaggcttttaatttctagtcttccgctctaagacaactagctcttccctaagatagcagaagtcaatttaaatgttcgggcacagtatctattttccatatgacttcatgaaaatgaaacaaaaattaaaaaattaggctgagtgttcaataacactttatttatggagttaataaatatttactctgaatgggaagaaaagagatctgcatttgacagttacctatgaaatagaattaatttttttcttctttgtcatgttgctggggtttttgaagatttgcctaaaaagatagtcttttagtttggacccttttaacttcacatgacatatctcattaccaagtacattcagaaatagtgtttgaattctgcagtttttaattttagcaaccagcagtcagtttgtattgctttctaagtgctggtgaagctaattcttcccatatctaaggtcgttttaatttcatttctttatttgacatctttatgatattcaaacatgaagatgtatagtttttttgtagggtaggaacactaggttaattattaaataataaactaaatcaaaatctaaaaccttgactctagtttgattacacaagaatgttttattgggataatacttgttccttgttagcttctcctattatgaaatgttctccttgtgttaaacatataaaatattccaaatttggatcattagccatgactgtcttttgtatcccagatatatttacatttgaagttggtcaggctttccttgtaatcatttcattgattgaggaaatatgtaaagtttttttgacaagaaatataatgtcagtttgtaaatgcagtaatatagttgagacgtggcattggaagatggcacagagtaaatttaactcttaagttgccacaattattagatatcagaaatgttcccccatgaatggctgcatatttctgaaaacactctagggtgactgtaaaaaatattacagtagattgacttggaaaatcacagtagctgaatttgaaactgtaaacgttcctaatgtatgtagttcacattatttctggcagtgacagaaaaagtggtggtaagttctacttgcggttaaatgaagtttaaaaaaatgaacttaggcacatgcttatggaaaatatttaaatattctgagtgggttcttccaaacctactccatacaaatgagggatattactcagaataagtcaaattcaggttacccaggaagggcaaaaggacacatgttggatgggcagctctttttgcaaaatgagagtggtcttctcaagaagcagtcatgaagccatactctgtccactttttaaaaaatggatatttaaagttaggaaatatttaaaggaaacctgagtgagtagattaactacaatcactttgcacgttaaacattttaggacttaggacagtagggacaagctaggagaaaatgggtgaatgggtgaaataagggtgtgtgctcagctaaatagatctggggaggcctggagggtctgcctaaaaagtaatagacctgtagtttgatgagatttgccaagactttttaaagggagtggtattcccaggctctctttgtatttagttatcactgccagaggattgaggctattgtgcagctgaacagacagacaattgacaaaaccaaaccaaaatccttgcttagcgtcacgtagaccaaaacacagacaggcaacagcttagattttccttttgtaaccaattgtgctggcattgtgtatgcagaagtgaaatagcaaagggagtttctacattaactttttgatagggggaatgcctgcatcttgctctgtagatccagtttcagttaggaaacttgtgaaagaaaaaaaaaatagttgtcttgtttagattagtgggagaaatgggtcccaaaatatttccttgttacaatgatcccttccagtcttaaaaattctgtgattctggactgtgagtttatacagtatctctgtgagccaggatgtgcttttacacttctcttagtctcttatttttgtctgaaataaagctaatcagattcctctacactggaacaagtttcagctagtacaatcgggtttatagcaaccagattgtaaacaaaattttaaaatcatgttttttaagtattttagacagttaagctattctgttttccaaagcagaagagaatgagacccaccaaatattaaacaaatgtaaagttcctacattcacttatggaaatattaaacttaaaatttaaatttgatctcctatcaacccacccctttctgaaattctgagttgacatttatgttttatgtgggtatatgaaaactttaaaataatgtaatatttttctggatgtatccattgcctgttgttcagtgaggtagacaaatcttacagtataatgtccttaagtatttttagatgtgctaattttaaaatacagtgtattttgtgcttttaaatggcaattctaaattttttgttaagttaaaatcatacatcatttataatatatccaaatttgtgtaatgcttactgaaattcattttataaatttgactgtctggtttggttaataggattgcttaaaatgctaatatacttgaaaaacattagctttatttaactaaagacagacattatcagaaaagctaggtcaagataaaacaaacatgagccttacgaaaatgagggaactattttttggtaacctggggtaattttaaaaactaagggttgtagatcagaagatttgggatttcctggttttctacttactccctggctttattttctcttctgtaaaataggagtaatatctcttttcttcacagtagacagaatgagaataataaatatgtaatggatatgaaactggaaaacttctttacaattatgtaaagacttttggggagggagtgaggactagtttgctttaaacttcagtttttcaccagaatttttaaaggtctccatttagatgatccaaatgaaaatgtaataacatctgttcaataatttttttcctactggagtataggaagatacactgattttttcagattgttctgttaggttgtaaataaaaagtgctagtgatttcattctcagtttttatattatatatttaattaatatttgatattataaagcacatttatcagttaattttattatattctcatgagtctattacataactattattataatgaacattttacagatgaggaaatcgagacttagaaacacttccttttaaatttaatttaattttgagataaggtcttccactgtcacccaggctggagtacagtggtgtcatcatggctcactgcagccttgatatcctgggctcaatcgattctctcatctcagcttcccgagtagctgggactacagacgcgtgccaccatcattctttttaactatttactgttttttctgccaaccccaggtgctactgatggtacgtcagttaatcagatattataatttaattgctgattatgttgttctttaataattttgttggttcttccataaaagccagagttcctgtacgtgtctcagttgttttgcagcatgtagagatgggatctgtggtaattcctgttaattttgctttggaggtaatacttttttggtgctagaaagctagtgtctgtaaggaaaaaaaaaaacatgatttattctttttttttttcagcttcctctcattaatgctttcatgaggcatatttattttatgatcgtgtaaaatttcccaatgcagatctcttcttggggtggagttgtggtgggtggggcactgtgaactgcacacctgcagaggaatgccagcaggggaaacatgaatgttattttgcccaaagtactttagttaatacagtgaaggattgttccttctttggcagtttcttatattaaaaagataaaatgaacactctataaatattaacggatttcagtgcactcttattctctcaaaagtgtctggttttgaattataaatccctttctgtgacctatctgggtttgaatcctgtctctcacctattagttgtatgtccttggacatgttactgcctatatctcagttttctcatctgtaaagtgtggtgacaatagcctcattttgtaaggttattgtatggattgagttaatacatatggatacatgtttacttagaacagtgcatggcacatactaaatgctcaataaatgtcagctgctatcactatatattattattttcttgctttgttgctgacagttaactggactattaacttgaaaaaataccctttctagcaataaaaaggatttcatttcttactatatttgatgaactataaaaatgaatcaagttgatataaatcaaggaagatcatttaactagcagtagtggtagtctttgtcccccagctttattgaagtgtacctgacaaataaaagttgtatatatttaaagtatataacattttttgagagagagatatatatatatatacacacattgtgaaatggttaccaccatcaaactagttaacatatgcatcaactcacagttagatttttttgtgtgtagtggaaaacttaagatcaactctcttagcaaatttcaagcgtacaatacagtattattaactatagtcaccatgctgtacattagatgttcagaacttattcatcctccatgaataagtgctaaacttttgtactctttgaccaacattctctcacttcccccaccttccagcccttgacaaccaccattctactttggcttctttagattctgcatatatgtgaggtcatgcagtatttgtctttctgggcccgcccggtttatttcacttaacataagatcctctgagtttatccacgttcttgcaaatggcagggctaacttctttaaagctgaataataatcttttgtgtatgtgtgtgtatatatatgtgtgtgtgtttacataccatttattctttattcattcatctgtctgcagacacttcggttgtttccatatcttggctggagtaatgatagtcttgaaaaacaccaattaattactgagtggaagagtaagaatcatgacatcacatttcagatccttaaaagtcagaaaaacactggaaaaaaagaaggataaatggcagttgaagagtcattttgtaaccagtaaagaataggacaatgccaagtgttgataagtcagaggcggatacagagggaagtccagtggcatgtatttgaccaagggactttgtcacaagcatgggtttattagaggctctgcctcagtgtggaaatcttggagggagagagtggtatacacagaggtcaagggtgagccggtttctgatgtagcttcccaagtatcaggaccccttcctcccacaatacacattcattcatattcattcattcattcattcattctctctctctctctctctcttatgacaaccaaactccttactatgacaactgaataacaaacattcaaggactgttgatctttaaagagaatatgggttaccttttcagtgggggcggaggctgtgattaaagatggtctgaagacatttattgcacccatccttagagatggggacttgattctggggggaaacattgcatgtagtatctctaggttgtctgcttgctcagttactgatattaccaaaacatctcttttagttctagtttgtttactagacccagaatgacatgctatatccttgtttgtttatatcaccttccagctctatttaaaaccattagagatcccagaccctgtgttatctccatcgattttctatgaggctagacaagatttaactttaattcatttgtgatttcctattcctagtttacacaaataagtctgttagttcatttgtatattttttgcactttgacctaattggcctgtttttcgctaatgccctctcctttttcactaattcaccagtgctgtgggaaccccccaactccgccacctccactattgtagttgttttataactactctttatataatgtgttaatcttctgtccttacctaaggacacaaattgcacataacattagatcatccttaggtggtagaaattaaattgagaatcagaattagcagtgaaaaaaatagatatttcttgtactgaaagataataaatgatatggatcttttagtgtgtagaaattctaacagattctgagtagttggggtgcctaggtgaaacactggtgaggagaaaatgtgacactttttgttcatgtgggggaggaagcaagtgataagagaaatcaacacagtgctgaagctgaaatctaaatatggagttaattcactgagttggcctggaccctggcagaagatcacatggtcacctttaagataattttgttcatcactttgctgataattgatccagcctgccatgtgctctgtgatctaaaagttgaagtgattatttattttttagggaaaaatttagctactggaagatatatatgttcttttactctagtgttctagaaaatagtaggaggaagaagatgaaaagagagagatcgggggtagataaaatagctaggtaaagtagtgaggaagaagactctcctagaattaatgaaggccgtgtggacacagtgagtcaaatcaagttgtctcaagcccaaatatttttcaatacttattagaaaactgttctaatggcttcattttatattctgcaatgaaggctgaccctattacacagtgataagtgcttgagtccttcatttctgatctgcattcagagaccactctgtttttattaatatagaataattgtacatatttatgggatacatgtgatattttgatacatgtatacaatgtattaatgatcaaaccagggtaattggggtatccatcatctcaaatatttatcatttctttgtgttgaaaacatttgaaatcttctagctatcttgaaatatataacaaactataatcatcctactgtgctatcaagcactagaatgtattccttctaacttatttttgttcccgttaaccaacctctctgcctgccctgctccccactatgctttccagcctctgataaccatcattctactctctacctccatcagatcaacttttttagttcccacatatgaatgagaacatgcaatgtttgtctttctgtgcctggcttatttcaatttaatgtccccccagcctcagctatgctgctgcaaatgacagaatttcattcttttttgtgactgaatagtatttcattgtgtatatatatcatattttctttatccattcatccattggtggacacttaggttggttccatattttggctcttgtgaatagtgctgctttaaacaggcatacagatttctcttcaatctactgattccttttttttttttttgtgagagactacttttttgagaagtcatctgctcttttggaggttttattaataaccacttttacagtagagtagattgactgtgcattggtaagtagtgtcagactggtcatcaccccattcagtatattggtcgaatctgagggagaataaagagactgaggaatgcattgtttgccaaaccactttagcccagaatggatgagtagtatatctgtaccaagtgcaatgagataaaagattgtccatgtctgggatgccataaattgtagcccatgatgtcttttccccctatctaggaagaaaagacccatgaagtagtcagtaaaatcagtgtgcacagatatctctatatttggacaatgagttcatggactttatagccattttcttcatccacatcaattttatttggctaaatatctgtggaatatactgtaatattacaaagtcctatctttctgtagacaggagggatatcattactaaataagatggaaaatggtatagaaattgataaggagtaggggaagatattttttaactaagatgcagaatgaaatggttgacgaagtgggaaaatatctggagggttaaatgaactgcaacaatgcaatatctatttgaaatgctttttagttttgcaaaactaagcaaagccaaaaaagtaacttttttgcatcaagcacctcaccccacaactttcccagctgttaaaaaaagaggagaacaaagaaaagaaagaaaaagaaagctgcctggccctttttggttccagaaagcatgtaaacctggtttgtaactcaaagcgccctagggtgttttctttgcttccactttacctcatgatatgaccttgaacaaaccagctggctctgttgtcttgattttcttaaaataatatcttctttttctctagagtatatacttatgagcacatttaagttttctttattttaattactataactattaatagcagatgttgctgtgttaaattgaatttgttctgagaaagcctttgttgggcttggaactagaatgtaagctcttcgagggtagaggccatgtcttgctcatctttggaattgaggacttactacaatgcctggggtcatggcaggtcctcaagaagtgcttattgtactaaatccaactgtggtactactttgccttttcataacaatatagaattacaagaatattttttccagatttttacatttattttcatattagtttcctagatttttgtaaacattgaacaccagcattctttttttttctcagataaaatgatttgatacaggtcactcaattataggggaagctagaatctaggttttttattttttaaaaaaatcacttctggaccttctaaaatatatatttttttctattgctattcagcttctctccctaatcttctaacgtagattccatttctaccccttcacttttttaccacccctatttattgttctcttgtagattatcctccaattttccgtgaaaatagcaagctttgttcctctattgatatgtacgatgccaacgatcagtgatgaattctctattttcaaagctgtactggatttatatcttagcataatagactttagaagatgcaaagccagggaggcagaaaatacttagtgcctgctcaccgtgggttataatatactacctctggaggatttaaagtccactgtagaagaacaatcacacacaagttcacaaagcaacacatgaataatgtaagagaatccttgggccagctgtgttctgtggagacctgggcagctaaatggacatcctgaaggacactcattcaggggggtgtcctggggttagaggatagatgatgagttttgagtaggcttttcaaaagatgggagggatagaaaacggctgagaaatagatactgctgatacatagtagattctataatgccatcgtgccacatactgatacaggttcattttcctgcggattattcattaaccagtcttcaatgtgacatcttcacatgtggaataatctgacacttttagctggtatcactaaaaagtatgttttccttcagcatcaacttgggtaactcttggttgttccagtggctagttatctaattgctgacttatccaagctgtttctcctgtttcatcctccttttacttgatttttaaatgtacagtcatagtgggatgggggaagaaatgctgcaagtgatggtctttcatttattctaaaattgttacctatttgtttgtaaagaagttggtgaagtttaaaaagagttggccaaaatgagatgttggaattgattttggctttatcattcattagtatttcttgtcttagcataaaaaatggcaagttggctgttcatagagtcagagtatcattagaactccctgaggctggggtttgtgacttgtatcccttgctacacgtatagtccatagtaggtgctcataactgcaggtggaacaacagtatgactagacctagaagggagcttagaaatgcagaaactaagatctagaagggcattctcattagtgacagaagcaggactgatcccaggtctccttagctgtccactgtgctttccaccacaccacattgccagaggcaatggcagtgttagctgtatagagcccaacagccacgctggagactgtgcccagggacagtaaatcagaggcagctgggcaacagagggttcttgccaaatttgtaaaggttggttgtcagcaaaccagagcaacagaaccatttttgaaaatttccatttaaagtggaattttcaaaaccatgaactgccaccaggtcactgaagttgattttatgggaagccagggttccgcacagctggtagagcagactggtaatggtggctcaggctgaggatttcttcaggccagattgcctctgaccacaagtgcctaaaattactcactagggattgttctcctagtcatttcttagggcaaaaaaaaccccactttcctcttaggaccttttgactgacagagaaacttctagaggaacatttattcatctaatctttctgtaggctctgactgagaactagcgaagtaagccagagggtgtaggagtgattgctcaaggataaatagtgactcttgcagagaaatgatatttttatttcttcagaggcaataggcatatctaaagcactgtgaagatgtccaggtaagtttattaagttctgagggaaaagaagtagatgaggagcaaatgagaatcttggataaaggcctagaccttgatcatggaggattttatttgttttttgatattatagtggataatagcaaagcaaaattcataaggaggatcattttccagaaaaatatgtagcactgatttcttatgcaatacttgagaaaatatctctcagagaagattctgtatctaattctagtaaatgggccaaatgtaataagtaagcttgaagccgggtgactgctcagatctaattagatgagggcatgatggtagataacatggaggttaggtagtgtttatagacaggctgtccctagcaggcctggcattagttaactgcttgagagattctttagcaaagaggtaattgtagaatacatcgacaagcagagtttatagttgaaattaatggcatatttaattgtgtaagctatttgggccaaatggcttctttttatcttgtagttcttggatcctaacatacggtagcattacccccactctctcaaccacccttacttttttcctgtagtgaacacgtatactttattgtttgtggaacttgccacatgataaacattgtcaacagtgtcagtgaccataatcacagaacaaattgcttttccacttggtcaaatatgtaataaaatgattcatcccaagaactcttcttcatggtgacttggctgggtattgatctagttcctggatccaacctctaccttacctcaggccctaagttgaccaggtgggccctggatggccctgccgagctccagctctgggatggattcttctttgaacttgggaagattttgtcattcatgaaattggaaccatccttggaatgttagttttgaaagattatgtcttcccctaccagttagaaattaatgaagataaatctccaagtgcgatgaacttttaggaagaatagtattttgaaaaacaaaaatgttgcctacagactaaagtattttaaataatatcattcaaattaattggctgtacaagtatctgcatgcaacaattccccctccctcaccccaccccctcacccccccgccccgaggcagagtcttgctctgtcacccgggctggagtgtagtggcacaatcttggctcactgcaacttccgcctcctgggttcaagcagttctcctgcctcagcctcccaactagctgggattacagggacccgacaccacacccagctaatttttgtatttttagtagagacggagtttcaccatgttggccaggctggtctcgaattcctgacctcatggtccgccttccttggcctcccaaagtgctgctgggattacaggcttgagctaccacgctcagccaacattttaataaatactagtttttcacacagcagcttataaaatcattgtatttgcatggtaaattacagtttccataatattttcatactcttgactttgattctaactagattatctgtctctcctctgcatttccataaaactctacaaacttctatgctatgtttccttgtcttacaattctctgtgtatatttatcactttccccaccagacataagctgctcaaaggcagggaatcatatcttatttatttttttgtctctagaacctagtccaatgccaggttcattttatattatgatgttgcattgtatactacgtaaatatatgctgggctgtattctgtggaaaatgaggttgtttacactttgaagattttaaatatctatttggatttgttatatcacaaattcaaatgattaaaatccaaattgtggtctctttagttgctgttgatttcttggagaaaatgatttcaagtatactgagcttgtgctgtgtgttccctgtggtgaacctttgattatatttctgccatgtggcctgttagtttaaattgctctggttacaatgcaagaagaagtagttactcttcactgttgttggggggaaatttaatttgcttcaaaccagaattgttttactttaacatttgtatggattatggatccaaacatacatacactaaaacagacttaaggcaattaaaaacttctgtggttatttggattcagcttccccgacttgtcttcttatccagtctttttgccccttaactttaatttttttcttattactcaagtaatacagcttcactatgggaaaaatttttaacatataaatatcaggttctttccatgtctcacttttcttatctttggaatattgtttttgctttaacctggctttccttgtaattgcgagatggctgctgcagttctagtatcacatccagatgatgtaatatccagaggaaaaaggagtacatctctttctgtctatgctccttagaaataccttagaaataaggaatgctggctgggcgtgatggctcactcctgtaatcgcagcactttgggaggctgaggcaggtggttcacgaggtcagaagttgaagaccagcctggtcaagatggtgaaatcccatttctactaaaaatacaaaaattagctgggtgtggtggcaggcatctataatcccagttacttgggaggctgaggcagagaattgcttgaacctgggaggtggaggttgcagtgagctgagattgcgccattgcactccagcctggtgacagtgagactccgtctcaaacaaacaaacaaaaaggaatgctttccctaatgtcccatcttcatgtccagcaacatttgtcttccatcctattgatcctaatagtctttgccttcctaagcaatccattcctaaaccaataactggcaagaaaaataagattaccatgattggctctaggggttggcaaactttttcttaaagggcaagacagtaaatattttatgctttgcagtctatctggtctctgttgcaactattcaactctgctgtaatagcaacaatagacaataaataaataaataaataaatggatgtggctgtatttttgtaaaacttaatttacagaagcaggtggtaagcccatgggccatagtttgctaacccctggaaccttagaccagtaactctgaaacattagcatttgttagaatcaactggggacttgttaaaatacaagatcccatcctggttgctggttcagcatatttgggatagagccagtgaatttgcatttctaataatttcccaggtaatgctgaggctgtgaattcaagaacctcacttaaatatatttctctattgtggggctatcctgtgcattgtaggatgtttcacagcatccctggcctctacccactagatgccagtagccaccctgcctctcctctagtatgacgagaaaaaaaaaaaagtttgaaatattgccagatgttcccaaatgttccctaggggacaaactctctgatttctccctctcccttagacatagacttttcagatatattccctgggtctgggaagaggttcacttttccttgtagcatttggggaaggagtgtatacaaaatcactatgatgtaaagaaagagcgagaggaatgattgttggacaggcaaccagcagtgtctactgacaatcacatcataattcctgagaacaaaagacttcactgccaaaatgttccagaaaatggaacaagaatacccacctgctaacattttctgagactagaatctaatcgcaaaattgaagaaagtttagagtctggtgcaataaatacagagaggcggtcaattgataagtaaaatatcctatcaggtaaagcttcagttaaaggtgacatctgtatttgggtcttttagaatgtttttcatgcaaaggtagtaaaataatttttttacaaaatttataacattttgtaaaattctgttagtctttcaaaaagaacattaatagaatacaattggttttctattttacataagtgaaatatgacaaatctggtgaatttatggactttttttttggcttagggaggttttaaatcttggatagtgttggattccacttggactatttatatgggtaataaagccatggtggaaacctgtgcagttactctgagccattcctcacccttctttggctctgctctatatcttagagggatgcaggcatttctcaggatccacgtcagctgggaggcactgggaggagactccagggcagtaggaattttgaagtcggtgttgctccattgccctgtctgccttgggcagcatcttggccatggctgcatttcctccttggctccaaccacctttaaacaaacctggacccctgggctgtgatagctttgtctcctcccagtatccctccagcctgagggggtggtattggcttcctgctgttgctaatctctaaattagcccatcatccatcccgtcttacttctcagctccctcattacctactaaactccacatcaaagtccctcaattgtacatactcaaaatggtttgttttcttgattaaactcatgctgatgtgaaactgtcaaccccaactgtcttgtcatataaacctaaaagatttctatcttgttaagagatgttgtttttaaaataaagtgtaaattaagtatgtatatagattgtcagtagtaatttatattgtaatatatatcttgatggcttgatatcagatatcttgttagtgtctgattcctataaacataaaaagaagtttaaaagttggtaaattatttcacctggggacctattatagcctagtgacaaagaacactagttctgaagctgaactgcccaggttcaagtgggcccttccacttactagccttgtggccttgagcaaaagatctaacttctttgtacctcagatttctcatccataagatggtgataataaaggtaactattaggtctcaaagtgattgttgggaagattaagggaataatacactaaatgcactttgagaagtaattggcatatcataagtacccaataaatattagccatcatcgtcatcattgttgttacccttatattctagccataactgattgagccaggcagtcactttgaagaactatagcccctaaaaatgagttttctataggaaataagggtgaaaatgtacgtcaaagagaaaagtccatttgaatgtatcctcccccaaacacttcttttttccttctagtttgtttactgtgcatctggctacttcaaagcatacataaattaacacagagatgcataccttaatatctcataatagaggttattattttttttaaagcttgtgtgaatgtaaggacttcaattttaagagaataaggaaggctctcccaatcacatggatttgattagccagtggcaagtactggctcagctagaacttttagaagttcagaattagaagttcagttctgacttaactttcctactagttgttcttcagtgtcctgaagcaccacgattaagtaagtatagcattaggttgttcaccatagatatattattgaccataggcatttaatcatggaatagacgcagtgagcttctagaaggggttaactaattcattaaaatatgtgtgctgaccactagttgtgtggtgccattaggtggaatagccatcagaaatggggaagaagtatcatttgaaacttttgggttgtgtcatcttttgtttggtattgtttgttgggttttttggaagaagtgaaaggttttcagagagaaatgaaaagccagaaagtgttaaatatgacttactgagagggttaggacatataaagggaaggaaattgtatgtctcttgctacaaggaagtaggtagtttttcttgactctgctagaaattccagatctgtgaaataataatggttgtgggccattaaatatgaaagaggtgatgaaaggggaatattaaaattatagttgtgaacctttttttgaggtcaaagactccagtgggattctgaaaatgttgggctctttcctctagaaaaatgcataaaaacatgcaaaatgttagtttcagtttcaaggggtttaccaacacctggggcccattcttgggcccaggttataaacctctaagctaaaggaaaagctaggggttttaggaacatgccaatatatgtaattttattattcatttgggaagcaattgggagccactctagttttctgattgtggaattggcatggccatggtaattcttacatttcttatagaatacttctgttagtggctgatgtaaggtgcagtagagttaaaactaactgaaaaaagtaggcatttcaaatattcatctagataaatacaaaaaagcacattaagtgtaattttatttcagaatgaaaggtgttcttatcaagagctttgctctagtcaaaacaatcaggaatatttgttagcaatttgtttgtaatttttttttttacttgagaggtggtgccaggttttttgtttgtttttctttttatttcacataaatcagaacataactcattagagccagatattttattttctaactgtttgtgaaccttcatttagatactcttgacatgtctgcaaaacagtcaatatagtttgttctcccaaataggcaggagaagtaaatatgatgttagtgggtttttttttttttttttttagcaatttaaatatggtgcttttgttttccttgaacacaatttatatttgattgataatgttactttactgttcatttactgatagctgtcattcctgaaataaaaattagcaagcaagctaggcttaattcaaggtatggctatagaaagtagcaagcagttctgtcttttcaaggctgaatatttctttttttctttttcttccaactttaattttaggttcagggtgtacatgtgcagattttctacgtgggtaaattgtgtgtccctgaggtttggggtatgaatgatcccatcacccaggtagtgagcatagtacccgctaggtagtttttcaacccatgcctccttccctcccacctttagtagtccacagtatctatttttcccatctttgtgtccatgtgtcagtgtttagctcctgttgataaataagaacatatggtatttagttttctgttctaatttctaatttctgttctgtttctaattcacttaggataatggtctctagctacatccatgttgctgccaaggacattattttattgtttttttatggctgcatagtattccatggtgtatatgtgcaacattttctttgtacaatccattgttcaggggcacctgcattgattccatgtctttgctattgtgaatagcattgcagtgaatatatgggtaaatgtgttgtagaatgatatattttcctttgggtatatacccagtaatggaatagctgggttgaatggtagttcaactctcagttctttgagaaatctccaaactgctctccacagtggctgaactaatttacattttcaccaccagtatataagcgttccttttctccacacttttaaatactagccattctgactggtgtgacatggtatcttcattttggttttgatttgtgtatcagtgatgttgagtgtttttttatatatttgttggctgcaggtatttctgcttctgagaagtgtctgttcatgttctttgcccattttttaatgaggttgtttgttttttgcttgttgattaagttccttatagattctggatattagacctttgttggatgcatagtttgcaaatattttctgtctttttcaaaggatttcagaacattgggtatcaagcttgttgactttttgcctaatactgctaaactgatcaggaggaatcacagcattgttttcatatagcaatgctcagtaaggaggaaagtctcaataaaggttttaggtaagtggaaacaacttagagatatgaggaacagttgtaatgattaaaacattcttctacattcttatcagaagcttgaaattactagtgatagtcaaattcttatttcccagtgttaacaacagcagcagcagtaacaataaattatttattttgtgcaaggctctatactagtttctagcaatacagaagaaggataaagagggtttttatttgtaaggaacataaccattaaatgggggagaaagacgtgtcccctagagttaattacagtgcaagaaagcatagagtaagttttgaaatgaatagcgtaggtaataaataaatggcagaggaattctgatctgggagtagacattatgggcaagaatgtcttgtcaaagcttcacaaaggaagttctcatgatgggtgccccataggtttctgtcatgtatcttgacctaatgttaatcttatttttgtgttatcacttgcttaggtgtcattcttggcaattagttggtaagttgcttaggggcagggctggtgtgtatattgttcaactctaaatctttagcattgattcatagatgtatagcaatatatgttgaatgaatgtcatatggttaggctttgtgtccccacccaaatctcatcttgaattgtatttacccacatgttgagggagggacctggtgggaagtgattggatcatggaggcagtttctcatgatgttctcatgatagtgagttctcaggagagctgatggtttaaaagtgtttggcagttccccacccccagccccccacagccatgtaagaaatgccttgcttccccttcaccttctgccgtgattgtaagtttcctgaggcctccccagccatgtggaactgtgagtcaattaagcctcttttgtttataaattatccagtctcagggagttttctatagtagtgtgaaaatggactaagacagaatgaataagggatacatgaatgaagaggtggaacttgtatttaaccttgaaggaagggcacacaaggagataggaaggacttattggcagaaggaaaaatacaagttaatgtatggtagtgggaatactcagagtatggataggtgatgagtgatccaagtttgttttgatgaagaggctaatataggagagtagtataggttgacattggacaagataaacacttgcaagattgggaagacattgaatattgttattaaattactccatagcataggtaagacctataactttgacatgtatttctctataaaataagggtaggaaaaggtcagtgaagaaatacaactaaagaaaatgatatttcagaattaaattatgtaatatgatattatataatgttgcatgaacaaagcagtgtacaaatttacataaatatgcttatgtgatacaatgtgatgaatatgaaatacaatgtaaatttgtatacatgtccatatatgtgtaggtagttttagagagaattgtctgaaaaggtgtttcccaaaatattaatactgtaaaggctctctctaagtagtaaataattttaagtaatcttttatgccctttttaaatttagctgaagtctgtttctgtaacctaggggtgatttgtagaggatgctcttgtttggagtggagaggaagaaataaatatagggagatattttaagggcagaattgaaaggacatggggtcttaataaaggggataaaagtagaatttttaggtctgattttaaggtttcaagccaattggcataattaatagcaaattgggagggatgtcgtcctgtagtttgggacgtttttcatgggaaaattggcttattaatgtccacatcttgaactattatgtaaacacatatagcagcaactggactagtagttaacggtgtctctgatcgggtaaagattggagtaatcagagggtggtactaaagtgtgattttttttttctaccacagaactcaacattcatgaaaagtcagacagttactcaactctcacatattctttaggagaatgggaacatactgtttgttctcattttagagactgataaagcaagaattaggaaaatggagaaaaggacagttatgttcaggtgctcactgagtggcagagggagggccttcctgctggttgactaccatgttgccttggatgggggaacacatccatcactgctgctcctgtatcccactgtgattggttctctggttgcaactcttctcttattttttaatctgaatttaaaaaaggctttgtttccaaagtctgtcatggcctgttttttaggtttaactggtaacataggggagatgccatgaaggatggctcaaaataggaaatacagttgtataattgagacaaaaaaggatatcctggaaataatattatgttaggttagtaagttgtagagcttctaattatgcgggtattttctctcccctaattactaattttagaaagcatttctttcaatttaagagttagccttaaatttgtctcctgaaactatgttagaaaccacatatttccagttcagttgaaattatatggtattaaatctgtaactttccaggttctatagactggcagaaatgggtttaaaggattggtgcttcagtgattttcagaggaaaggtcctcctgttgttctggccattcataccttactatttctgtttctgggctattctgggatagaaatgggattgagtcctgtgaatgggaatcattttccatttactatgaatgggaatcattttccatttactatgaatgggaaatgggaactgtcctatgaatataagtatgttagttatgtctattttaagagtggattagtaaactagattctggatagaaatttttaaaaggggcaattttacattttaatctcatagcttgaataactcatgaattctaaatgaagaataaacaccttttctttggggggcggggggaatagctttaaaacagactgaaatgtttcataagtgtatcctgtcttgctataatttggtcctagaccttgagcagaaaatccttgtactctgtaaagaaaatagtgaccctgtatattgacctggcccaagatggaaaaacaaggaacccttcttggactttgtactcattacactcaaatctttgttctagtcactaagtcctttcataagtaaattttccggaactttctatgctgtaacttttgcttttttcacgtggctctgttcaatgataatggtgtctattttaccttagtgccttcactggcatatataccttgcctagaatcacctttttccttcaacagatctaatttaggttcttcaacctccaattagtcttttctaacaacttcagccttcattttttaatcccatcaaggtcatatctaggaaacattttgatgtttaccactgaattcagtatcacgtgatattttatatttgctttggtttaatagattcgagtttgatctcaacagattttttttttttgagccagaatctcactctattgcctgcttcagtgcagtggcgtgatcatgcctcactgcagctttgaattcctggactcaagcaatcctcccacctcagcctcctgagtagttgagactacatctacacgccatgcccagctaatttttatttatttatttattttctgtagagatagggtcttgctttgttacccaggctggtctcaaactccttgcctcaagtgattctcctacctttgactcccaaaatgttgggatttacagatgtgagccactgcgctgacctcaacagacctttactgagttttatcttcaagctttcaaagaattttctttttgagacacagtattgggaatatagtaaatgctaaataattctttggtattagtattaaggcaatgtggagaaaaagttctgaaatgtgacttattgagctgagacctaaatacttgttaatattgattgatctgaattgagatcatttttattcttctcttcctggcataagccacttaaatcaaattcagcagaagttatacatgttaatcaatagagtcagctcatgagtaatcaggaaaatctacaaaaaaggttacatcaaagtagatttctcaaaagcctcaagcagtctggatgaaaaaatatatattttatattatgtatacagcatatgtatatatttctgtgttgccagatgtagaatatgacctctctaatcaatacaaagttggaatcatagccatttaaaatattcttaatgttttaaagaaacagaacacatacttatttttcttgttgttgtggtttgtttttgtgtttgcttttttgttttttgttggttggtttttcaacagcattttgactgcagccaacaaacaggaaaaaagctcaacatcactggtcattagagaaatgcaagtcaaaaccacaatgagataccatctcatgccagtcagagtggtgattattaaaaagtcaataaacaacagatgctggcgaggttgtggagaaggaaaaaggaatgcttttacactgatggtaggagtgtaaattagttcaaccattgtggaagacagtgtggcaattcctcaaagatctagaggcagaaataccatttgactgagcaatcccattactgggtatatacccaaaggaatataactccttctgttataaagatacaagcatacatatattcattgcagcactattcacaacagcaaagacatggaatcagcgcaaatgcctgtcaatgatagcatggataaataaaatgttgtatatatacaccatagaatactatgcagccataaaaaggaatgagatcatttcctttgcagggacatggatggggctagaagccgttatcctcagcaaactaatgcaagaacagaaaaccaaacacctcatgttctcacttataagtgggagctgaacgatgagaacacatggacacattgttggggggcaacacacactgggacctgtcgtggggatagcggagggagagaatcaggaagaacagctaatgggtgctgggcttaataccttggtgatgggtttatctgtgcaacaaaccaccatggcacacatttatttacctatgtaacaaatctgcacatcccatgcatgtaccctggaacttaacataaaagtttttttttttttttttttgagatggagtctcgctctgttgcccaggctggagtgcagtggcgcgatctcggctcattgcaagctccgcctcccgggttcatgccattctcctgcctcagcctcccgagtagctgggactacaggcgcccgccaccacgcctggctaattttttgtatttttagtagagatggggtttcaccgtgttagccaggatggtctcgatctcctgacctcgtgatccacctgcctcggcttcccaaagtgctgggattacaggcctgagccactgcgcttggccaaaagttgttttaaaaaaaggcattttcctaataatgaggtttgagagaaatttttcttctgagtctttataaggtagacattgggtgatataatgaataacagccttgacaatagtaggccaaattatgacaagatatggtcaaattagttgacactcaaatccaaaattaaataattgattaggtgtgaaccttaagaaggctattggatcactttaaccaaattgttcatttttgccagttctttgctggaatggagatagctggtcacctcaattaaagaggaaaaaagatgaattcattcactgattgaatccagtgcctgatgactcatgagtagttaggtgtaattcttatgactacacaatggtgggttgaagcctgatttcctaactttggaaattaatctttcgtgtgttcttgttggcggtgtgggagtagggggaaagtagaaaaaccgaagcagcctccatcttccccaaaattcaggggcacaatttagccttattgttcaagaccctctgccagagttgagtctaaggcacagtttttttttccctcagtctaaacaatccaggctaaattcatttttcagcttacaatactgaaccctcttggaataaataggtgctgtgacagcttctcaaattcataacattcaagtgggctgtcaatggcctcctgatggatgtgtgggtcaggaacagccccagggaaatctcctcggagaggaagtactggaagtgagaagccagcagtcagacaatctcctgttcagttgtatcacagttgtgcttctgagaaaaagctgtaaagaaattaaatttgtttaaatcaaattgtattttcagtgcacttaagtagttgctaaacctaaatggatcctgttaagaattactctttaaagtgaataaatcccttcaaaattgtatcatttcatatttttacatattcagagatccttgctaacttttgggtatgtagattttaaggtataggtttatttcagcaatgagagatttgggggacaaagtcaaactcctattctttcctgacccaaactggaagtcagcttcttcttcttgttagtgttgttgtttggatagatgctaaaaaatcccaggattctttccagtaacttctctctgtaggcagcaagccagttgctgtttagaggtgaccctggtagccattcaggtgaaaaggggaattctcaggggaagtctttttttctaattctctacagctgcttcagaccagtgctgatacacagcaaatgaaacataattcattgtcctagccaataatgtctttcataagcacaagttgaatttgtgatttgttgggtagtgtcttaccccactggggtatcttcgtaatttgtatgtgctgaactaatgatgttttattttataaattggaattcaatgccagtatgaaggaaagcaaaaattctttctataaagttttgtgatattggaagtcctttgatcctcaccttgtgactactaaatgtcccctctaccctgtataatctggccaatctttactcttaaatagcattctttgtttaaagacgtaagcttaggattcattgtaattcgttggtttctccattttttaaactgtaatttgttccaaatgctatggggtttttccagataagctactggtttttatactctttccatgtaaattagctgaacagtaggcctcagtttggagaatattaattaagattatttagagatgttaaattccttatgcttctagtgtaatgatagctaactttatatagtatctaacagtttactaaaattcatcacatagatcacttaaattggcccctaaaaaactaaatctgtgaggcaagttaatattactttgctactttttacattagagaaacaggaggattgtctagaaaagtaaaatgatttgcctgaggtaaacagcacaattcaaactattgagtcaaaggcctgtgttctttgcatgatatcaagcaagctttaggcaggctttgctgctggaggaagagatctgggccatttctttctcccttgtaccctatgctcacattttggggcctctcatcccagtaattctgatgagaatggtcaggggatgtgtctgggtgactgccctttctgaactgtgttgttctcagccatcagggaacaccttatgcccaaactgagaaatgtaaggttgaggctcatagctctctttccacatgcccttcttgtctcttttaacataaaaagactgtctcaacttgatagcccactatcatagcctcttaatcacagggaaaataattatcaatatccgaggtgtgataggctataaattgtacatgaaatcagctttgtaaattataaaactgtgacagtgaaggaaattactaagtttctgaaaaaatagaaaatcaagacaaagccaaactctgatcccattttatggagagggctgtcactccagcttcaagctctcctcttctctccagccaactgtattcatgcttcctcatattaatttttttatgctacatctgtgtttccattttcttctgtgctgtccatctacttgcacacttggactagattcacttcccctttgcaagctcatgccttgtaggtaataagtggcatgtttcaaatcctctgtgctataggaacaaaatctcagaccagaagttctgagtttgatacccttattagccttccctgtaacttgacattttgcattttttcctcataaaagggggacttaggtgctctgcctgtttaatttgtaaagttgttgtgaatacttaatgagatagtgtaggtaatatccttaaaggaggatgttgatgtgaggggttagccctggttccagtactaacctcctgtgtgatttaaggcaagtcaccacatctctctgggccttagaacttttctgtttccttaacattaaaatatggggttaggattagatgattttgaaggtcttttcagattcaatcagttgaattcagatgagtatattgaatatttacagtgtcatgaactataaataagaacattgtccttgttctcaaaaaacatgtaatctaaggaaaagagatgtaaataaatgaccatagtgtgatatagtaaatttcttctgttctagccctgaaattctgattctgtgattgcaaaacttatctcctctcagtctcttccattttagagcttatttctgtccagaggaaagaaattcaccaagaaaagtagttttcatatgagggaatagagtttacttggtttttagcagagcattactggtgattgataatagctgtaagtggcgtgtttgtctgagacaccagataacattcaggacagacttcttttttttttttttttttttttgagatgaagtctcactctgtcacccaggctggagtgcaatggcatgatcttggctcactgcaacctccgcctcctggattcaagcaattctcctgcctcagcctcccgagtagctgggattataggcgtgcaccaccacgcctggctaactttttgtatttttagtagagatggggtttcgccatgttggccaggctggtctggaactcctgacttcaagtgatccactctccttggcctcctaaagtgctggaattacaggtgtgagccactgcacccggccaggacagacttctttaaacaaaaataaccacttatggcttttttttttttttttttttttgctgaaattgagttttctccagtaggtagaaggaaaacttggatatttaataacttatcaaagtagtgttgatgaccaagaccttccttgtgtactcatctctgttcaggcaatagctggtataaaactagagatataatctaaatattctgcatatcggtaaactaagaggagactgctcaacttaccattctcagattctgccagaatcaacttctgatataccagaagttttatggtggccagttccccaataatctgtgtaatctttcttaatattatttttgatcatcaaatcataacttttctgaagattgctaaacactattttctaaggtgtttttaggggaattaaaatgatggccacaggataaaaccctagagaactgaaacaaagaactctttcctgaagcttcacgtgctattgtgtgatatttcctatcactcatgaacgcttccactatgaagatggtattctatccccagaattaaaatttcttctccggatggtttgtgtgatacttgttattttatccaaattcagctctttatcacagtgttggatattgataccaagaatttaaacaaaaagtggctgtgtgaatcagttatttgtaagataataatcttgttcttattctctgaaaatggattcagatttctagtaaatggattctattagaggattccaatttgaactgtgacacctgtttaatttgttaagtgaactagaaagtgagttatttttaaaactagttgtaatccatacctctcttaacagatgctctcatcctcatatagtctattttagctacttcgaaggaagaaatacatgggtttagaggggccccttatccattcaaatccaaatttggacatttcaagaaaagatctgttttatacataacacatttacttaggtttgtagatttttctttatttgctgagttttaaaaagatcaatcttttttctttttcttttttgtttttttctgcctggtttgattttctttttatttgtgtgttttaacagagaagctttacatgagaatatcaatgccaggaccaaagctgtcatgtccctttttgtttaattctcatctgtattagaattatacatggatatcaactatcttttggctagttttatagttgaaaatcacttcaaagatagtcattaagaattatctcataactgtgaaaaatgtcactatctcacaaatgtttattaaccccagtttcagttgctcattgagccaaatttcttcctccattaaggttcatgcagcacctaacactccagtgggtgctcaatttgtactctttgaagagattgaataaacatatattttattttttctcagggtaaattgatcttagcttctattctattaataagaaataaactttattactttcccagaatgcatagtttctttcattgaagtcataagcataattaatctgaaaataagtaacaactttgtggaagttaattttctagctccgtggagttctttcaaagcggtgtggacagtgacagaacatgggctttgttgggtagccagtcctgggtttgaatcttgctgcatgactgtggacagtcagcatcttaaaccaccagtttcgtcacagccaaagtagatctaatagccccactgcacagtttcattatagagaccatatgaaggaactcatgcttggcctatagtaggtcctacctaggaagtatggggagagggatcattgtgtatattggagagaatgccccacaaggggtagccagggagtattcttagaatagttatttcctggaaactggatgaagacactgggaggtataactccaaacaaaataccacacaaaaatacatttaatgaattctaagacattaattttagagcacactattgattagataacttttgaggataaaaagcaaagctaccacattaaatgtggcgtatcctgatttgaaaaccattaaagtgtttatcaaaaatgggtgtatgggtgggagaggtgcctaacaagcaaagggcattatggaattaaggaaatctattattggctctgcctcacaactggtattctaggtactagctctacttctaagagaatgttctgctagtaatattaagctaatatgctacccttctaggatgtaccaaatgggatttaattcagttcaattgaacaaatatttgttgagccctactgtgtgttaggccctatgctctatgctggggacacagtagtaaataagacaagacacagtccctgtcttcacagagcttacatgtattaagcaagtcattccaaatgtgatggatataatagaaggggacacacagggtgctttgagagagaagatgtggagattatgacacatactttggtaaataatgtaagtattttatatacaaaatcaatcccatgaagaggtactgaaattattgggattgtataaactagagatgaagaggccaaagggagtgttattattgtcttcaggtatatgacattttttgaattttattttgctttattaaaggatatgttgggctgggtgtggtggctcatgcctgttatctcagcactttgggaggctaaggtgggtggatcacttgaagccaggggtttgagaccagcctggccaacatgttgaaactctgtctctactaaaaatacaaaaaaaattagctgggcgtggtggcgaatgcctataatcccagctactcaggagactgaggcatgagaattgcttgaacctgggaggtggaggctacagtgagccaagatcgcaccactgcactccagcctgggtgacaaagcaagattccacctcgaaaaaaaaaacaaaaaaaaaacaaaaaaaaaacttggttgagtgtttagccagggaataataaataataataataatgttaacctttattgcatgcttcctatgtgctagccaccgtgacaaatacattttaagttgtatctcatttaatcttcaagccacgtaattacttgtctcttacaaaggagaaaactgaagcttaaagacgtcgaggacctcctgggattaaattaccagagcccagattcagtttaatcacttatgatgaggacgatctctgtttttccatacctgtcacagattttttaatgtttagagttcatgattactgaagtggttacaaactcaaatgactagagggccaggcaggtaacacagatgtagatgggaaacaataaggagtaatgtgcaggacttgaatgttgttctgaaccaaaggcattcaaacattcaaatgcaggtttacttaaaagagggacaaacaaaggaatctgtgggcccttcaccccaggagatcagttgttggggaggagtcatttataggtatttctcatactcacttaacctgatagccgtttgtatagcacttatcatctagtataggagtgagtgtgtgtgtgtgtgtgtgtgtgtgtgtgtgtgtgtgtgtgtgtatgtgttgaagggtacagtatggcacagtggaaaatgcttgggctttgtaggttttaaagatacctggtttgaatcttggcattgctgtgtgattttcaccaagttgcttaacccctctgctcttagtcttcttcttctttcttctttcttctttttcagatgaagtctcactctgttgcctaggctggagtgcagtggtgcattcttggctcactgcagcctccacctcccaggttcaagtgattcttgtcccttagcctcctgagtagctgagattacaggcatgagccactatgcccggctaatttttgtatttttagtagagacagggttttgccatgttggccaggctggtctcaaactcctgacctcaagtgatcgcctgccttggcctcccaaagtgctgggattccagctgtgaaccaccgcgcctggcctatttttgttgtgagactgttggttccttgcaggtagctcttaaacacatgtatccccgtcactcagcacacacttgatgtggcacactacttttgccaatttagtcacacacaaatctgaaattcttttcagtaagtaatgatagccatcaaaaagcttgaggtaaatgagaatgagtgacttgccccaaacctctctccctgattctaatgaaagtacgtctcatacctaattttgtcacatatgaagacatttattaaataaacatttataagcatgggacaattcatatggcttattctgcaggctgggtgaaggcccagctgtcctttaggtagtagactaccacctttctggaaaggttccactggggcggattggacaataatccaaggcagtgtctttttcccctcgtaatggacgtcaagtagctagaaatctgcttcccaaagtcaagacacaggaacatttaggtttacaccttggaccccatcccatgagtgtcttgctggaattcgtgtaccctgttcatgcagaggagggtctgagtataaaaatattcagtcaatccacatgtctttaataccattaatttttgccagtgaaccaattctaatatctataatgctgactatcaaacttctgatcatcaaacttcattaatcaaaatccatttctgacatttattatggaatgaaaaagtctccagtgttgctggagatactagtagcctaagtccttgtggtagcccctctggcttgtgggttttgctgctgatgagaaggataactgttttgagcacaatctcactgactctagaccgatggatctcaacccagggtgattttgcccccagggagacatttgacaatgtccggagacattttttggttgtcacaactggtaatgagagatgctattggcatctagtgtgtagagtacaggggtgcagataaacttcatatagtacctggggcagccccaacaacaacaaattatctggccccaaatgtcattaacgaggaggatgagaaaccctgctctagagtgcacttaaaactgacgcacatgcttgcatgatatgactctgtgatgatgtattttaaagttaaattacagacttcataacacttgcagtaaactcagcagtaaagacttgaatgaatttaggaattcattgtaatataatacatgtggaaggtatggatttagagcccagttatttacaacctgtggtaaacccaatgaataacatagcctgcaaaaacttttcaaaaatgggaggctttggtcttgtttacctggagtatagggagggacttcccttacccaagtagtggtcctataaattaccatcttaatggatactcttggctactgagtcatcagaattttaaatttactttagtattacaaacattcattgaatgcctgctgtgagccagaggctgtaggagggtacaacaaacaataaaatagtctctgacctgggggagtttatagcacagtagaaatcatgcataacatatcttcaccaaggcaacttccaattacaatgttccaatagcctgtgattgtaaaaataacctacagtttaccctagtttcactccatgtgaaaccaggcagctctcctcattgccttttgtattatttccatgtggtctgagccatatagacatttacatattttgccaaagaactaccagatagtagtggtgtaactattttatctaaaaaagcaaaaatacataaaaactacaaatactgaagagaagtaggccctctgaaaaaactagatgttttaaaagaggattcatagaaaagcctcaacaatttcactctattgtgaaaatgtcactttcacctcttaaactctggaaccaaggaaatgattggcagtgtcaccagcattgttggggtctccagcctccctttttgcctttttgggagcatgccctacctgatcacgtgtaataatgtgtcttagcacttgctaccttagctaaaggaatgctcttaggacaccgccaactgcccatctatccatcatttcccttcactggagatggcactcgaggcagtgtgggtggttgcataattactgacatgtctgcatgtaggaatgtggcctgaaacattctaaacttagaaactattcagatcagaccttgtagatgttgtttttggagagtgataactgtggcattctccagggcttgtaaaatgagctctgacattgccaaccatagattccagctttaatagcgatctgttcaatgagtaaccatagtccggagaacattcattcttctttttacaacctgattccatcaattattattttttaaattggggtttcacttggctataggaagataattttatggaaaggggtaaaaatttggtcagccagggggaaaaaaaggtaaaaatagtaagcaggcttgagatcagttgtatttttaactttatattagccaagcattggagttcgtttcctttcaactgattaagttacatgtctatatggtgaataaactttgcagaaatagcaaaatttgtctctatgtcactaataaatgatttattgtctctctcagagtcatacttatatatattataaagaaatgtctcagaaataatttgtttttctaaaaccggttttatgtgaattctcaaggcattttgcaagtgtggattggtgtccgggataattgtaatcatagaccagaaaaaccattgtgacttccaagagtcacatgatcataccttagtgtttcgaaggatcaggtggtttagctcattaggaggtctctttttatgaagacaaatcatttttacaactgaagttttttactgactgggtacacttttgcagttgccttaatggctacccaaaatgatactatgattaaaaatgtattctgggccaggcgtggtggctctcgcctgtaatcccagcactttgagaggccgaggtgggcagatcatgaggtcaggagttcgaaaccagcctgatcaacatggtgaaactctgtctctattaaaactacaaaaaattagctaggcgtggtggtgggcacctgtaatcccagctcctcaggaggctgaggcaggagaatcacttgaacctggaaggcgggggttgcagtgagctgaaattgtgacattgcattccagcctgggtgacagagcaagactccatctcaaaaaaaaaaaaaagtattctgatcctggttttggtttacaaatttaagctaaatgcatgttaaaggggagtctcaggttttctttacaatatgaagtgcaatagaatgaaatccagttcactgtcctattaatacaaaataatataatagcaaaaacagctaagaattagattcttgctatgccttcaaagtaaaagcctcagatttctcttttatctagtcataagttcagcacagaggtaatgaatgcatgtaggtaatgaatgaattagttataagcttgctacccaaatgcttcttacatgcctgtctggcatttaaaccatctccatgccgtttctttttcatttgagccctatttcattgtttttggtaaaagaacaattcttttggatacaaattggatcatttcatccaaagtaaaagcttagccctggtaaaatcttttcttttttccttattgcaaagcctttgccatgttggaattgcagcaaatgccatcacaaacaacattgttgggagggaagtatgccctatttcttgtctgcttccagttctctcctagactgagagtgcgcctttccaaccaaagggctgccatctgaagaataaattcatttcaacagtcattagagctgtctgtttggtgtttaggaagctctggctaaaggtgaactggagcaattttttaaaaagtagatgacagatatattgaagtaggtctgttgtttccatgtgacatcacttgggttccattcaaattgggagcctgacagtgcctgattcagtgtgtccaggatttaagaagcagaaaaaatatagttgcactatatctttaggtggactgactttgaagctcatcaattcacccagcatttatgggacacccaatgtgtacctcgtactggaaaattgtgggcatgttggggtcttatcagctgatatttttacactggaattttctgggctttttgagcttgagttttgattttctatggctttttgtggtgaacttcagaaacattttattcaaatcaccaaattttctaacattttcagtaaggtataaaagaagaacaagcaatgtctggctccccaagtaacaagcctcagaggatttctagagaacaagtcataccaggcaaagttgtatgtctgtgtgcttgttttaatagtattgctaaaggagtggataaagggaaatccaacgttgagtaacttacaagcttttcatcaagctttgaaacttgattaaacttagctgcaaaatgaacactgttttcactgagtgaccacagagtgagggtcagggtacggtgcagggtgatcagctatcctgcctaactttgggaggtagtagttggtagactgcctcaaacagaagagtcttcctttttcaatgtcattattaatctaatagaaaaagcagaattttcctggtgttactaaattgaaatgagccctaaactatagaaaattttaagaaatagtaaccaggagcccaaccaattagaaatgaacagcagggatgttcactagcttttaccgagtattgttttataggtgagaaaactaagtttgagggaggtaaggtaactagccaaaagttctacaactaataagtagcatcaccagtagtcatagttagatgtggttgactccagtcacatggttattccatcatccttaaggtaattaagccctagtttcaatatgatatggccattaatatatcaaaattgttgcctaagtaaagatgcctttgtgtttatgtatttaccttacaggaattatacttgcaaagtatcttttattcgcttactattttcacagctttattgagatatcatttacatatattacaattcagtcatttaaagagtataattcaatgatttttagttattcacaggattgtgccacaattaccatagtctaattttagaacattttaacccctcctaaaagaaaccaaacccccattagctgtcacttcccattcctcctatttaccacccacccccagccctaagcaactattaatctactttctgtgtttatagatttacctattctgggtattttatataaatggaatcatacaatatgttttcctttgtcataggcttcttttgtttagcataacatcttcaagattcacccattttgtagcgtgtataagtacttggtttctttttatggctgaataatattccattatatgaatatgccacaatttgtttatccatgtgtctgttgatggacatttgagttgtttctactttttggctattataagtaatgctgctataactattcgtgagcaggtttttaaatggacatatattttcatttctcttgggtgtatacctagaagtggaatttctaggtcatatggtaactctatgtttaactttttgaggagctgccagcctatttaacacagcagctgtactgtattacatttccatcagcaatgtacgtgggttccaatttctccacatccttgccagcacttgttattgtccatctttttactcctctcatttaattttcataatcctatgaattagccaaagaaaaatattcataatgctattttatagataaaacccccatgtcaacaagaatcctattatgtgtgcaaatagaggggaagaagtggcatggataattcaaaacaacacatcatccaaaagtagtttaaaactttttgaatcagacacttacagctatgttggatgttagagatcatgtttcctacattttaaaggtgatgaaactagagcccagaaaagggaagtaaattgatgaacactgacataaagctgcttggtagcaaagtcaggactagaagctctgtctccttggttcccaggacattgcctgttccagcacagcctattgcattcttccctaggggatgtataaattcatccatatcataggaatgtcgttttcttaactcattcatctatgctgaccttttattacaacaaatctatctggtttattgtaataaatttcaggtattgggagattagcgaagctgaaacctgcaattggggagctcctgatagaattagtttcacatattgcacatgatgagactgatatgcaggcagaaggttaatgcaggcagtgcttcatagtgacgtttcttgggtcagattgcttgtatatgaattctggctctactgcttactgtttgacactttctgtactctggtcttatttttaaaatgggagcaataatagtatatacctcacagtattgtttttataattaagtgagattatttctgtaaagaggttagcacagcccctggctcctagatacccttcaataaatgttgacaattattatcacaaaacattaacctgctcagaccactgaaaatgttgtaatgtgagattttatagaaaataaatgaatcatccccttgaaaaaagtagcttcactaaaggagcaggcctagaaaatgtctgttttctaaaatcttcatatttttgagctatatggaaaataataaaattctctttgttaagaaaaaaaccttagtatgttaacttcccattcttacaagttatgaactaatttcctttataatgtaactttgggcagtaccacacaactttgtgcagaaaccagccaatttgaattgacctcatgtttaaagctgcgacagtaggaaagcataactaaagcacatatgcctatcgtggatgtaatgtattagtagtgttcttccttagtgtctttgcttaaatatcaagatgaaaattcactggattattttatggggctgaatgtataatttgtatattggtttatattatggggctgaatatataatttgtatattggtgtagaagaaagggcacccagtaggaaatcagaagacaggattagaatcctagcccttatcttcccttattcatgaccacaggcagtgtgttcagatgcctgtaagcttctgtttcctcatcgggaagtggggggacagggggtcagcagttcctatctcagagggttgtcatgaggaccacatgataatctgggtatgacagccttgcacacagtgcctggcccacagtcagtcctcaggaaatgacagctaaacagcaatgtagtgtttaggcagtggtagtgccacacatgaaatatggaggcagattcaatggtaagtttaggtgaagaaattggacatgtccgtgttcacatagtatgatgattcatgtctactctgctgttgctgctgctgctttcctgtaaccaattttagagcctatcttggcagctggaagtatttgggattaatttcacactcactttatgagttgagcgttttcctgcaagcagctccctgggcctctgcctcattactttggcatcaactgatatgtcagttggacagagatgtcctttggggtctccattttatttggaaaccttcaatttgaaaaaacaaaacaaaggccatcaacacattgtgcttgaaatcgttagcatttattgtttcctaaacccctccctttctgtagttctgttgaacactagggaacacacatcttgctcagccagtgatgcacccttaaaaatcgctctccctcaaatttaagtcctagcagctggttggcctcatttctcagttccaggtgagcagcgagatcttctaggccttggtctcagagatctgaatcttgatgggtgtagtttttccagtctttttactatgttaattctgttaaattcatttggctcttgtggggaacacagtaaacttggctgttacgtgtaaaactaaattgagaacatggagagctgtttagtatttcatgctggccagtaggtcaggaagattttccttgggggtaatttacataaggaattgtttatcccatttctttccagtttctgtgaccatttggggatagcagactccttccacaatggcacaggaatatatccaatgagactgagacttagacgatgcttctgtccgattgatatattttgggccttgctcaggaaagatcctgtggcttggactgctgtctcactgagaagtcattcttccataacagctgtgtttagcaagttgggtgggtccatgaactgacatgttgttgcacttagtgaggatttttcccttgatagtgaggaacgtgtgtaaaagcatcctttaagtccagaaaatgccccaaatatttgttatgatctgatagctgcttagagtgcagcctccattaagtaacacccacactcagaatactctgtggctccccagtgcctacagagttaagtgaatgctttcactgtgacattttggttcctctacaacagtgcccagcctacctttttaatgtcatcaaacactgtccctaaactggacttattcaatatctattctttttttttttgagatggagtctcactctgtcaccaggctggagtgcagtggcacaatctcggctcactgcaacctccgactccctggttcaagtgattctcctgcctcagcctcccgagtactgggattacaggcacgtgccaccatgcccagctactttttgtatttttagtaaagatgggttttcaacatgttggccaggctgctctcgaatgcctgaccttgtgatctgcccgcctcggcctcccaaagtgctgggattacaggtgtgagtcacacgcccagccttcaatatctattctttaggacacatttcagatacctcttctcattggtgtgctagtaaatagctctctggggaagaaggggaagggtaggaagcctgattttgtaacatttgtggattttcatgtagtaaatacttccaccatggctgatttcaggctaccaatgtgaggtccctgaatgcaaagttgggaagaaatgtaaaccgtagcccattgcaaagtgtttccaacatatggatacaataggcataaataacctcaagaaactagataatagtaggaagtaatgaatgttgagtatttattacctttgttttaaatgtaatttatttagttttaagtttatgtgatttaattgttagtaatggccatgtgtgacagctggcttgcaaaatttctgaaaactgaacaataggttctttctcctgatgtgggaggagctgactgagctagttctggcataccactgcttctttctctacctcttccttcctaaggccccctacactcagctagtagtagtatgcccatctctgaacctacaacatgcttaaggtctcaaacaaaatttagagtgagacacactccagagtttgaatcctgttctttcatctactaggtgatggtcaggctgactacttattttgtggatcccagtgcaaaatgaaaatgaggggcccttgttcaaaatgcaggaagaaagcgctgttaaaaccactaaaataaaaagctttttcttttcttcagtactctctctttcacagcttctgatggtattttcttattttctttttagtagctttctaagtaagaaaaaaactaaaatttcaaataagtagcatgaattttaccattaatcgttacattaattcagttttaaatgcaagtatgagcatttaactcatgagtgcacatgactcctctgcgcatgtgcatgctccattgccctatcaattttacttacaaaacgcaagctcaaaaataaaattactaagaatttcaaggcagagacagcagagcgttaaacaagttcaggcccgtcaaagctcgagcacagtttgcacaccctgcgtacagtcctgggcaaataccttatatttgctgagccgcagagttctcatctgtgaaagaaaatatcaactaagtcgcaggggagatgtgaggattgaaggcactgatacctgtatggcacagggcagaatgcttggcatgcggcctatgttcaattaattggagggatagttattcacataataatcgcaatgttagtggaattctcctttatagcctatagagtcttccttatgtggtcaatatttgcctccttgactgattttcctattacaaactctttgaaggtggagattagatctgtcaccattgaattccctacaatacttcccgcaaattcttgcacatatctggcattcagtgggtgtttatgaccttgatccttgtatgatttggactttttgacaataagcatctgtgtcataatgtgatggccccacaatgaggcttaattggtaacattcacaggaagaaaaagagtataaactcagactttaacaggagtccgttgtaatcatggtgggggtgggggaggaacacgattccaggtgttttggtttaaggaaagtgggctctttccatcttttcgaggggacttcttgaagtaatggggaagggatgagttccaagctccgtttgagtaaaagaggccccagggatgttaactctggcccacagtaatccgtccctttgctaacttctttcacacttactttctgttctgcacaattaggacattattatagtaatgtttcttcccactaattggctgtgtatgtatgttttctttccaacaaattataagatcctgtggactgtaagatattgtgtagttcttttgaatgtaattggggagtagcacagtactaggcacatagcaagcaatgcactttacattatgctactcttcgtttaaacttccatgcctccctgtagagctaaatgtgaattgtcattgccttttataactcctgcaagccctcagcgaagtggcaaagaatcttggtcgccccagcaatttcaggcaaggaccttcagttgctctgcctacatctcttttccagtatctccgagacactctgagggctgtttctgtacagcccctctcccaacatggaatttgggagaccacacagctgtacattgtacttgtttgaatgatgattttttaaaaagccctttgggcccgtgtcaataaaccgtgaaatatcaccaaatggatcatctgcaccagacttctgaaactcatctgaactccagtcccccagctggtgggggcttgtagaaaggagctcatatggccctggcttttgctaatgctgttctggggactgtcagacgccttgagcctctgcggcagtcagttcattacttttaatgagcacaaaattcaccaagacattaaactaaaataaaacaccaatgggaagttttggatgtttcatccaattgttgctttagttcttttttccacagaattattcaaaaagatgaaaaaaagtcaattctactcactcctgccaattttatcctaagtagatttggcattgtaaagttaacacaccctgaactttttttttttttttctttcaggtccctgtgggctggtgcctgatatttgtgttaaaaatgacattactcaactggtcaaatgtttgaacattatctaccttttagatataataaagaaatattagatatctcaataccatgtagcatctaaagactaatattagaggaaagcgatgttctgaaaaaagtgtaatgaagttattttgaactacaaggcaaatgcaattattcttctgagaatgttttaattgattaatttatgtggctggtaataaagactgtgataactttattagaggttacttatattaccatatattgaagaaagtcaatagatggcaaagcagacactgaacactgtccctgctaagcttattttgtggatattttccacttctggccatatggatttggaattactgtgggcatttttttttaaagaaggaagtgagcagatgaatgataactcttttattacttaacatagcttgtgtttgtggaagacaaagttcatcaagttgtcttgaagaaaaacaaaagtgtgccagacataatttgttgagggctcaataattgtgaaattatccctaaccgaagtttgtaatatctgcaggtaattgctctagcagatgcagtggaggaaaaccaaggcaatctgttccagtcattcaccaggctgaagagtgccacccatttggtgattctgctgatcgcgctgtggcagaagcttagtgctgaccaggttgctattctggaagcggcatttctgccgctacaagaagacactcaagaattggtaaggacctgaaagcctgtggtgggaacagccagcattattgaagtttcggctttaggaagatatcacatggctatcaggttttctaaggtatcaaataagggtttgattttttacaaaaatgctgctttccttgtctttaaaccataataaaaatgtcaaacaaaggcctttttctgtagagctattttaagaataggtatatagtcaatttttatgtggtccagtctactttttatgtgttcttcaatcacttagaagccagggaaacagtcatttgacagtctagatgacagcagtaaccttcagattagctaatcctttccttttccgccagagaaaacacttcggccattttaatttgctcaaccttcttaaatttaagtgtcacttcaaaggttagagagaatggagatagccttgctataactgatgtgaatagttccttacatttatagagttctttatgtgtagtttataaactcttttaccctcagtcctagcataggcagtttagaatgaaaagagaaaaaatgagggtagtatttggcattttcaggaaaggattatttaacttaaaacctctgagatcctttgaattgtagagatatatatgaccaccacgggccgttctgggggactttttgtgtgcttttatttacaaaagaaaatacaaatctcggaaattagagaccgttgaacttagttcttcgtattggatgaaaacatttcaaggggaaatcatttcaaatccattttaaaacctagatttgagaactaaaaatagtaatattaaaatgaacaatttttttgagtggttattaggtaccaggtgttaagtgttttgtaagaattatttactcttaaacatgggccagtgaggtagttaaagtactgtttccatccctgttttacctatgggaaaatttaggctttaagagttaagtacttttcttaactctttctgtctgcctatattttagtgaacaggatcatgaatgtaattttgaaaaccacagttttatcagctgaattgaatattctacagttaggtcagaggattgccagatttttttttaaaaaagaagctatattttatgtgctaaccaaactattaataagtaaattggaaaaagttagaatacacatttttgtttagtggtgaatgatatattataaggtgattgacaaaattgcgactaaaattgacctttgagaaactagaaatggagacacaactgtaatactagaaaataaataatggttaggattatattaataagaatgatagctgtcacttatgaactcagatttagtagtcaaacaggtttgggtgacttcagttattggttccaccacttggtgacaaaatcactgtggttcagtttcttaactgttctaaatctctcttctgtagctgtaagatggaaacaatagtaggacctacccagtaagttgtaatagggattaaatgagataattacatagagtgctaaagattagcaatcattactggaagtgatttgtacattttatgtatattatttattgtcctcactaaagttatgcaagatcagtttttttgtttgtttgtttgtttgttttttcgttttgagatggagtcttgctctgttgcccagactggagtgcaatggtgtgatctcagctcactgcaacctctgcctcctgggttcaagcgaatctcctgcctcagcctccagagtagctgggattacaggtgcgtgccaccatgcctaactaattttttttgtatttttcatagagacagagtttcactgtgttggccaggctggtcttgaactcttgacctcaagtgatccttctgcctcggcctcccaaagtgctgggattacaaggcgtgaactatcacatctggcccagtcttagtaactttcatggttatttgtccatcttcacaactacacttaagaatgataatatcttattcctttttatatcctcagtacctggcacagtgcctgagcacagagcagtcagtatttgtcgggtagatgaatgaaggaaagggtgaaaactaacaaatggtgacctcaaagaatagatgcagtggatgtaatctggagcatgaggaagcgggtcagggccagctacataatttgcaaggcctagtgcataatgaatacttgaacttccttgttcaaaaagtaggggaagaggtgataaagtgctgttaaaacacgtactaaaagcaaagcttttttccttctgcagcatctctcctgacttgtcatggcgttttttatttgctattttatgttctaagtaagaaaaataaaaaatttaaattgttagtgtgaattttaccattggtctttgtaatgtgcagtgcctctttgaaatacaaatatgactgcattagactcatatgcagaatcaacaaaattacacaatttatattttgtagcttgtacttacacatatattttgttcttatagaactgtggaatcaccagacttaactttttatttcatttcttgatatgtgcctatcttccagtgctctctaccttcagcttactgatgagaaaggaaggactgaaaggaaaaggaactatgtatcactctttttctttccttctatgttatcattttcactgtaagtgattaggtaatacaggggaagtaacaggagtaagaaaagatacaatgggcttcttcggtcattcctgttgctttgaactctgttgccttccttctttattcaaaatatgtctggttctcatggaaagcctctcagggctaccagtgtccccacttaatcagtctagacataacatgccttccttgtagttgctttgagtctccctgaacccctactcatcatggggccacaggaattcagagctcatggggctacatgtgaatgagacagaaaggagaaagggggcatgcatactgcatatatcttccctttttatacacgtgcttcattgctccatcagagttcacttaggaaacacaaattcagaggtaaaattattaaaaatttcaagatggtgacaacaaaacattaagccaggcagggctggcaggttgtccttctgagcatgagcccctttgtgactgcagagcttgaatgctcatgaagctggccctgaagcatggttagactcaaaggaagactttcctagaaataaatgttctaaatgtaggaattggtacccagaagagattgtggtatttcttacttgagagatctttaaaaagtcttatttatctgggaatatgtaagcatgcttatccctgtaggcaggtgaatggacttagtctctcctgaaagcccctttctaccctgcctgtacattctctgctgtcatagcccccaaaacatgtagaagaaaattctttcaactctcttctgaattcggtgagattagaaggtatgtatactcattatgtctttggagtcattaatgagacaaaacatttgataaaaacataacttggagaagaatgaatcaaaaaagacattttaatactgcttgttatgctcttcatctttaattaggttgtggtattcacttcggacttatactgttgagacagcttatacatcttgagaaaaaaggaaacctttttcattctttaagacatacgcatgcagtatgtggttttgacatgctagttcacaatcccccacattatgcctttagacctcacaaataaatgttatgtgatgggtatcccactgagttgtgaaaatgaaatatgcaaacctgaaataacttggaagaagggtgaggcagggaagaaaggactctcttaccagaatgttgaaaatatatcccatattgaagttattatgataccacaaaaatctgaatgtaatttagatggtttggttgagggtggatggcagagtacatgtgtgagagggaaaactttagacatgtggacgacattttcagaagagcctctcagctcaaggtcacatgtccccacaagtattgagaggtaaaagaaagtgctcagaagatgttttgtttatgtttcagacagcactgtgtaatgatttgttgttattttgatggtatgtgttaaaaggcagcctaaatgcaatagccaaccgtggagtgttttctccctaatgacatcaggttcacaatgcaaaaatatttagaatgtgctattgctgatgaaaagtaatgttctccacactatattgtcagtattttgtttaaaatgccatttcatttggagcagaattaatcgttgtctgtgatctgtctctttaatgatgcctttccatttttgtcactcctcaatactattttggggcaaataaatgctggtatatgtaaatttttaaaagtgctcaaagttatatgggccagatgtgtttttgtggggataccccttttcatgacagaagaacattaagtattctatttggtgtctcctaaaaaagctcttacacttggttccgtttgataacctagtattgtctctaccatcttcctgtgatgataaagaagtgtcacccaaaataatgttctagcagagtatcagattgggcaattttaaaataaattgttttcatatctttcaggttaggggctggagatatttcagggtatttgaattctcaatgcagaatttaaacatgtctcgattgaccctctgtctgcttgaagttctatggaaaatactttatctgctaagctcagtgagggctgtgttactggtttgagtctgagagagtgttgaattgtggtattatacacatctccctctaatcatgctgcacagaagccaaaagatgcaaaaccatccatacttcaggatggcctgataggacaaatctctttactcatttattcattcaatgaagatcttagcacatactatgtcttaggcagtgttctaggcacatagcatacctcactaagcaaaacagacttagagccaatcctttgtggatttactttaacattgcaagcaaacattctagtcctgtgctgcctaatatggtagccccttgtcatgtgaatttaaataaaaagaaataagaacacactggctgtatttcagctacccaatagccacatgtgaatgagtggctaccacattggatagcccagatataggacatttccgttattgcagaaagttctgttgcatagcactatcagtcgtcaagagaaaaaacatcttatcagttgagttgaccacctcagcacattttaacacactaatgaaattagggtaggatactgacattaagttataccatggtgtttgcatttgcagtacctatttgtgatatcctaggttcagcctgttcagatgtgcaataaccagacacttttaggaacaagaaacttctctggggagatgtatgcatataagagaggcaagaagctggcacaagtgatgctgttcctattcccccatgtggccttggtaaacattgtaaccatgattaatttttttctgttgagcctgcacgtggtctcagaatccttttgaatacagcattctaggtggtcactgtcacttagagttggtatgtagatgaatcctctttgcccttcctgatctctgtacaaatctccttctcattatcttagtaaacagcttaaatgactaagattcttcatccagcttatggcaagagaacaagaaggagcagttttgatatttccaaaactgcctgtatcagatgtctgttctaatattcatttatgctcacctgactccagaggaatctctaatgaaaagagcaatagtgcactggtttggggacctgattgcatagaatcccagagttggaaggaatattagcacattgtatagcattatgcctgtttcttttcttttaaagtacgttcaatgtctttactagatattatctataatttgaagaaggaaagctttactgtgttcttaagggtttaatagttaccttccctagtactgaacttaaaaatcccctgggaaagttaggatggaaatttacatcagtgggggaaggagacttgggccttcagccttattttttgattgattatcccttttacaaactgatatggaaagagaaacttatttataacatgttcagcatggttcatgtgagaaaacagatgtttataataggaaatgctattgtgtggagggaattatcaaagctcacttacaaggtttaaagacttctacgtcataggtcaggtttaatgtaagggccattgtgcttgctgtctgggttgagtgatgactgcgatggctaatcattgccgttattaatgacctcttcttaaaaggcaaacaaaaagaggaagtctggtgtcagtattaagtctgcctttgtgactgttaaagtatcatcccaattataactgtctatgggaacacagtgcagaaagtaaatattttggtaattcccatgatcttagccagcaagataaacatgaaagaactagtttcatgttataatgaccacataccctgtgttgctgctagtgagatgcaactgatattacttaattgtataatattctgcctcactacagttgaatatggtatatcttagaggctttctgatggttttcttgctgttttgaaaaattgaaatagttgaaatactgtagaatatagtataggatagaagtcaagtagaatacaatgcacaagttgtgatgtgtactttaaaaaactttctttacatcaaatattgaatggtgctttaatggacacatttggtatttatgcattttaaaataaggagactaaaaaaacaaataaagaattaattgaagcatcactttctctgtatgccttttcaaatcctctgtgaaataaagtaggatttaaatgtgaataaggtaataattaaattcaaacaatcacagtgaggaaaatagtgatcatcatcaacttcataatgcttaccaattttattcctggctagaggtgtgtttatattagtttagttttcttaaaatacttttccctgacctagtttgagtctgctaattacaaagagatgattttgacctttctgtgacagtacattgttttagaaacatatacatggaaattgctggccttcgttcctttaaaagcagcacgcccgctgtgctgtggaccacaacatgtggctctgtgtctccctgaatctccgtgttcagttcatctccctggcccgctgttgttcatttggaaatctttctggaaacgccccttggctcaggccctgtttttccacctgactttctgtgttggcatccgaagtagcctttttgcccatgtctctgcattggtgtgcccctcacacctttgctggactcacagcccagtgctctcccatcacacacctgtgtacatactttacatggctcttttggcccctgttcagattgaactccagtgccaggcattgagtaccttcagtcacttggctctaccatatctcatttctaaagctcattttatgtgactccccggctacccccttcattctgggaaatgtgaaccatgggtacacagcttcttccatcaagccagagcgaagaaggattttttcttcacttaaaattgtgtctcctgtctacccttccatctattctctattctctttaagaagtaaatcaatgttcatttcctccctctttattctggcttcccattctcttgtgaatttcacttggatggtgtgatgcaatttatttctcattaagtactctaaaattattatatgtacttgtcctatattctaataaatataaggaaatattctacattcccacagaattaaagcaattaaacatatagttgtatacaagtattgcttgatactccatgtattttcataatgtctcacataattacagatgcttgtccaataactgtgtagtttttaatcattttttgaaaaggaagtatactacctctgtttccacacccctcccctttttctaagatacctcaaatatttttgggttttataagaacaaaacctggtctctcctgtacagatgctaaaagatatagatagattatagtcaaaccaccataaataaatattcacatacatgttcattcacatatcctcataattcaagtcaatatacacaaaaatttccaatcttaccagtgatgaatatatacaagtgaaagcaactgttaggtacacttcacctatattgatttagccaaatttgttaatatatagtgctgacagacatatggtgaaatcgacatacccacttatttgtgatatggtctttcctgagagtcctctaggaaaatgtcaatcataaaactaatcttgtacttggcatcagtcatctaacttaatgcactaaaagcagtaacctaaaatccatttggtaccataatgtttacatttagaatttgaattatgaagcactgaaagcaacctaaaagctaatagttgcaaaatataaactgtggcatatcagttgaacagaattaggtcagactggggttcaaatcccttttggaacaaatacttaactagctctgtgtccttagcaagtggtggaactcacggagtattggtttccttatctgtacggtggtgaactagactattccccaaggactggttctgctttggagaggtgagagtggccattcggatttgatttcaggttgctttctttttatattcttactgaaccagcaaacaaacagtacagaaggggaacatgatattaagaaagttaatgaatatggttctttagtgcctttctcatcaaggggtgactggagtttgatggaaaacatagtctgtacagagtgaggaaatggccatttctgaggtgctcagaaccacaggctcacccctttcacagggttaggatgggagctgttacagggagtttcctgtactttaaaaaagttaaacaacagaatccagcctttgctagctttgggtactgtaaatgatttactgtaacataaaacacatcgagtgagaaaaatatagaataagttttttcttcttcaataagatatgcaaatatatatccaaattatgttgcttacacaaagtaactaaaaatggcgttgcttgtttggtctcaatgaattaaaccacacattgagtttccctgggttatcttcactatcatttcagattcagggttttggttcttaattactgatatcctttggaagacaataataataacaacaataataatacagtggtgctaaatgctgtaaaaactgcattagatgcatgaccccatttggcatctacttttcaaaggtgtgcatgtttcacgaggacactctatatatacatcttaaggctttgtaaggactaattgagataaagtacatgaagttccaagtaatggtgcctggcatgtgacaggcatccaagaattggtagttactattgccactgtatgacaacaatgccatctactctaagttatggcattgctttgtggacgaatcaggaaaaaaaaaccagacactgccaattaaactatgatgtaatagttttatcccttacttttatttttgtttttgaaagagctctcttagacttatttagacatacattttatcatacattactcttgtgcctgaataagaagaaagatacaagcaacataaactgagtaaggtatccctgaaacttcttcacattcaaagtttgattcccctaaatcatggcaagtcattaaactacagctcatcgctgtgtttttccatgtagcattgtccctcccgtgtactataacgagcattgttgatgcggcatttcttgggtgtgccactgttgccttcatgatttcttttttctgagcctcttatatcctttcaaaaactttccttttcgactaaactcaaaacttcatttttcctcctcagttgaactgtacgttgcctgaagttaagaagcctctgttcaaagtcagcaagaaattttaggcaaattgatgtttaatgctctcacaatagtcctacatgatacattaattaattaaaccacatctatttcagggatttgccagtttttcctgagcttagttgtattgcttgaccttgacataggttagtgatctctgtgcgtgtctttcagtaacaaagcataacacagtttattctatctggatgtattttcttgtctcacatcctggaaagctttcagcttagcttttgctttgtgagaaaatatgaaattgctgtcattcttcagtcatgaatgtttgcctcactcagttcaactttatacttctaactacactatttccatacctttctgtgcacacagtaacttttttgctcaatgataagtcatggtgtggttttaaaagataatttaaatggtaattaattcattgaggagtattaacattgcacacaagtcagtggacgtgacataatatgaactgctaagataaaggctgtacatgctcaggcaatgaaaactatagcatgaccggaacctgaaagccagaagttattatatgccactgagtataagacacaaccctacttctgagatgtgggggagaaatgtcctataattgatggaacataggccgggcgcggtggctcacacctgtaatcccagcactttgggaggctgtggcgggtagatcatgaggtcaggagttcaagaccagcctggccaagatggtgaaaccccatctttactaaaaatacaaaaattggcctggtgcggtggcaggcacctgtaatcccagctacttgggaggctgaggcaggagaatcactggaacccgggaggcagaggttgcagtgagctaaaattgcaccactgcactccagcctgggcagcagagcaatttcatctccaaaaaaaaaaaaaaaaaaaaaaaagagttgatggaacacatttgtaagcacagagtaaagaaattatcactgtagtcttgttttaatcaagagggaatttatgagtggtttgaattggggacaggaagttatagaaaaaggcaagtccatgacttcctatcttggagtaggtgtttttgactagaagcacatttcatatacaataaataggaaaaatcttaccagttgttgctttttgaagagaaagccatgtataaacagtgagaagtagtcaagactgagtctctattggtatcattttaaatttggtctattgcctaacataggaaatttaggtttagatctcactgataagtagtttgtgagaaccgaatgaacacagatcttctcacccacaacaatgaataagaatttgtggatgaaatcactaacagtgttaacaggaatatgtttcattttttgcatttggagtggtgaaactccccagctgcctgagaaataaaaatctagcttgtattgtttaacggcagttgttagttcctttctaacctattgggtctgaagtcaaggtcataaacattggttagcagtcttagaactaagtccagtgaacttcactaactagatttctctattttgtaaagaaaatgggagaagagttaaacacacacccaaataagatatgccaaaggaatataagaaaattaacttttattgagcattattatgtgctaggcattgatcaaggacttttcatatgttatttcatttaatcctcaccatgtccctttgaagtaggcagtggtagcacatgctgtgcatgtcccattcctatctcttaacctctcaccattcctgaatgcttccacctgctcaacacctgcagttttttgcctgagggctatccctgtttggcagaggctacatagccaccatgctcagccaatgactgatagacttagtagattaatgcccaggttccctcatcctttatgcagggtaagtgtgagagttatgttatacaccatcctccagagttctctggcaggagtgagcacccgttgccgctcaacagcatacaccctttattgctttttctccacttttcatcacgttttgccactccccattggcacttcttggctctgctctcaagtcaactactcgggcttttatctttgtctcaggactattagttccaatttatagatgaggaaatgagtccaaggccacatatctagaaaataacagaggcaagatttgaacccacactaaggggcctaacaaaaatgaacagtctgactcaatggagtaactttggataataggagtgactgctccaagtattctcaatgatgagtgcctgatcatactgaatttttactcttctccaatctatttaacaaggataaatgtagatttatattttgtagttatatgtgcatgtgcttaagcgtataccagaaaaatgctggcacatttaatcaactcatggcttgcttcatataacactaaaacaaactcaagctatataattaatttttgtacaaaactgttggggaagttttatattatttgtatttacagtattgtatagatctttctgtcatgaataacttttatttgacaaataattcttcatattattctaggatgaggctagggcatgagagctaaaacaaataattactaaagcactttactgtacttctctaagtacattccattttctacatcattatatttttgtatatattcttttttttttttttttttttttttgagatggagtcccaccctgtcgccaggctggagtgcactggcacaatcccggctcactgcaacctctgcctcccgggttcaaacgattctcctgcctcagcctcccgagtagctgggattacaggcgtgcgccactacgcccagctaatttttgtacttttaatagagacggggtttcatcatgttggccagaatggtcttgatctcttgaccttgtgatccgcccgcctcggcctcccaaagtgctgggattacaggcgtgagccaccgcgcccggcctatattcttatattatcacttgagtgtcagctacttcaaggtaggatccatatctgattcacctttttggaagaaaaaaaccccccatagtatttagtgtgtcttgtgctagttggctctaaataaatatttttaaaataaatgactgtatagactcaaatttaaactttatttgatagacaatgatatttaaaattaggatgaatgtgtgggtaaacatactacttcatcactattactctacagttttgagatttgtgctgctcccctactgttatcttagcttgatagctgtgaaaattgacactaacattgaatgatgtgcagctctgtcattccagatgcaattctaaatattttttttctccagacttgatttctatttgaagaaaatagaaatagaaatctagcatatggaccttctggaactgtttcatatccattggcggtcttgatcaagagagaaataaatagccatgtcttaaaatagtgaagtttctgggtggtcctgaaaaatccaaagtaattaaagagaggagagaaaaaaagaaagaaaagaaacctgtactgcttttcacttaaatcagtggtttcatgtatttttagacacgtttttccctgagttcagtcattccttgttctttgagattattaaggacacatcattgtcaggagaggagttggtacctttagcttactcacatggttcttctcttgtcctaggtggcaataaagttttccccagactctgtcaaatatatgggcacctgaggagtcttatgtgaccccttgtgttgtatgtcttgataataggagtagctgctccaagtattctcaatgatgagtgcctgcaatgagtgtttgtacttcagattcattagaatcatgtctgaccattgttatgttttcgagagccatggtgtccaaaggctataaccataatgtcagttacagtagtctatgaaggtgctaaaagctttggtggactcttgtaaaagtttcgcccaaccaaactggcacagagcattgtgctttttttttattatgcagtaaaatctcatttaattatatgcaagttattcatttggataaagaagctgatttaaattttggttctgcgaatatgttaattatgaccatgaatcttctaggggaagaagtcatttctgaagcccagtaaagtaaaaggagcctaagcagatctaatgataacagattgaaagacaaacataacgaaatgggaaagacgggctctgggccacagtggtcaagtgtggtatttacagctatatagtcctggattatattacagctcccacttttaataattatgacattttcagtgaagtaccttacatctaaatcctcagttggaagttataatacccactcatagggtagtcgagagaattaattgaaataatatttgtaagattctcagcacataagaggtctgaaataggttttttttttttttttggatggagtcttgctctgttgcccaggctagagtgcagtgatgcgatctcagctcaccgcaacctccgcttctggggtttaagcgattctcctgcctcagcctcttgagtagctgggattacaggcacctgacactgcacccaactaatttttgtagttttacaaaatacaaaacgagggttcaccgtcttggccaggctggtctcgaactcctgaccttgtgatctacctgcctcggcctcccaaagtgctgggattacatgcgtgagccactgtgcccggccccaaaatagtttttacttctgttgctgttgctgctatttctgctgctgttattcaagtgaacccgcacagaaaagataaactttagagagaactctcacaagtaagaataatggtatgggaataactacctacatttgctaaatatgtctcattaaatcttagtaagcatctggcaaggaaaatattgtcctggttttttactgatgagggaactgagatacagagaactaaaataattttcccagagacattaagcttatgtttaaagcttaaattttctcagagacataaagccacagtctaggtcttctgacttgtaatccaatgtactttcatggcccatacttccccttatgtggaaatatataaataagtgcaagtcatagtgtgagatggtgaataagtgaaggctcagtgttgcaggccacatagctaatgaccacagaggaaaaggcagccttaaactcagggttcgtctttcttgggcctccattgtcccctggctcttgacctggtaatttatcactatcttgttagctttcctgtgccttcaaaggaatgatttttatatgttcttttccagttgttctcactgggaaatctggtccaagtgatgtaatttaccaccaccagaaacagctttcccctggatttgcattatcaatttgatttaccagtctttatttttttttgtaagttgcttctgagtagtgcaggtaactggaagcttttgcctgaactaaactttaatgcttagtcaaggtgactggctccatcagacatcattagtattttgctttgttttaaaactcattatctccatccaggatcacgttttataataattcaggtaatctactttgtgttcctccatctaaagaatttggggttggaatgggagtacaggtcaaatagaaatgttcctggcaaaatataaacttacaaaagggatcagagtgggttggtttgcagcagctttctgcttgcactgcagccgaaccttctgaaggtctcttagcttgtatttgttaaggaggttttagattttcatccaataggaggcagtgtgcttgattttccacaaaatggtgtggataaacttgcacactgctctaccgttggttgaaacctcaattaagttttttcagcttgtgagttgtgacaaagatacggagaactccaaaagtccaatagattgtttccatttaaaataaaaaggaatggtactggggaatgagagttagtagattacatgtggaattttcttcattttatgatgagttgaaaaaattaaagctgatttttttcagtgctttattttataaaaacatgaatatgattttaaacttaagatggcatatagaccatataacttgctttcatttttatgttattttattttctattttacattcaaagggctgttttctttttctttttttttttattatactttaagttttagggtacatgtgcaccttgtgcaggttagttacatatgtatacatgtgccatgctggtgcgctgcacacactaactcatcatctagcattaggtatatctcccaatgctatccctcccccctccccccaccccaccacagtccccagagtgtgatattccccttcctgtgtccatgtgatctcattgttcagttcccacctatgagtgagaatatgcggtgtttggttttttgttctcgcgatagtttactgagaatgatgatttccaatttcatccatgtccctacaaaggacatgaattcatcattttttatggctgcatagtattccatggtgtatatgtgccacattttcttaatccagtctatcattgttggacatttgggttggttccaattctttgctattgtgaataatgctgcagtaaacatacctgtgcatgtgtctttatagcagcaagatttatagtcctttgggtatatacccagtaatcggattgttgggtcaaatggtatttctagttctagatccctgaggaatcgccacactgacttccacaatggttgaactagtttacagtcccaccaacagtgtaaaagtgttcctatttctccacatcctctccagcacctgttgtttcctgactttttaatgattgccattctaactggtgtgagatggtatctcattgtggttttgatttgcatttctctgatggccagtgatgatgagcattttttcatgtgttttttggctgcataaacgtcttcttttgagaagtgtctgttcatgtcctttgcccactttttgatggggttgtttgtttttttcttgtaaacttgtttgagttcattgtagattctggatattagccctttgtcagatgagtagcttgcgaaaattttctcccattttgtaggttgcctgttcactctgatggtagtttcttttgctgtgcagaagctctttagtttaattagatcccatttgtcaattgtgtcttttgttgccattgcttttggtgttttggacatgaagtccttgcccatgcctatgtcctgaatggtgatgcctaggttttcttctagggtttttatggttttaggtctaacgtttaagtctttaatccatcttgaattgatttttgtataaggtgtaaggaagggatccagtttcagctttctacatatggctagccagttttcccagcaccatttattaaatagggaatcctttccccattgcttgtttttctcaggtttgtcaaagatcagatagctgtagatatgcggcattatttctgagggctctgttctgttccattgatctatatctctgttttggtaccagtaccatgctgttttggttactgtagccttgtagtatagtttgaagtcaggtagtgtgatgcctccagctttgttcttttggcttaggattgccttggtgatgcgggctcttttttggttgcatatgaactttaaagtagttttttccaattctgtgaagaaagtcattggtagcttgatggggatggcattgaatctgtaaattaccttgggcagtatggccattttcacgatattgattcttcctacccatgagcatggaatgttcttccatttgtttgtatcctcttttatttccttgagcagtggtttgtagttctccttgaagaggtccttcacatcccttgtaagttggattcctaggtattttattctctttgaagcaattgtgaatgggagttcactcatgatttggctctctgtttgtctgttattggtgtataagaatgcttgtgatttttgtacattgattttgtatcctgagactttgctgaagttgcttatcagcttaaggagattttgggctgagacagtggggttttctagatatacaatcatgtcatctgcaaacagggacaatttgacttcctcttttcctaattgaataccctttatttccttctcctgcctaattgccctggccagaacttccaacactatgttgaataggagtggtgagagagggcatccctgtcttgtgccagttttcaaagggaatgcttccagtttttgcccattcagtatgatattggctgtgggtttgtcatagatagctcttattattttgaaatacgtcccatcaatacctaatttattgagagtttttagcatgaagggttgttgaattttgtcaaaggctttttctgcatctgttgagataatcatgtggtttttgtctttggctctgtttatatgctggattacatttattgatttgcgtatattgaaccagccttgcatcccagggatgaagcccacttgatcatggtggataagctttttgatgtgctgctggattcgttttgccagtattttattgaggatttttgcatcaatgttcatcaaggatattggtctaaaattctcttttttggttgtgtctctgcccagctttggtatcagaatgatgctggcctcataaaatgagttagggaggattccctctttttctgttgattggaatagtttcagaaggaatggtaccagttcctccttgtacctctgatagtattcggctgtgaatccatctggtcctggactctttttggttggtaaactattgattattgccacaatttcagctcctgttattggtttattcagagattcaacttcttcctggtttagtcttgggagggtgtatgtgtcgaggaatttatccatttcttctagattttctagtttatttgcgtagaggtgtttgcagtattctctgatggtagtttgcatttctgtgggatcggtggtgatatcccctttatcattttttattgcgtctatttgattcttctctctttttttctttattagtcttgctagcggtctatcaattttgttgatcctttcaaaaaaccagctcctggattcattgattttttgaagggtttttgtgtctctatttccttcagttctgctctgattttagttatttcttgccttcttctagcttttgaatgtgtttgctcttgcttttctagttcttttaattgtgatgttagggtgtcaattttggatctttcctgctttctcttgtgggcatttagtgctataaatttccctgtacgcactgctttgaatgcatcccagagattctggtatgttgtgtctttgttctcattggtttcaaagaacatctttatttctgccttcattttgttatgtatccagtagtcattcaggagcaggttgttcagtttccatgtagttgagcggttttgagtgagattcttaatcctgagttctagtttgattgcactgtggtctgagagatagtttgttataaattctgttcttttacatttgctgaggagagcttagttccaagtatgtggtcaattttggaataggtgtggtgtggtgctgaaaaaaatgtatattctgttgatttggggtggagagttctgtagatgtctattaggtccgcttggtgcagagctgagttcaattcctgggtatccttgttgactttctgtctcgttgatctgtctaatgttgacagtggggtgttaaagtctcccattattaatgtgtgggagtctaagtctctttgtaggtcactcaggacttgctttatgaatcttggtgctcctgtattgggtgcatatatatttaggatagttagctcttcttgttgaattgatccctttaccattatgtaatggccttctttgtctcttttgatctttgttggtttaaagtctgttttatcagagactaggattgcaacccctgcctttttttgttttccatttgcttagtagatcttcctccatccttttattttgagcctatgtgtgtctctgcacgtgagatgggtttcctgaatacagcacactgatgggtcttgactctttatccaatttgccagtctgtgtcttttaattggagcatttagtccatttacatttaaagttaatattgttatgtgtgaatttgatcctgtcattatgatgttagctggtgattttgctcgttagttgatgcagtttcttcctagtctcgatggtctttacattttggcatgattttgcagcggctggtacaggttgttcctttccatgtttagcgcttccttccggagctcttttagggcaggcctggtggtgacaaaatctctcagcatttgcttgtctgtaaagtattttatttctccttcacttatgaagcttagtgtggctggatatgaaattctgggttgaaaattcttttctttaagaatgttgaatattggcctccactctcttctggcttgtagggtttctgctgagagatccgctgttagtctgatgggcttccctttgagggtaacccgacctttctctctggctgcccttaacattttttcctacatttcaactttggtgaatctgacaattatgtgtcttggagttgctcttctggaggagtatctttgtggcgttctctgtatttcctgaatctgaacattggcctgccttgctagattggggaaattctcctggataatatcctgtagagtgttttccaactcggttccattctccccatcactttcagatacaccaatcagacgtagatttggtcttttcacatagtcccatatttcttggaggctttgctcatttctttttattcttttttctctaaacttccttctcgcttcatttcattcatttcatcttccattgctgataccctttcttccagttgatcacatcagctcctgaggcttctgcattcttcacgtagttctcgagccttggttttcagctccatcagctcctttaagcacttctctgtattggttattctagttatacattcttcttaatttttttcaaagttttcaacctctttgcctttggtttgaatgtcctcccgtagctcagagtaatttgatcgtctgaagccttcttctctcagctcgtcaaagtcattctccatccagctttgttccgttgctggtgaggagctgcgttcctttggaggaggagaggccctctgctttttagagtttccagtttttctgttctgttttttccccatctttgtggttttatctacttttggtctttgatgatggtgatgtacagatgggtttttggtgtggatgtcctttctgtttgttagttttccttctaacagacaggaccctcagctgcaggtctgttgcaataccctgccgtgtgaggtgtcagtgtgcccctgttggggggtgcctcccagttaggctgctcgggggtcaggggtcaggcacccacttgaggaggcagtctgcctcttctcagatctccagctgcgtactgggagaaccgctgctctcttcaaagctgtcagacagggacatttaagtctgcagaggttactgctgtctttttgtttgtctgtgccctgcccccagaggtggagcctacagaagcaggcaggcctccttgagttgtgttgggctccccccagttcgagcttcctggctgctttgtttacctaagcaagcctgggcaatggtgggcgcccctcccccagcctcgctgccgccttgcagtgtgatctcagactgctgtgctagcaatcagcgagactccgtgggcgtaggaccctccgagccaggtgtgggatatagtctcgtggtgcgccgttttttaagcgggtctgaaaagcgcaatattcgggtgggagtgacccgattttccaggtgcgtccgtcacccctttctttgactcggaaagggaactccctgaccccttgcgcttcccaagtgaggcaatgcctcgccctgcttcggctcgcgcacggtgcgcacacccactgacctgcgcccactgtctggcactccctagtgagatgaaccaggtacctcagatggaaatgcagaaatcacccgtcttctgcgtcgctcacgctgggagctgtagaccggagctgtttctatttggccatcttggctcctcctctcgggctgttttatttttcaaaggtgaattgctcaacattttgagccctctttgcatgacaaggggatttcactgattacagtcaagcaaataatatttggaaataatctgaacctagatgtttcctgaaaaggccctgtactttccaagatatttaatttagaactaaagtaccaagttttatttgttctggggtttacaataacccattatacgattagctttagatataatatttagatataatctaataagtatttagatataatgtaatacaattccatacaatatgatacaaagtaataaccataatcttctgtggatcaattataaataccaaacacttttcattttgcatcctttacatctattgaagaggaaatttttttccctttaatacagtttgttattaagataaatgaatatgatatgaaggttgtttcgccttcatatatgcaatgcaacatgggccatttctgagagtcttctcttttcacttgaaatctggactcctgccacaaaatctccatttgttcttttaacaggtctcgtggttttttgtttgtttgtttttgttttttaaccttttctctctctcttaggtttaactgtgtacacatttggtaataaatgttactgtggcattttgtggtttttccctataccactgtagttaaggatgtggtagtgtttctattataaacataggtttgtaggagtttataatttgtttgaaaaaaagtttaaggatattacttggaaatttagatttcaattacatacttctattttctgattttaaaaaaaagtaggattgaatatattttctcatttcatagtctcttccacttaagatttcagagtgccgtaccacttatataagtttggcataatgaatagtgttattgctgttttgtggagacctcacgtgtaccctagagagattaaatgagttatctaagctcacacagtgaaggggcagatgaggtgagtgaggttaagtcagaactcaggagcctcgggacagctatcatcaactcaactgttttgattcacaggtggcatgggaatactttcttagtttattttgtgctttggttactttggtcgataccctaggaaattaactttacaagtgtggtcaaactttctgcttcttactgtttctaataagccacttgcttgatctggtatttaggcctattgaccagtggagactagcagggtagtaaagcaaagcagtcagaaattcagctgtggctctctggtctctggatagcaagaagcatagctcagctgaattcagtcaggaggagcagactaggcaaggccaggtccttgaatttaaagagctggctcacagaaaaagggcacaccagcaatcacactggtacacaaaggcatctgggaccagcatggactgtaggagcctctgcacaggctggtaagatgtggaaacaggggactgggcagccatgttgggggatgcatacagcaggcaacttggcattggagaagtcaggtagcaggcagggcctcggcccctgagtccggttccttggagggatcttgcagaagctaggcagctatctatcaaggagtgacactttcagcaggctcctaaggcaggggctctggtagaggacttgggtaaagccaaggtctggaaacaaaggaaaacccagttatcaatgctagactagacaaagtaaaccaaaaaatccccacaaaacccaatggataagttaatttccaataacgacaagggctgtggaaaagataaagtagtgtaacatgcacatttaactaacaccttctcccttcccttccctcccctcctctcccatccccttcccttccccagttgcctcccactcccccaccgctgttgttttctaaaagccatacacaggtcaacctggaatttacagcaaattgtggatttgaggactataacaaaaatcatttctcactgaagagcacatgcccaattcccttccagaaatttttagtgctatatttcccaaattaagattttcttttactctcacaatataagacaaaaatactagtatgattgatatttatctttaaaagataaaggttaggtatgtgcatgtagtatgtgtatgtatttagacattaaaactgaacattagccttaccaatttaagggctatgaataaaggtaatgagctcaaataccaaaaaggtgtttaaaatagcttacctttaaggtacttctcacacctgagattctagattccacagttttatttcatatttccataggtaagtatgctacatgtttgatcagtgaattatcacattgtatttttatttaacaaaactctcaaaggctctttttttgtctcagagatattccttttagttttatatttgaatttatgtagcaattcagtccctccaagtaataactctgtattttagtggcaatctttctaaagtactggcatcatgcctcatctatattaaagaaatataccatgccaaatacctaaacatgacatggtttttgacttgatctgcaagttggcatcaggaaaataaattctgtagtactctgtattaactaaatgtcatatctacttaaattatctaatatgttactgtaatctatttatgatacagtagtttgcttaaatgaatgacagtatgaactattttaatgctgaaatgactgcagagcatacaaatgccaaattatattcaaaggatttttttcttctttactccagaggtctttgtcaatggctccaattgaaaacatgccctctccagtgatgtctgggttactattttgtcttcatttatctcttcccattattactgaaattcaaactcaattctagatattagtctagtttagattttggtagtagtaaagagatgtctttgtaacaaccagtgtttattattctttagtgatttggggtaggaagctgtttttatggtcttttaggtctcttgaatctgttgaaaggattttcaagatgactttaaaatcatttacttgtttcctaacttgcctagtgacacctacaggtgggtcaatagaaatgggccaatagagtgaaaagtcccgattaacccattatggcaatcagtgggaagttctctagtggaaatatgtagagtctgcactttgatctgaagaaccaactgcagggccagacatggtggctcatgcctgcaatcctagcacttttggaggccaaagcaagcagatcatctgaggtcaggagttcaagaccagcctggccaacacagtgaaaccccatctctactaaaaatacaaaaattagccagatgtggtgacacccgcctgtaatcccagctactcaggaggctgagacaggagaatcacttgaacctgggaggaggaagttgcagtgagctgagatcacgccattgcactctagcctgggcaacaagagctaaactctgtctcaatagagagagggagacagagagagcgagcctcataaacctagaagaagagatgtggcaagtgtggcaaagacctggggcttaggtgtcagtgcactcaatgtgaatcaagaatgtaatccaactgccaagagagcagaggcaactggaggccaggctggcaggagaattcctagaaaaaaggagggagggctgtgggatacctacactccaagccgcagcccagtgttttggggtcagtctggggttctctatttagctgtataaatttttaagtgtttcaaattggagctcattcaaagaagagtggtcaggatggagaaaaaacttgaaactcagtttatataaggaagaactagaggaactaggatgtttattctggaggagagggtacagaattgctgtctccacagataaaatgggctgtcatgtagaagagaggttagatttattctgcatgcctctggagggtagaagaagggccaatggggtagactttggctcagtgcgggaatagttttctgttggttacacatgtccctgaaaggagtgaactgcctcaaaaagtagtgattttggatcttgaagacagctatgcctaggcagatggttgccgttgtataaatgatcctgggaaaacccccacgagactagacataaagatctccaaagctctcccaactttaaggccctggttttatatctcaccatctctgtgcagcaaacatatttcttgaccatcctctgtataccaagaacagtgtggggatgtggagaactccagtcactctcagggaataccagacatgcaaacagcacccacgtcacagggtgacaagagctatgatgcatctgggtgtgtgaagtctcagagccccaaagagggcccacccatcaacccttggatggcaatgcctgagcaagtcattaaatgggagttggccagctaaagaatagaggttagggcattgtagcatgagcgacggccatgtgcagaggcctaagggagagacagtgtgggtgcaggtggatgggaacagaatacagtggagcaagagctggagcagaaagttccttaaatgccagtctgaccatttgaatttaggagtttgtattagtctgttctcatgcagctataaggaaatacctgaaactgggtaatttataaagaaaagaggtttaattgactcacagttctgcatggctggggagatgtcgggaaacttacagtcattgcagaaggaacctcttcacagggcagcaggagagagaatgagtgccagcaggggagatgccagatgcttattaaaccatcagatctcatgaaaactcactatcacgagaacagcatgagggtagccacctccatgattcagttacctcccactgggtccctcccatgacacgtggggttatgggaactacaaaatgagatgtcggtggggacacagccaaaccatatcatagttgaagcttgggagtaaccttatctgatttgcatatttgaatggtggctcaaatgataagtttgaggatggaatgatgggttccagatgaaccttctctctgagtctcagggctcttacttctaatataagggacttgcactgttccgcagtattctatgatcataaattcatttcttgtcgttctttataattgtattggatggtcaggcccatggtgctctaggccttaccagcctttgtgtacagatggagtcacattcacagcaacacccagatttcactcatgctttgcttccttgttctgcttcttaggacctccagatccccacaaagatcttacccagttattcctgggagcctctggggatgcctaaagggagctcctaaactgacccctcctgctctttacctcatactccttgttgccagtgttagctgaacccacctgagggtggtgcctccccatgccagtcctgctggtgccagtgctctccatgacaatgctgaggtccctgccttgtgctgacgttcctgaattgcagctgtcactgcacttttctaggtttttcactgcagcgcagccacactgttcccaacaaaagtgggggcaatggcctacttcctgtgggtcatttaccgtcacctggacagtgagcagtactaggcaggccctgtgtctcacacgatccttcttgcaatagctcctttgtttctgcctataaccccaaggctgtggaaccagtacctgagggagacaccagggttttccctccattccagtttcccccagggtatccaaaggtcctccttctcctggcccgctttcctttagccgaagataagaaagataaggcaaaacaaactataatcctagcagctttacccaccagatcattaaacagacgtgtgcctgatactctttttgttgttactcattactctatgcctggctcagagctaaacccttctcatagatctccaacccttggagggacagactgttaacatcctcatttgtagatgaggatgaggctaagaggaattaagtaacttgctcaaggtcaaacaggtgacagagccagaattccaaaccagcctagtctggaatattccagataccacactcttcacaggttcccaacacttgaacataaacactcaataatctgtataatacatcaagtgcccacttttcttattgtcatctttgtattaattcaaaattggcttttgtatccagggctgggaagaaacggtggatgccgccatttcccacctgttgaagacttgcctgtcgaagagttctaaggagcaggctttgaacctcaacagccagctgaacatacccaaagacacaagccaactgaagaaacatatcaccttgctctgcgatagattatccaaaggtggccgtctctgcctaagtaccgatgcagcagccccacagaccatggtcatgccaggtaagagctctgtccatgctccctaatcacaattgtacttctcctaaattagaggaatgtgcctgtggttgtatttggggtttaaatttcatattaaagtgatgatagccaagaaaattgatttcacgtttcccctctgacatcccagggtaaccccttgaataaatatccctgagatatttgcttgctagacatttccagaatggtatgtcttttttcttctctctgcttttaaatatatgatccattttgttttgcttctaactaataaaaagtggattagaagataaactatttttaagaaaaagttttactaaatgtgatctcgcgatacaatatttcgtaaatgtaaatagcatgatacaagcaactaatgtaatccagatgagtccagtctcttctgctgtttgcttggattgtggtcatcagaataagggggaagagacaaagtgaaagatgaggatcaagagatgtgagcaggcttcagagcccaggcacccatgggccagcaaggagagagattccacttgcccctccatgggcagtcagtgatggtcgtgggcacccagggctgtccttcccatggtcataggggctgagcagtcagtcgtgcagccctcaggtctcttaggcgcagcagttcccaactcctgtttccctcttcctagcctctctgtggcagcagcaaggagcattacatcaatgaattaattgatgcagcagctatagcatctctttcctcctacagcaagaaccacagtgtgggaagtggtgtggttttctcttcttccttcttacatgccttttctttacttccccgcccccattccctctctggtagtcttgctgttgcttccttttccccctcactcagcattcctagaagtgaaaaggaatgcaagtgaaattgtaaaagataaacatggagacagcatagcatgatctaataggcacagactgtggagacagacagaacaatgcttggatcctgcctctttttatccattactacttatatgaccctgagtatgttactttcttttctagagtcttcatgtcttcctaaaaaaatgaatgtaataacgcttgccctgccgctggggccctatgagtttatcaagcacctagcacaatgcttggaacagagacactcaaaaaatttaagctgtaattattatcgttgttatggatatatgcatgattcagcctttaaatttagaggtggaaaaatagctggtttggggttatggattctatattctatgatttgaatatctttacctcaactatacataggtagaagccaactttattccaaataatattttttatttggccttttataatagaaatgcttttctatagagaaatagttctgacattgtttgccttcatttagaacctctttatcttgccctgtaacaccctcttaactgttccacttgttcatcttctgtccactgttacaggattgttttcctaagagatatttaggcttaatgagatagtaaatgaaaactattcattataatcagtatcagtttatgactctccctccctgcttgcccacaggaaaaacaaaggagacttgagggaaaagggcagatacattaattttacaaaaaagagagagagagaaaaaaaatttgaagagggatgggatggcccatctgattggctgattacctgtgagttcaggctgcagcagccccaaattctcttctcaggtccctgtctgagctttcctgttcagggatcctcaaatccctgtcttagtcgtttttgtttaaataactagatttgtaagtaacctaagggctgtgtccgtatctaggatgtggaacattttaaaacctctgtgcaaagtttttaaatgtatggaagtaaaggacagagaaagaaggaaaagaaggaagggagaaagaaatgaaaagaagaaagatggacagtgtgtttgttcacagtccagggcgggccatcagtcagatttatgcctggcctggctgagttcgttctgttggagagattcaggctgtgtgcatgggcaatcagggtcacagtcgcaatgccttgcctttacttgccgacgacccgcttgccactctgtggttgagtggctctccctcccacttgtcttgatctaatcagaatagtgaggttttaaaaaattgttaaatcagcacttgttgtcattaacatgcttaattattgcctatactacttttcttccctataactcagatttttcccatgctttatctctgtattggcatacttttgaggtagaagagacatgtagaattattgctgtcttacaaatagaaaatggaggcaggaaaattgaaatctcttgccttggggtttcatggttactggaagggttagatctagaatccaaatctcccagcccactgtgcttccctctagaccacacagaccacagtggtacagatttgtttttaaccagagcctcctcctgtgtaagctgttctgtgattcggccttccccccgccccccgcctccccccaccccacttaaattggtctagcagtgtgaaaggaaaagggcagaaatagtttcacacagtctcttttcttttctttgctatgagaaatatattaaagatttatcttatatttgttttgtgcttaatttttattatgtccaaaggtgacatgataacattatcatgagtatttcttattaagaaatactgtgaggagttatttctgcttcaagcctgtaattgtgcagtttacaatgttggtttagctccagtagttgtatcagaatatacaaagtggcatattagaaaggactggattactgaataagcataaaagttttttttgcagagatgatctttttttaagatttagttgggaccttcaaaatcgtctggttcacctccctcacttaacagctgaggtaacgaaggtctaagaaggtgaagtgaataagtgttcagtattaaaaggcaggagtgtgtgtaattttgccatgttccctattaaattgcagatggataaacatctcagaataaaaaacctttggtcttttctagcctcatgactttatgagcccagcaccttggctgtgccctttttttgctctagcgaaggccatggtgacaacatcctccctggcgtccagagtttgaaaatctttcccagtgggaattaccttatgaacttctttgccttacatttctcttgcttgacttttaccaattctctatcagtttttcccttaaccttttctggtgaactttttgttgttgttgcagagctatcaaatttatttctctcatctgtagctctggtgttcacatctttctgctggtgaatatagcttgtaaggaatctactttcgttaaatatctattttccagtctcagctgtatgcattctactcttagagcagaagtcacaaagggccacctgattagtgttttttaaaaatctgagtgtaagtgatttagtggtctatctggccttttcatgcatatatgttcccaaccttctccctgcagctgcctaggactaaaagacttgctgtattttgcaggaggcttccttttataacctcagtatctagggcaatatttcaatagccctaattatagcaaagatttgaacctctcaagcatatatgcaaaacttaatgtatacatgagtgggcctaactcatgatatttgaagacttatcattttaacctcatgaacactggagcttttgtcacctctatgcttttcttaaacttaatttcaactaggtgatgctttgcctaagaaataatatagataagtgacggcccatcagatagaagcttggagagcaaatgctgtaggcaccacagcagggcaggcatagaaagctgggcaaggaaaaggggtgtaaagacaatccaggctgatcaggtgcctcaagtgaacattctcttaatgtgatcaaatgacttcacatgtcataatgggccgtagcttcagctgtattttctttcacactgccagattcctgggctaaaaggaagccaagaggagggagtaaaaggaagcaaagaagatttgataaataagattaggtatcttatataatccatatattttcatagatatggattgaaaaagttatcattttgagatgtggtagggaccacccaggaattagcattttgtgcatctttattgtattaagtggatgggagaaaagacagtatgaatctgaatacagagtataaatgtgaataagatgtctattctagccttttgagagagggattttaaattctttttagtatttaaaacttgagtcaatgaccttttgccttaaggatttgatattattttgaagctacttccaattggcccatttcaactgaatttaaatttaattcttccaggtctcacttagatgctcaataagacatttggtgtttactttcatattgtcagtatgatttaactgttggttttacattttgaatttttataagtttgaagtcattctttaaggagatttagatgacttaaatatacaaaaatggcttctgagcctgtttttcctacagagaatacaatactttatcttgacattaaaaaaaaaaaagggagtgagttccaaaatgggaaaatgctattgtgaagtggacttctcatcagaagtatatgggttccatagctaggttggccagttatatgatatggaacaagttacttagtctgtctacttctttgttttctcaactataagtaggaaaaataatgatacttcactatagatttgttggccaaattaaatatagtagtacatggaaaatgcttagcaagtacctgacatatagcaaattctcactaagtgtgagcttctgttactaataataatgaatactattgtaaaatcccaaaggaacttgggagaacttgacaaaaggattctagagttcaattagaagaataaaattataagattatacaggtgtgagtttccagcccaagctgaggtctgaggggaattgatggggtagtgggtagctgaaagaacacttgagagaccacaggtaggtgggacatggctttattcagcaactcactcacactgttggtgctgcatttatgcacctcccagacaatagtggctcagagccaggtgatgagccctcccatgttatggctacgtagatatgattatataatgcacaggattgtgcacctgcactccaatcctgctgtgtcatgctgtgccgggtgtgtaccttgggctgtacttgactgcagtgcagccattgtccttataacaggaaatttttaaaaagaaagagtgtgtaacatttgccttttcagattattcattattaagcaaaagtgaatgacaatagtgcatactcaactttggccttacaggcacctttacagaaagggtccttttaagaaaaaatattccgaggcatgatctgttttcctagcagtctctcttagtcctttgatatgcaagttattttcatcagaaacatctatcatgtcatcattgttgtcagttttcttttctttattgtcaactgaactgactgccagattttcactgctcactggccttgcgtgtgacaggcacagttctccagtaacactttaactgcattaaacttggcataatttgcaggatttatagttttcctctgcagccaattcgtgttgtatttgcagtaatttcctacagtcagtgagggattaaccaataaaatgttggtagcaggcagagattcttctagtgttaaatgcaggaggatatttgagtacagactaattttagaagtggtcagtttttgagtgtgtatctttgtgttatgcttctgcttttctatgattatagcaactgggataattaaaacttccttaagcaggaggatccaccctcttcccctcaattatatatgtaaaaacttagaatgtgttaaccttaactctaaccacatgtgctaatgtgacgtttcaaagcaatgaggagaggacaagaattagtttaaaaatagtgttggaaactggccaaccatttggagagaagaaatagattccctacctcatcccatatcacacaatacatttcagacaaataaggtatttaaattcaaaaaaagaaatttcataaatcacagaaggacataaaggtggatacattgatatggaagcaggataggcctttctatgtaagttagcagaggcaataaacagaagactgagcttttgttatagacttctcaaaattgggtccagaagaatataaaccaaggtgtgtattaatgataactatccctgcgtgttagaattacaggtggtgtctgagtctcctcttgctctttctcttccatatattttgtacattttctgaaaatgacatatataacttttgtaaaaaggccccgtgatagaaagaaccaacaggaaaacaactatataattgtatcagaaatggtggtaaggaaacaacaagggctaattcataagtcaggaaaattaatttttttcaaaaggaagttattaaaagggcaatgaccatgtgtttatggagcgtgtttgtatttcagttctcatgaactaacccaagtcctttgcaggactgcagaaatgtgcgcagctgttttttggattctctcccctcccatctctgtatctcctcttgagcataggccaagtcattcaagttattgatctctgactaatgtttcaccttgtcaaagtgactccataatttcgcactttgcttataatccattttactactttgcagcattttacaatgagacaggtttcctcatagaacattctcattctttggcttctcattctctcattctctgtggcttctttttcccttttctgtctcctgactattggttttccatcttcgtgctcccctggacagtctcatcaagctaccactgtaattcgtatgccttctggttggcctctcttccaagctccacatgtctccaccaatactccttcaggcaattccacatgcctgaaggaaactcacctccttctgtatgtctgatctcagtgtatgatgttactcaatgcccaggccagaggcctcaagaaacaaccttgactctctgtttctcttactctccatattcagccagtcaccaagacctgatgatgctacctcccaaatatatctcttttcatggcccacactgctatttccaacccaaatgcccatcaatcaatgataacactcttatcgcttatttagacagttaaaatgacctatcattcatctctgtgttaatattctgtcttcattttcagtgctaccataaaaaatatgactatttgtagcagtattatagccaaaaagtggaaataatccaaatatccatcaactgataaatggataacaaatgtggtatatccatacaatggaatattctttaataataaaaataactgaagttctagtacatactacaacatgggtaaacattaaaaacattacggtaagcgaaagaagccagtcagaaagacctcatattattataaagccattcgtataaaatgtccagaataggcaaattcaaggcgacagaaagtatgttagtggttgcctaggactaggagtaggggaatgagaagtgatagctaatgagtacagagtttccttttgggtaagaaaaatgttctgaaattagattgtggtgatatgactatactaaaaaccattgtgtattttaaaagggtaagttatatatgaattatatctcaataaacttgtttaaaaacattttttagtgtaaagataaaacatgttctttgtatatatttagaaaattcaggtgaactaaaagaagaaaatttatttatatttctgtaagttattggggtacaggtggtatttggtaacatgagtaagttctttttttttttaagacagagtctcactctgtcacccaggctggagtgccgtggtgcagtctcagctcactgcaacctctgcctcctggattcaagcagttctcctgcctcagcctcctgagtagctgggattacaggcgtgtgccaccatgcccggctaatttttgtatttttagtagagacggggtttcaccatattggtcaggctggtctcgaactcctgacctcgtgatccacccacctcggcctcccaaagtgctgggattacaggcgtgagccaccgcacccagcccatgagtaagttatttagtggtgatttgtgagattttggtgcacccatcacccatgtatacactgcaccatattcgtagtcttttatcccttgccctcctcccactctttccctcaagtccccagagtccattgtatcattcttatgcatttgtgtcctcatagcttagctcccacatatcagtgaaaacatatgatgtttggttttccattcctgagttacatcacttagaataatagtctctaatctcatccaggtcactgcaaatgctgttaattcactcctttttatgcctgcgtagtattccattatatatatgtgtgtgtgtgtgtgtgtgtgtgtgtgtgtgtatatgtgtgtgtatatatatatacacgtatgtatatgtgagtatatatatatatatgtacacacacacacacacacacacacacacacacacacacacacacacacagtttctttatccagttgttgattcatgggcatttgggttggttccatggttttgcaattgtaaattgtgctgctataaacatgcatgtgcaagtatctttttcaaataatgacttcttttcctctgggtagatccccagtagtgggattgctggatcaaatggtagttctacttttagttttttaaggaatctccacactgtttccatagtggttgtactagtttacattcccaccagcagtgtagaagtgttccctgtttactgcatccacgccaacatctactgttttttgattttttgattatggccattcttgcaggagtaaggtggtatcccattgtggttttgatttgcatttccctgatcattagtgatgttgaccattttttcataggtttgttggccatttgtatatcttttttttgagaattgtctattcatgtccttagcccactttttgatgggattgttttttttttcttaatgatttgagtttgtcgtagattctggatattactcccttgtcagatgtatagattgtgaagattttctcccactctgtgggttgtctgtttactctactgactgttccttttgccatgcaaaagctcttcagtttaattagatcccagctaatttatatttgtttttattgcatttgcttttgggtttttcgtcatgaaatccttgcctaagccaatgtctagatgtttctgctgagaaatctgctattaatttgataggttttcctttataggttacctggtgtttctgtctcatggctcttaagattctttcctttgtcttaactttgtataacctgatgacaatgtgcctaggtgaagatctttttgcgatgaatttcccaggtgttctttgaacttcttgtatttggtctaggtctcttgcaaggacagggaagttttccttgattattcccccaaatatgttttccaggcttttagaattctcttcttcctcgggtataccgattattcttaggtttgttcattttacataatcccagacttcttggaggctttgttcatattttcttattctttttgctttgtctttgttggattgggttaattcaaagaccttgtcttcgagctctgattttttttcttctatttattcagttctgtttctgagactttccagagcattttgcatttctgaaagtgtgtccaaagattcttgaatttttgattgttttttctttaagctatctatttccatgaatatttctcctttcacttctggtatcattttttggatttccttgccttgggctttgtctttctctggtccctccctgattagcttaataactaacctcctgaattctttttcaggtaaatcagggatttcttcttggtttgctggtgagctagcgtgatttttttggtggtgttgaagagccttgtttcatcatattaccagtgttggttttctggttccttctcatttgggtagtctctgtcagagggaaggtctatggctgaaagctgttgttcagattcttttgtcccatggggtgttcccttgatgtagtactctctcccttttcctatggatgtggctttctgtgtgccgaactatagtgattgttgtttctcttctgggtcttagccacccagctagtctacctggctccgggctggtactgcgggttgtctgcacaaagtcctgtaatgtgaaccgtctgtgggtctctcagcagtggataccagtgcatgttctggtggaggtggtggagagttcaatggactccataaaggtccttagctttggtggtttaatgctctatttttgtgctggttggcctcctgccaggaggtggtactttccagaaagcatcagctgtagtagtgtggagagggaccggcagtgggtggggccctagaactcccaagattatatgccctttgttttccactaccagggtggatagggagagaccacacaggtcggggtgggactaggtgtgtatgagttcaggctgtccttgagggggtcttgttgcagctgctgtctgggatgggggcaagattcccaggtcactagagttgtgtacctaggaggtttatggctgcccctgctgagtcatgcaggttgtcagggaagtgggggaaagccaggagtcacaggccttacccagctcccatgcaaactgaagggctggtctcacacccaccatgcccctgccaacagccccgactctgtttctaggcagagggcgagatgagcttgaaaatttgcctgagactatccacttcccagctgtgagagaaaagggctttagttcttcctctgcctgtagagtctgcatgcccgatttgtgccctcgcccaagttctgaccaggaggcttcttgtccctagcctttcttgttcaaattgttacaaagttcagctagagaattccttctccctgtggagttttaccccctgttcctctggccaccctcgcaatggatccctgtggtgccaggcagaaatgggctacttggggacccagtgagctcctagggcctttctgctgcttcctctatccctgtattttgcttggctctctaacttgactcagctttaagtaaagtcggaaacttctcccacaaaccttcagtttctgcagtgggggtgtgtgttcgggacaggagggtctccctttcccacttctgcagttggggcactcacagtatttgagggggtctcccaagtcttgcttccttgagggagtctgtgggtcctcgggattgctggtttgttcttgcaggcgatctgcagctaaaattcacaatgcaagcctccccgtactgctctgtccggagctgcaatctagtcctgcctcccgtctgtcatgatcccctgaatcgaaaatttaaaatcattaataatctaaccattctgaaatagatataaatccaactattattcaatatatgtaaatgtttgtatatgtgtatacactcactacgtatgtgtttgtatgcatatccttctagacttttttctttgcatatgtgtacattctgttttataaaaattggatcatactatacctactgctttataatcctttttttttttttttttttttttttttgagatggagtcttgctctgtcgcccaggctggagtgcagtagcgtgattttggctcactgcaagctccgcctcccaggttcatgccattctcctgcctcagcctcccgaggagctgggactacaggcgcctgccaccgcgcctggctaattttttgtatttttagtagagacagggtttcactatgttagccaggatggtcttgatcttctgacctcgtgatccgcccacctcggcctcccaaagtgctgggattacaggggtgagccactgcgcccggcctataatccattttttaaactttcattaggttatttcattattaaatagcatacattttttaaaaagctacatacttaaccagttcccttttgtcaaacatataaactgcttctgatattggtatgtacacaattacttaatgaatattcttgtagctaaatctgtgtacatcctgatgaatttatacttttccatgaatatgaattggagctggttatattacttctctgctttagaagattttatagttgcctcctatctaccatattaaattgaaatttctaagcctgaaatactatgttctttacatagaaatactatgttattttactagaacattatttttctagccatatcttctacattttcttccttaggaccttttactgatactgaaatactcattattctccacacacaacatgcatttcaagtttctatgcttttaaagagttcccttggcctggagaggcagtcttgacctgatggtaaaattaccactaatttctgaagacccagctgaaatgatgttccacaacgcattccctggtcctcctcctggaactgctagtaaattttccatctgtgctccctggtcccctgagcatatggctgttatagtacttgtgttatagagtacaatcatttaatacattgattccatgcctcaccctcaggtagaagatgttggattgtattctattcttctttatgacctcaatacccaatttgtgccgcacatgcagacacacacacacacatatagttcatgcccaccatgtatttttttaaagttttttattttgaaataattatagactcgtgggaagatgcaaaaataatacatacaatctcatatactcttcactcagcttcccctgatggtgacagctacagagctatagttgggggcaagaagaggactctgtagggagcagtgaattttaagaaattcacataagagatggtatcactactatcaaagatagcagaaggtcaggaaggatctgtctataactagaagaaaaaatataggaaagcaaataaatggaagaaaaagtaggctattgtcagggttttaatttcttctccttttgtttttcccttaaaagacatttaaagacgtttgaagttcaggtggtatagcaagatgagagtgccaaaatccaatgtttgtattaaatggaaaacttttgggaggcagaaagaataatctagaatatacatagactgaataaagttagcatttgagaagagaaaaagtgagcacccagatatatgctgggtatacatgaaaaattttttttaaaaaggaaagcttagtgaagtctagccacataggctttagagagaagtaaagtcttataatggtttttgacagagcgagaggggtaaatggtcaggttataattaaatcacattaaagttgatttgcaatagccattgtggaaaggacaaggccagccatttagcaatcgtgcagctgtttatttttctggagccatagcttttcactttcatagttcttttacctccttgttttgaaacattattgtttcaaaatcgttttgaaagtcaagctatagtttataaataaagaggtgttcagttattgatagtatgctcattcttatccagtgtaacagggagtccataatgagatgaatggaagattagtggaaaaatatttgaatctaggattagagttggatttgacagaagaagcaattaggagcaactgtagggaaaggtctaccatcaaagacctcatagaataacattctccctgtgtgtacttagcaaatacttgttgatagacatgctggctggtaactaattacaatgtgatgaccaaagaccagcttcttggaagtagggttgttaatacaggaatagaataccaggggagtttgagtaatttccttcttagcagatgtttatactaatgtggatactcaacagtctaaagataatttggggaaaaaatctgtctaaaagtagggggataaattaaatagcttttgaaagacatcactattcttatttctttaattgtcatgtagataactctgtaaaatgcccatttttatcttcacccatctataaatgtgaactgcctttttttttattatactttaagttttagggtacatgtgcacattgtgcaggttagttacatatgtatacatgtgccatgctggtgcgctgcacccactaactcgtcatctagcattatgtatatctcccaatgctatccctcccccctccccccaccccaccacagtccccagagtgtgatattccccttcctgtgtccatgtgatctcattgttcaattcccacctatgagtgagaatatgcggtgtttggttttttgttcttgcgatagtttaccaacaacagacaaacagagagccaaatcatgagtgaactcccattcacaattgcttcaaagagaataaaatacctaggaatccaacttacaagggatgtgaaggacctcttcaaggagaactacaaaccactgctcaagggaataaaagaggatacaaacaaatggaagaacattccatgctcatgggtaggaagaatcaatatcgtgaaaatggccatactgcccaaggtaatttacagattcaatgccatccccatcaagctaccaatgactttcttcacagaattggaaaaaactactttaaagttcatatgcaaccaaaaaagagcctgcatcaccaaggcaatcctaagccaaaagaacaaagctggaggcatcacactacctgacttcaaactatactacaaggctacagtaaccaaaacagcatggtactggtaccaaaacagagttatagatcaatggaacagaacagagccctcagaaataacgccgcatatctacagctatctgatctttgacaaacctgagaaaaacaagcaatggggaaaggattccctatttaataaatggtgctgggaaaactggctagccgtatgtagaaagctgaaactggatcccttccttacaccttatacaaaaatcaattcaagatggattaaagacttaaacgttagacctaaaaccataaaaaccctagaagaaaacctaggcatcaccattcaggacataggcatgggcaaggacttcatgtccaaaacaccaaaagcaatggcaacaaaagacacaattgacaaatgggatctaattaaactaaagagcttctgcacagcaaaagaaactaccatcagagtgaacaggcaacctacaaaatgggagaaaattttcgcaagctactcatctgacaaagggctaatatccagaatctataatgaactcaaacaaatttacaagaaaaaaacaaacaaccacatcaaaaagtgggcaaaggacatgaacagacacttctcaaaagaagacgtttatgcagccaaaaaacacatgaaaaaatgctcatcatcactggccatcagagaaatgcaaatcaaaaccacaatgagataccatctcacaccagtgaactgccttttctactgtcctatgaaatagcacaatggaaatctgaactctgtataattttcagtattcttaaaaattgcatcgatttgccaaaagatagagtatctcaagaacactggagtatccctcaggaagatatttagctctgaggttttgtatcacatcaaaaataacttttctcacatattctactggcatttggtactgttttgtcttcaaatatgaggatgaaaaagttgatatttattccagcagattctggctctaaaaataaaatcatgaagggatttctactgattcatataacaatttttttttcaactgttactcccaacttctgctacctcagtgtatctatcttttatagtacggttttctgagtcacctaaaacttacaataaacatacttcctgtttcttttccttcaagttctactcccagtatctgctcgctctctgagaaattcagtttccaacaataagatgaatgtttctgttttcagtgtaaatttgtgaatattattaaagttttattttttttgtattttcctttagattttagggtgcctagataaagtattttaattacttacaagcaactcatccaatcaattactcatgtgagacagtcattaagacttattttatattgcattatttttatttaaatttttcaaatatatgcataatgtgagtatccacaagtaaatggggcagacacaacaatttggcctattcctctggcttaggccttttaattctggccaatataactggcctaaaataggagcaacactctgcttctgacactactcagccacaacacgcaaagatgacgttctttagaactgtcatgctgaatgaagccagatctatgctgccaacctttaaaaaaaaaaatcttttcatactgaactttttctaaaaacaattttagtgtgtttattccaataaattgttggaatagtcaagtcctgatttatgtgtcatgtggatatttttaaacaattaaaaattaaaatgaaaaacaattatcttgttcctggtggttctcagaacatatgaatatccaattctaaaaagtaaacacctttagttgtatttctgtgtacaggatgtctcaactctgtatattatttaaaatttagccttttcttttagaaatgcttaattttttatttaaaaataattattttagttagctagggtttttgtattcctttcaagtctgctttctgagccatactccagtgtcatgtggaaaatgttaccaaaaaaataaaatgatgtcactttaactttcagaagttatgatttatgctaataccaataggatggtttttatttagtacaggtgtttgcttgttggttgctctaagatatttttagcatttgttaaaaataggcttgggagtgactgcagttgtaaaataagaagcaaatacattgtcctcgtaaggatcatagcaagggggtgccaggccccagttgactgccgctatagttatgagcaaatgtggtgatagatattaagggctgaggtgtaggagtctggctgggtttcaaagaaaaataaaattagttgcagcagtaaacggagcacctaatcagtatatgtgactatgtactgtgtaaataaattacctgatatttttacctgcttttgaaagagatgaatcttccctttcaaaataagataagacaccagattgtgatcttttttaaaacttaacctattaactcatggaaaatcacttagctgtggaaattgtacactttgtacattatttccattgaaaaacacaacatataccagccaagactgagaccccaaggtgaaattttttgagtgcttactatgtttcaggcatggttccaggtactgggggcacagtggtaaatcagactaatccaagccctgccctcagggaatttattatgttctggcaggggacagtcaatatacagggaaacaaatttcagacagcgaaaagtgcagtgcagaaaagtacatcaagacaaggagaaagaatgccagctgttgaccatttgtgccacatctttcttatgactttttttcagtcatttggtgaaatgagaggatggcatattgtattatttgagacagattccttttgtgatggttaaaataattatgtttggctatataatataatattatagtttagtttattactgttaatagtaatattattggagtaccacagtttttgaagttttctgatcaaagaatatgtttcaattttagaaaagaagccaaagcaattcttgagaagtgttcctaaaaaataaattagataacatatctgtagtgatcattgaaatgttttgtgacataaaagaattttcatattattgttttatctttattttgagttttttatttttatattatatcatgagccactgttagatgtccactgtctgttgacatcagcttactacactataatatctgatagcagagactttatcattcatttccacatctctagaatctaatacaattggaacacagaagatgctcaacagatcttcgagtagatttgaattgaatcacttacgtgaacattattccttccctttctcagtttcttatcagtcagctctctactcctccccacctcaccttccaacacatccactccacttccattggcccctccaccagcccttggtgctcttcccttgaaaccccatgggtttctctcttggattccttgtcagttttcagccctgagtcaatctttggcttttcttagatcaactctgcaactggaaattgttactaaaattaattataaaactacctcctttctggctgtgtaacttcacctgggcccttctgtgctaatctgtttcatttacttgtttctaattgatttcgtatctcattcccaacagaagttaatgcctgtcattttgcttaagctccaatctcatctcaaactgtgcagaagaccttacttctactgcactatgaaaatcaaagcaaactgcccttcccatccatttatttcaaaatttatgtgtaattttattaatcttttgtctttctgttctttctcagaagatgacttggttttaggattaaacttagacttgttaccgtggcctgcagaactctgcttctgtctctccatccacttctccaccagcaatttcttcacaattctccttgcccattctgctttacccacacaaatcttccttcacttctactcaccaagcgttttcctgcctctggttttgcatatgctgttcactttgccttgaatactgtcctctatccattcccaaacattccctctcctgtacccgccccacactgtctcactggctgacttatagccattctcagatctcaacttaaagatggcttttctgtaagatgtcttctgtgacccctattattctcactcatggtctcttggactttttctttatagctgaagcatagttcataattgcatcttcattgtgggctatttaatatttccccactgtattctaagtttcatgaagagctggacaatgtctgcgttagctactatggtatagcttagtgtctgccatgtaatgggtgtcccaaggaaagctgatgaatgaactgcatcctcttctatttcctgttttcctcagggaccttgtggcctcatatttgtctcacttgacctgtctactatatattttctgctgtctccctcccatttctaatctttgttcacttttcctctgttccagtaatgccctctgactcttcatgttattatattaactattttattttcattcccttccagacctacaaattgtaccaattgtactgtggcctcttaaagataaatttggaattaagctaaatagcagcatctgtaaataattcctcttttggtcaagagaacagtattaggagcatcaatattaacaaatgtagagttcttaaaatggggaaagaatatttactcatgaataggacaatttttaaaagtttaacagatttttttaaatgctactgtgtgctgggctctatgctaggcattggggtatgatgactaacaagagagacaggattcgtacccacaggagcttacattctgggggatgagccggataataaacagctatacaactaaacatgagaattgcaggttatattaagtacagtgaaacaatgagttgagagagtttgtggtggaggctactttcgatagggtgattggggaaggcttctgtgaggagaaggatgaagaaatgaggaagcaggggaatagcattccaagctgaaggaatagaagttaaaggccgggaggggagaaagggcttggcacattcaaaagacacatggtctatctggcttgatcttgatgaggacaaatggcagggagagttagattgtgtaatgttccttacctctcatggtaaggaatttagatgatagtgatcctatgagtagtaggaagccatcaaatagtcttaagtattacagacattacataatttgatttatgcctttaaaaattactgtggctgctatgtggggaatgttttggaaaacagctggaatggaaaccaggagcagctgaagagactattgtagaaatgtaggcaagagatgaggttgactggggttatggcaatggagatagaagtacaaatatctacagtgtgttttaaaggctagaatacacagagcttggtgctggattgtgtgtaaggggtgagataaagggaggaagcaaagatgactcctggaatgttgcctttagtaccaaggtggacagtagtgctattggtaaaatggggaagtctgagggaagaacagtgtgtgtgtatgtgagttggggagggcagaatcgaagactcagttttggctatattccatttgagaggcctagttggcacccagttgtagatgccaagtgctccggagctcaggggaaaagcctgggctgcagatggactgtcaggagacagcagtctatatatggtatttgaaactgaatgggctttcacttatatggagagagaaaagagaggaggagcttgatctaaatctggaggccttccaacatctagaggtcaggtggaagggcaagagccaacatcggaaattgaagagaagcagccaaggaatgagaaagaggaaaactctgagaaagcagccacacagaagccaagcgaagggaggatttccaaggtcagcagatggagcaaggtgagggcaggggtgggagcttacatacttctacctgagattcgtataaatttgtaacatttctccttttatatattcactccttctctttcctataaagttttaaacctgtgttgctaacttttttaagtatacagaatatagccaatataaacactgtctcaaatgaaagagcactgccccatcttgttatttcatcagagggacacatatccagacccattcctaattagaatgaataaacaagcttcttgttttaggtccaggcttttcagaatctggcttaattgtgttgtcttctcccactcttctttatcttgaacacttaactacatttaggtcaatttctttacttattccttccttacattcaggtgctgtcacaggcaatggaaaaataatggtgagcaaagcaggcttggtctctgccatcatggagcctgttttttcagataatgaagtaattaagcagatactcaattacaaaatgagagaaatagtatgaaggcaagagatgatggaggctcagactttggaagcagcaagcgtgatgaagaggagcaaatgggtatgagaactttttcaggagataaaattgagaggatttggtagttaaaattgagaggatttggtagttgattggagataaggattgaggggaaaggagaggtatcagaaggaacccccagattgctggttctagttggccaatgtgtcattcatcaagaagacatctttggaaaagcatacagtttgagggagacagatcatcagtttagttttgtacatgttgaatttgagagctttctcatgtttgcttttcttacaggaagccttccctgaatattctaccctttgataattattctaatgcttatcgattaattattagctgtttcatatgcttcaacttaataattactgccagtatatctcattgtcatttcatgtcacactgtgtttctctaattgctatgtacgtgtgttttaagtgagagtagaaaatccatgtgggtacaaaatacatgattactatttttgtttatctaactgatcacacttggtagtgcacaatgttatgaagtagtacgtatttggattaccagtgtcactaagtgatttccttgagacacagcctcatttcttatggttaattcatcatctacaaaaatttattagacagcaagtctctctcacggcaataggagtgagtttattaacaggaagtgaattatatcctccgatgtactagaggaatttgttctctatctggaactactttctaattaaagtcatgacatccctaccccgacttactgtgttgaatattatttaaccacgcctcaagtcaaacacaagggtgatgagcccttgagagttttcccagtcttatgttttcctttctgtgagttttcctttagtacattacaaaacatcatctaaatttgtgtctttaatagaatttgatagccttctttatactgtttctcaaattagcctcagaaatttcagcattggaaaattagtattttattttcccagctgtttaaatgtaatatatttgaagacagaggcactgtcctgtaagtttatagcctaaataaatctattttaaaggtgtactggtcagaggccaggtggcataatgggatgacatatgagctattcacatttgaagacctggcactaaattcaactcaagatgccaggaaaatgactttagaggtgtcaatttgctggagtccttggtgggcatctgagaacatcacagaactgctctaaggtctaacataatgtatcctctgtaaattatattgccacattagccacctaaggtacaaaagggcagtttgaatgacttcagtagacattccaaaatctagttttaatgagtaataagaagtacaagcctgtctacaagaagactaacctaatctaaagggttctacgtgggactgggagttgaaatgtaagcttttctatgtctctgatctttatctggctcatcagttattcagcaagtatttacttaagcccccttttctgagcctttgtcattttaggcatgaattttataacaagaccagttgcctttcctctccctggcttcaggtctcctacaaatgccaataataatatttcaaagaaatgctttgaagaatttattagttctccaaaaaaataccatgataaccctgtctagaatacttgtaaaatcatctcttcaattatcccaaggtgcttaattggaccgcttatctgaagatcttttactttttttcatttgccaagaatgtctagtaattatgcactcagtttccatttgagtagcttttcgaattagctagaaggtcatcatcattactttatatttaatatctgaatctaaggtttctggtttctttattgtagtaatacattgtgtgctatccagaaacatcacttaatttgagaaagcataaaatgctcaaaggtaccatactttgatttttattgtgaaaatatatttcaataactgacagacttattctctacaaacttgacccatttagtttcattcctttgcaattaatgtcagtcctttggatacaatggactggtggaccatgccagctgatgaggggtaatcctgggcatagtgggttctctttctctactcaacaggcaggtttagcatgaaactaatctgcacatgaatttgtggcatttctaaggagcgcatctaagttgataatgctgcagtctgcttccagactcttttccaacgatcctgcagttggcttgggacatcctccgtggattgcaagatgctggaagataagcagatggtttttcacttgacctctctgaaccacagtttctttttctttacctccaactattaggatcccaggatccttatcttagtgagagtctatgttgtaatccttaccaccaccatcccaagttcaaggttatggcctgtggccttgctagtagcttacgtagagccctttgatggctcatgaagtcagttcatagaaagaagtgaggtaaactgggaacaaattgaacatatttaactgaagaggtgattttgcattaaaatatacctttattatctcttggaatcaaaaattattttataaatccttattgaatacgtactctgtgcccattctgatactatatagcctgcatatattatggggaacaaaatagacaaagtctcgtaaagtatccatcctagtgggaagggaaaacagtacacaaacaacaaaaaagatcattactaactgttgtaattagatgaaggcagtaagcagggtagtgtgataagagtaaatggcaggggagaagatacttgaggaagccttactgaggtgggggcacgtgaggtgaggatggatgggaaggagccagcagtgtgaagatgcacttgatgggcttgggcatggcagggaaggctagacattccagagagagggaacagggcaggcaaaggattcaaaggaggtacgaaaggaggccagggtgactggggagaatgatgtgagatggcgtttgtaaggtggactggggccagattatagaggaggccttgtttcaaaatttaggttttattagaaatgaaaattcttgaaacaggcctttttttttatgaacctattatctcttagaccaaatgaaaggtgacagttttaaccttgaatggccaacctgcattcataatctggaataattgtgagcagaagcccgcagcatgttgaaatagcattatattatattcaaaggctaaagactgctcagttctcaggcatttatcacttgaaagtggagagagtagaaaagtttaaaaggctacagcaataacatttgagaaaatgaataatttagagaatgaaatcatgactaatgaattttttaaaaagactcctcacttgtgattagagattcataattttcattttatagcaaaatatagttggctgtcatgcattcctgaccttcttcccctaagtacaattgggcccaacacattaatgccttgatgtgcagacttacgactagcttcttgtgttgaaaccattaaattttaatgtattcagcttaagcgtaagtggtcatagatgattcataatggtgctccctgcttttggtgaaaatgatcatcagcaagagaattgtccccagtggccacacttatcttcgtagatgatttcctaaacattttttgtgcccgtagaagactaggaataaacactgcacagctgttgggtaaagcactatgataattgctcagaaaccgcagggtatttgatgaagataaagtggaactctgtaactcttgacattttattttttaattcctggtgtcttgggggtacaagtgatacaagctgctctttaagaatggagttagccaacgatgattttttttctttaagaaatataacccaagagtagcccccaggattatgacttcatcatttagctgttgggcatagaagcaggatgagccaggaggcttgactggccgaagcttcagatagcagccttacccgataaaaacaggattgtgtcttgggaatatgagacttaacagcctggtaattactcgcatgttcacctgacctaaccactatccgtgtactgaaaaatcgcagccaaatatgctgccagctgagtttacttatattatgcaacccctatagacacatgtgatctgatcatatccctctagagcttgaagtccttcattgccttcacaataaactcctaattatctgccacgactcgtgagtcccttcataatctagttcctgtgtctccagccccttcattcttacttgccaccagcaattatgctgccatcattctcacctatctgcagcttccagaaggatgcatattctcctttgttcccagatctccctgatcctgggcatattattcctctgcccaggattcccatctttcctactgcagctggctgactcctgtagtccttcataattccaatattgcctaacgccattcatgactcttcccctgacccacaacacccctctctatcagtttacccagataccgtatctgggattgcattgtattatagagctctgtttcccttaacccaaccctgcagtgggatccttgaggatagtgcatgtgttttgtggctttggtacccctagcgcttaacatagagccagcacatggtagatgcttgctgcaggacggatgggtatatgtagtatatctctttcctggccctgaaattgtgtagaacaactggattttctccaaaccagcctagggatcatagtggattattctgggtaggaacaagataaccaaacttactttagtcttcccatcacattacaaacaattcaactgcttccctttctaaatgaagacattttttccaatccctttgtttaatgaaggaacacagtccaaacttgccgttaactttgtgaaatcaccacgagatgcattcattaactattataagattagccacacctgggtataagctttggttcaggtgctttgagaattgcttttatccaagcaaggtcaaaataaaacagtgctgctgcttacttccccctcccccgttcactgttgcttcagtggatgtaccaaggagatggtctgtctcattaaataaagcaatagtattttaggactggaagataaatctaaaagtctccattcaaatactccaggcccttctgcatgtaaaaccaccccagaaagatagatgtttattcttaagcatctctagggataggcttccacagccctctcaattatgtgttccattatctcaccagccttctcatcaggaaggttttttcccttaatgtttaactttaatccctcctgttgcaatttaagctcatttccttttgtcttggcttcagtggaaataaacaatactcactagcacctacccatccctatttttaattgaacatgtctgacttccccaggcagctttttctttctagtgctaaatggaccccattttgcctttttctccttatgctacttcttggagacccttccttttaaaacttgctttgctcttactgcaacaactattagggactatacatttcaagtctgtcgtttaatcctgcagttcatttttctaatctaccaatctgtgtgatcttagtaagccacctaatacactgaagaagaattgatggacaccattttaaagtgctttagagttgtggagttcttttctaagtgaactgctaccattgtccaatattcttctctctccgcccaactccaccctggttttcctacttaagggtaaatgtttgtcctgtcttatttcctacttcttcatgcataagtttaatgcaggccatgatgacagtatttctgagtcctgctctgccaagatagctcaaaggatggaggaagaagaaaagggaacagttttctcttttcctctagcctttcccaaatcgtagaggtagtagccacctgagttgacagaaacgataaattcccagctcttggaacactgatctttttgggactctgagatgagaatttgggaatgatatgaggaggaagatgagtcagaaaataaaaatatgccgtgcatccaccacctaaaaatagagacttctctctaaaaactagagaggagatcattaaaagtgtgaatgagaattaaacggagtcaaaaactagaacaagagaaaagaagaacaggaagaaacagatctgatcaagtatgaagaaggaaaaatgctttaatttgtgatcttccaacaggacaatgtcatggtaagatttcttattaaaattaaaccagctgaaaattccagaataagaacagtgatttgaatttgtaatacaagtacagcagtattttccactgatggctatgtactttatgttattgattcaaagatattacatagacatgttaccaacaatagtcttttctttcttgaaaaatagtcgttattaattttaccccttaacaattctatgtagtctgaccttttaggaataatcctgggctgaaaatagagttgccattgaaatttcaaagtaacttcaatttcaaagtaggaatataagtagtagtatgttttattctattaattgaagattgtattaatgatactctgcctttcctataactgtgccatatagggcatttcaaagaaagactagttgacccttagatttaccattgaaaatcaaaggatgaaattgaaatgtatggctggtggactgtgaagtctctgtggtatatacaacaaagtgataaaaaacatatatggtaataatcacttttgggggattccttaaggagatatttctttttaaatgtgcatgtctgtaacctaggactattcaaaattaacaacagctactcaaaaggaaatgaaatattcttttctcctgcttctctgaaaaggcaccatttgactaaagtttcaatctgcagacaaaatagaattccttcttcccccaaatttaattaattggcttccgctaggtcaaggaggtgccttattatatggtacagccccaaatcctaaactgaacttgaaacagctaacctgtgaaagctgaaaaagccaaatcgcttggaaatgtagtgacagaagccatagaaaagggaaaggaggctgggcgcggtggctcatgcctataatcccagcactttgagaggccgaggtgggtggaccacgaggtcaggagatcgagaccatcctggccaacatggtgaaaccccgtctctactaaaaatacaaaaattagccgggcatggtggcacgcgcctgtagtcccagctactcgggaagctgaggcagaagaatcacttgaacccaggaggtggaagtcgtagtgagccgggattgtgccactgcactccaggctggtgacaaagcaagactccatctcaaaagaaaaaaaaagaaaaagagaaaggagaccattcttaacatatttttacaaaaccaagaaatgctcattttgatgacatattgatgtcatgttgatgcaatggagagtataggtataattattattatagagtgtatttttaaaatttatattgctaaagcctacagattgcaatgggtctaggagtgtaaatcagaagtactgtcaaaacagtactccagatgtgttgagtcatctctggtgtcaaaaggataagttcagataataatcaaataaaggatttgctagaatatgtgtaggcactcagtctgatttatgttcccagttttaagacatctatgcatttcacttcaactttaaaccaaggtcaagaccactggaacctgggatctggaaatgggtttattgttaggattagtaacagttgttttgtttcacaaacaactatggccatcattctaagagattgcttttaaaagaatttacgatctccactgacacaggaggtaaagtctatactgaaaaagcagttctatttgagctatttctgatgtcattctgatccgaaataaggacatttgattagaaaattgaattttgataactttgttatggcctattgtacaactactctctatcttagcatgaagatagtgtggtgcttttgctgccaaagaaatagtgtgtatttttggcctcttttacgcatttcaaaagcaactttttattctagtctggtgtaaaattgattctcaggtgaataactcaatcctctattcctgttgagttgcacgtatggggtcactgtagctgcaatgtgtattgtaagtgatggtcgagggaaggaatgtctgagtatgactgcaatatagtatctgtgccaatctgcattcggcgctaaaacaaagtcatgagatgcgaagtgcgagcttctttgaacagtgtttacagcaggccttattgcatgatcagagtttctgagaaagcagctaacttaagactgcagatctctgtatattgctgccgataagaccacatacttactggaacttatgctttattcattttagctttgaaagattttctaaaaatcttgcctggaattcatcaattctttaaaaaaaatttcattatgttactgaatcttgctttaaagatgaagattgtcttcttttgagctatcacctccccttctttgttttattggcaaattggagagagaggagagatatcttatttattttatcttagttacattatagtgtaatttatctgctatagacctattcttacactatccacccatggcaccctcatcaccatagttgtaactcacctgtaattcgtcttgcatgtttgacattggaagggattttaatacaacacaaacaacaaataattagttggaaatgatgtgttatatttcaggggcattatatatggagacaggctgacctggatttgtattctagcctatcacttacgttgccatgtgattttgagtaagtaacttaacctttctgggccttagtctccttatctgagaccatagtagtgttgtaaggactgatcaagataatgcatggaagacacttagcataggacctagcccatgggaaatgttcaattcacgatgacttttcgttttattctgattattataatggaaaggtgatttattcttttttttgcgtcagatgttctgaaactgcgatagaagattacataaattcttggctgtcactttaaagccctgatccatttcttctggaaaagaggtgaaaatgtaatgtgtgctcattctgtgatgagaataacaacaatctcacaaatatttctatgttgccttaccaggcatttgagattgaaagcagatccagcctgtttctccaaaaactgaattcattgctgggagataatctctctttttgaggtaaagaatgatttgtactaattttttggaactaacacttaagaatccctggctgtagaactgcagtgtagatataacatcaaaaggaaatatttatataatgtagtgcatgaggctacacagggaagtgaaaatagcttgatggttggtattaggtgaacctatttaaaatctagattctacttactaatcatttgctttggtgtcatttctaaaatggtggttataatgcctacttcataaggatattgaaatatcaaaaaagataacatatatgaagtgccttgagctagtctttggtacatagtcgatgctcagtaaatcttcattgtcttctgtccttcctacagtgtttcacatatttccatgtactactatctcttttttactgacttgtcttacttttagactttctgaccttgagccttcacttctgagccattcctatgtttgcttacttggtatgaggaagcctgattctgtcacataagttgcctattagagtttcaggaaaatgcaacttaaagggaaattaggtggtaactgtgtactggctgaaacatttgtgagctcccaaaaaatgcatcactgccaggtaatgacttctgttcaataagtctatgtagtcaacagaatgatgttattcagtagtttattttcttttgttgtttatcttggttccctgtctttttgttttccagggtgcatgatgatagcagagattgttttaaattctatattcagttcagagcttctgggttgtgggtattgtcttgccagtgaatgtgaaagacaggcatgtcatcacttaagttttaacagtctatcttcaggtctgacttggaaacttgcataatagccagcatccaaatagggttgaaggcagagcccagatcaatacaaaacattaaggctatcagtagtatatatatatatatatatatatatatatatatatatatatatataccgctatatatactgcttatatatatatatatatatatatatagctataaataaattaggatacctcttagactgcagttgtagagtatttatacaggtacaaggtgagaagtggaagagatggtgtcccagtatcttatttgaatcacttatttactattggggaaaaaaaatgtaaggagtgtggtctgcggataacatctggaccagttttatctacaaatgtctatttaagtttccttccattagacagattctgttgacttctgccttatgggtaacagactccattctatactcacaccttcacatatttatagacacaatattgatatactgatggaaaagattggttctcattattgttaagatattggcataatgttaggtcagtgatcaagaaatgctgcagacaagaattaatgcttttttaaaaaaagatgtctgtacttttgccaagtttgaaagatatgcatgtaatatatatatatatattcacaatacataatacatgatgcataacataattactaatattatacatctatgatgtatatgtatacattatgtatatatattttgaaattctgatggtaggttatttcctgaaagacagagaattttgggagtaacatcacccttaaagttcccacttaatgaagaaaatcaaacacttataaggaccttataacttaaaatttaaagaggagttgctctgttgtttgttttgaagaagtatctatgatttgaaaggtagagataaaagatttagtgcttttcaaatttaaatgcctgttttctatttttatagctctggttattatcagaatgctacctttttatttttttaacaaggtgaattagttagtcattactgtatgtatacagtgcatttttgccaaaagttataaaacacatatgttattaatataaagacaaaactttcaaatcacagatgctaaattggcttaaatttcattgaagaagaatgtacatttgacaaattagagacacatttttccaaagaaaattataagaacaaatattagatcctttatgttaaaagtgtaaacagctagaatttaagaacgtaagaagaataactgtatatgaggaactaagtttccccaggttgtaagtttctttccagtggtagttcagtggggtaatgagaccaataaaaggaaagggagataggaatgatgatggggttctgttcgccttcagaatggaagcctgatgtcatgtggaagtagatttaattagatgtgcatttcttaaggaatccgtaaatcaagtccagactgttctctattaaatttttagggtgagcctacctgaagttctatctttgtgcgttttcattctatctgatgatacagtgctctttatgtgacctgaaaaatatataaactcatttcttctcccagcagcattcaaactcagcagtctctctcttctttaaatgtgcatattccatatatctccctggataccaggactctcagtagctgttgctattttgttctcctactttgaaacatacttttctgaaatcacctaccttgttatttctcttaacttttgagcagtatttggtgctgctgacgattttctccttgagcactcttccccaggctccagggcatcactttccactgattgtctcatctccttggctgctccttctcagcctctttcatgggcctctcttctctgcttagcctgagaagttggtattccttcagattctgtccttggctcttctcatttactgggtggttttaatttctgttattagttactttctgcatgctgatgacttctcaatttgaattctcaccaggtcttctctcccaagctctagatccatacatccagttgtttattgaccttttccacttaaatgtgacagaagtaccttaatctcaatattttcagaaactgaagtcattatcttccataccccgtcttaccccaaaacctacttctctttgtatttaatatctcaggattagtactggcacctataggtgctcaagctagatttaaatagatgcataaaatctcttgccctgaaccatatctctctgtccccacccattagcctagcttaggccaccactattgctacatttgctttgttgcagcagcctgttctcccttcctgtagtctttcttcttcaatacattttttatacttcagaacacatagaaagaacttccttggcttacagtcttacttctttgcctcctattatctctaggcttaagtaccaattccttaatatggttatcaggcccttcgtgacctcatgatttcatcattgctttcttttctagccttgtctctcagcactccccataccagtgcatgacatggatttttctctttaaaaatgtgtacgtggcttcctctctggagctcctgcctcttcctcccttaccacttttgcttggtgagtttctaattgacttaatttctcagcatgcatgatatctcctccagaagctcttgctgacatccccacttccttcctcccacttaaccagagttttgtgttttctcctaggtaaccctatcgcttacccctatcatggatttatcctaatgtattagaactgtctttttactctcacatttcccttctagactgtaagttccttaaggttagcaatgggcttatctgtgttgtaacttgttagtagttcctggaacatagtggatactacaaagctatttcttgagttgagtgtatgcatgaattactgtgacaattccttactgtttccatagtggttttgccaatgtcatcatgtatcatatcttctcttattttcagaatttctcttctaacttctataagagcttaacttcaaaacatgttgaacagtatatactgctaaatgaaaaagggaaatacagaatggtgttatggtatgcttcccttcgggtaagaaggaaggaatataagaaaatatatgtgtatgtatttatttgtgtaaaagaaattaaagcaggataaatcagaaactaaagagattggttacctataggaagtgaatggcaaaggggtagaaagaaggggagagagatggaaacaagataaaaaggataaggagggtgcaattcttttctgagaagctctttgtgttttgcttgattcctagaaacatagtagtgttttgcatactccctctctataaataaatagatcaataaaaccaggatgtaggggaacctaaaattggatacaaaaatataacagatgagcctgactttattgtgaattgatattgataacatatttacactgaagggggtgggaaagaaaagcactaatctgggtattttgactggtattgtgaggctaagggtaaaaagtattatacacaaacgcttcgctcaagttagtgaatttgtgtatcctagcagtgtggattatcaattctgaaactgctttatgtgtatgctaggattaaacaaagaagttagaagtacagaagtgggaaccctgtagtatcaaactcaatcagaggttgtagtatgaactcatggtttttagtatatacagatgtgtatatatatatagtagcatacagacatatatatatatgcagatatataaatgcaaaaataaaaataggccgggcgcagtggcccacgcctgtaatcccagcactttgggaggccgaggcgggcagatcacgaggtcaggagatcgagaccatcctggctatggtgaaatcccatctctacttaaaaaaaaaaaaaatacaaaaaattagctgggaagggtggctggcgcctatagtcctagctactcaggaggctgaggcaggagaatggcgtgaacccgggaggaggaaattgcaatgagccgagatcgcgccactgcactccagcctgggtgacagagcgaaactccgtttcaaaaaaataaaataaaataaaataaatgcaaaaataaaatagacgaatgtgtgcatgcacatgcatacataatacatgatattccctagctctgtctgaagaggacctgggaacaaagagggcctgggagcaaagacatactagtagtagtgaacatacctggtgcccagattttggtttctaattaccatctctaataaaaataaccaggctgattatgtaggtaatacatgcttatcttaaaaagtggttttattctgcttttcttactttctgtattgtaagcactgtcccatatgagaaaaagcatttttcaagattcaaagcatatccaaaagcaaggaagttttgcattaaatataaatagtaatagcaccttcttctacgtgacagaagatataaaaattaaatactttaaaaaaggaaccagagctccttggagaagtggttgattccagggcagactcaagaaaacacaagatgagccagaagcatcttctagtgccagaaggctgaaagtgcgctcaaaagacatagaagccagcctcaaagagcttccaacagccaaagctggaacaatttgagcaacaaaacaaataatggtgatattagattatagcctgtagaataaaagaaatatgaacccatactgatataaataaataaataaaaataggggggaaaggacagctattccttacagtaaaattccatttgataaatgaagaagaaatgagagaatgtaaaatcaccattagacaaacatcacaatagccattactgcaagcaagatccagcagtggatgctaacatcagtgagagaaagtttgaagagaaacaaaatatttgcatagtctcaaatatatttattaattttaagggaaaactgttactttacaggagagagacctagtagacatcaccttaaccaaatgatcacagtgtaatgagacatatcaacatcatgtatcacacatgtgatgcactgagaagtgtacaacatcatttctgtggtattagtgacaaaggcacacaacctcaatctaattatgatgaagcaccagacaaccccaagttgacaaacatttcagaaaataattcgtcagtatgcttcaggagtgccagtgtcatgaagactaaggaattatcacagactggaggaaactaaggagatataacaacagatgtgatgtggaatttcataatggatgctgaaacagaaaagggacattagtggaaaaactggtgaaatttgaataaagtctgtcagctaactagctaacgatataataccaatgttaatttcctggttttggtaattttactgtggttatataagatgttatataggtgaggggtatatggaaactcattgtactattttgttttcaatcttgctctaaaattatttaaaacaaaaaagtttataaagaggaactacaaatatgctctatggtctcttcctaaaaacaaatacatacagatatttaggataaagctattgggttatcgattgacttttgacttttataatttaggtatgtgttttaccattttgagggaaactactgaaagaacagaatagaatagagaaaaaacagaaaatattaaaggagacaagaaaaaagaagaaaatgggaggacaactggaaaacataaaatgctctttctgccagattaaggaaagtctcttttattctgagtttgctgaaagttcttaccatgagtggatgttttaagctcattaaatgtatcttctgcatctttgaaatgatcatttaatttttcttatttttttgccatatttcttttaatttttatctataattaggaaatttttctcaatcccaggctacagaggaagtttatatttttttatagttacatggtttcattagtatagaactcttatcattttggaatttgagatgccacagtaaggtacactcaacttccatgtgcaattaaattttacattcatcaggcagcattctgctaaaagaaccctctctttttcaatataaatgtttaatttttacatatagataatatttgtacataccataaatatgtagtacatgtgatattttgatacaaggataccattggcaatgatcaaattagggtaattggaacatcagtcacttcaaatattttatcatttctttgtgttaggaacatatcaattccactcctctcgttatttttaaatatataataaattattgttagctatagtctttttattgtgcttctgaacattagaccttattccctgtatctagttgtatttttgtatttactatccaaacctttttatcccctgctcctcactaccctcccagcctctagtaactgtcattctactctcttatttccatgaggtcaatattttagcttccacatatgagttaaggcaggataagaacatgcaatatttgtctttctgtgtctagcttatttcacttaacgtaatgtcctgtagttccatccatgttattacaaaggaaaggatttcattcttttatgtctgaataatattccattgtttatatgtatcacattttcttcattcattcgttgatggacacttaagttgattacatatcttgcctagtgtgaatagtgctgcaataaacatgggaatgcagatctctcttcaatataccaatttcctttcttttggatatatatacagcagtgggattgccagatcatataatagttctatttttagttttttgaggaacctccataccgttttccatagtggttgtattaatttacattcccaccaacagtgtacaaacattcccctttccccacatcctcaccaacatctgttactttttctcattttgataaaagccattttaactggagtgagatgatgtctcattgtggttttgatttgcatttctctgatgattagcgatgttgagcatatttttcatgtatgtgttgcccatttgtataccttctttggagaaatgtctgttcaatcttttacccatttttaattggattttctttcttttttttgctattgagctgtttgagaactttctcttgtctatcaatcaactatttacctatccatttttaaaattaatataggattgatggattcattttattcagtggttatacttcactactgcctttgcttattttgatactgaaaatttcccagatttgagcagaggaaaataattcaggctcctgtgtcctccttccctctcacccctccctggctcctctttctgttcttccctttccctctttctttcttgtaattttattgagatataattcacatgccacaaaattcaccctcctatgtccttttaatatgcccccatcatttttttccctaattttctaattttctggtacaataagacatttttggcctattttgtaccttcccaagcttgaaataagcaatttctcctggttctttttagtataggatattattaagaaaccagtatctgagtagtagttgtgcttattgctattggtgtgttattgcttcttgattcttcagtggacaggaaaaacgtacgaagaagtaaatgtttatgatttgtttgctcttctattccctagactgcttttttaacatctaaaaatggtagctcatgaaatatactcttttgcactttgattttgcagggtaacagtgtaccctagatatcaggttctaccagttcatagagctctttcttattcttgtctaagctttatagttctccaatttatggatataccatagtttattcaaccactctcatttaagtagtttcaactgttttgctactgcaaaaaaatgctgtaatttattactttgtgcagatatattttcattttattaaaggtattgataattaattttaagacttcatcttagctatttcttaaaactttatcaaaggcgctcactaggggtgttactgactgatttgttccaccttattttttatttctcatttactctctggtagatatagtaatgtacagtgaaatagtgaagatgcagatagccaaggagtagaagagagtagggtatgagaacattaactcctaaataataaaggttggctacttagttgttcccatttcacatgtacaaggctatttgcacctagcttggggtttttagttgctggcattagtggtggcgctgctatctttgtcttcaggtggttcactggtagaatatttaaaaaggaaggtcctcaaagactgtccacttcaacttctccattgtgcatgtggggtcccagtgcccacaggcttacctgatatcacatagcattttaatggtgagctgtgactggaaccagatctccaaacacatgcttgttccacctacaccacatcatctttccttttacaaacatcagactttggcatggagtgggaaaaactttttttgcaaatagtgaatataagaagctaaataacttattttgattttaacttttaaggtcctttatttttttgctccaatttttgctgcaactctttgccctttcttctcaccaactgtgggtcagtggtaagcagcagatacacagtgcttactatgtgctggccactttttaagcacattacacatattaaagcatttatcccttccagtcatccaacaaggtagagatgatttcagatgaagaagatgaggcccagagaagctaagtaactcattcaaggtcacatgcatgttcaaggtctgggctgctgattgataaagtcctggcagcacagacaagaatatgtctccctgatgtcttttatttttttcccctgccatatttggtaccagagccagagatcccctgggaccacacagattatcctagaaatttctgatacagggaagaataagtacttcaattgtactggaagtcatagaaaacacacacacacacacacacacacacacacacacacacacacgcgcacacacacacactttcactatttatttattttatataggttatgtgtaaactatatagagagagtttgacaggttatttcagagtgagtggaaagactttcaaaagaaaatttgaagacattttaaaactttttcctttcagcagttaattgattgctatttttaaatttaaaatatgcatactttaaatacctcaagatttcttgaagttataacttgggcttcttgcttacgattaattaaaaagaagtgatctttttattcacaagtggggcttttatctggcttctactattatgtaaccttatctgacttgaacaggtctggtgataggatgatttaccactctaaacttcaggacttgaggctggtaagtatttgtcttttaaaagtatgaaatgatttaaaaaaagatattccaacctctcccaagtagaggaggacagagaagaattgatgctgcatgctcttggctggcccagtattcctttcaactttttagttgaattagagtggtgttctcatgggttcaatcatgctgtcatgaaacagttcatcagtatgtctcttaaaagccttaaataaatgtcctcttggtacacatacaccctcccaagactaaaccaggaagaagttgaatctctgagtagaccaataacaagctctgaaatggaggcaataattaacagcctaccaaccaaaagaagtccaggaccagatggattcacggccaatttctaccagaggtacagaaaggagctgttaccattccttctgaaactattccaatcaatagaaaaagagggaatcctccctaactcattttatgaggccagtatcatcctgataccaaagcctggcagagacacaacaaaaaaagaattttagaccaatatccctgatgaacatcgatgtgaaaatcctcaataaaatactggcaaacgaaatccagcagcacatcaaaaagcttatccaccacaattaagtcagcttcatccctgggttgcaaggctggttcaacatacacaaatcaataaacataatccatcacctaaacagaaccaacaacaaaaccacatgattatctcaatagatgtagaaaaggccttagacaaaattcaacagcccttcatgctaaaaactctcaataaactaggtattgatggaacatatctcaaaataataagagctatttatgacaatcccacagccagtatcatactgaatgggcaaaaactggaagcataccctttgaaaacacgcacaagacaaggatatcctctctcacctctcctattcaatgtagtgttggaagttctggccagggcaaccagacaagagaaagaaataaagggtattcaattaggaaaaaaggaagtcaaattgtccctgtttgcaggtgacatgattgtatatttaggaaaccctgtcatctcagcccaaaatctccttaagctgataagcagcttcagcaaagtctcagaatacaaaatcaatgtgcagaaatcacaagcattcctatacaccaataacagacaaacagagagccaaatcatgagtggactcccattcacaattgctataaagagaataaaatacctaggaatccaacttacaagagatgtgaaggacctcttcagggagaactacaaaccactgctcaacaaaataaaagaggacataaagaaatggaagaacatttcatgctcatggataggaagaatcaatatcgtgaaaatggccatgctgaccaaggtaatttatagattcaatgtcgtccccatcaagctaccaatgactttcttcacagaattggaaaaaaacactttaaagttcatatggaaccaaaaaagagcccgctttgccaagacaatcctaagcaaaaagaacaaagctggaggcatcacgctacctgacttcaaactatactacaaggctacagtaaccaaaacagcatgatactggtaccaaaacagagatatagaccaatggaacagaacagaggcctcagaaataacaccagacatctacaatcatctgatctttgacaaacctgacaaaaacaagaaatggagaaagaattccctatttaaatggtgctgggaaaactggctagccatatgtagaaagctgaaactggatcccttccttacaccttatacaaaaattaattcaagagggattaaagacttacatgttagacctaaaaccataaaaaccctagaagaaaaccaaggcaataccattcaggacataggtatgggcaaggacttcatgactaaaacaccaaagcaatggcaacaaaagccaaaatagacaaatgggatctaattaaactgaagagcttctgcacagcaaaagaagttaccatcagagtgaacaggcaacctacagaatgggagaaaatttttgcaatttacccatctgacaaagggctaacatccagaatctacaaagaacttaaacaaatttgcaaggaaaaaaaacaaccccatccaaaagtgggcaaaggatatgaacagacacttctcaaaagaagacgtttatgcaggcaacagacacatgaaaaaatgctcatcatcactggtcatcagagaaatgcaaatcaaaaccacaatgatataccatctcacgccagttagaatggcgatcgttaaaaagtcaggaaacaacagatgctggagaggatgtagagaaataggaacacttttacactgttggtgggagtgtaaattagttccactattgtggaagacagtgtggaggttcctcaagtatctagaactagaaataccatttgacccagcgatcccattactgggtatatacccaaagaattataaatcatgctactataaagacacacgcacacgtatgtttattgtggcactattcacaatagcaaagacttggaaccaacccaaatatccatcagtgatagactggattaagaaaatgtggcacatatacaccatggaatactatacagccataaaaaaggataagatcatgtcctttgcagggacatggatgaagctggaaaccatcattctcagccaactgtcacaaggacagaaaaccaaacaccgcatgttctcactcacaggtgagaattgaacaatgagaacacttgcacacagggcggggaacatcacacactggggcctgatgggggattgaggagtagaggaggaatagcattaggagaaatacctaatgtaaatgacgagttgatgggtgcagcaaaccaacatggcacatgtatacctatgtaacaaatctgcacattgtgcacatgtaccctagaacttaaagtataattttaaaaaatgtcctcttgctaagaagtctgaaaattggattcagacatatctttgccctatcactttatttttttatttgtaataattttatactattatcatgccttcacacaagttatcacatttaatttctacatagatcttgaaataaggagggaagctattaccaccagtgtgtagagaaaactgagtcttagagattttaagcaatttgccccaggttgcagtacagtggtgaggtagagctggtaggaaatgagtaagctggactcctgactccaatgcttgttcttccctacaaggcaggacactcccaagtgggatgacttgcgatcccagaaatcacaatagttgttcagctgtggtctggaatggagcaagacaatgccagagactgcttcttcttttttcacaggaagtcacctgcttgtgcaggccctttaagactacttttgcactgctctacatatttctcttgttttggtggagaactctgctaaatatttgaagcctagttttggcaagttctgaaagataaaccagaagttacataggaagttgagtgtgttaccactcacctagcataatctccctgccacacacagcctgaaaacaaaaacaaaaaccaaggtttcaggtaggaatttatgcttttacgttgcattgccttttgggaaggactcatcgtcacagctgtgttctgagatgcctgagctgttaaaatctatcccatatcagtatataagctttcatatttcctgtatctctaggacaaaggacaatggtgtagttttccaactggattcagaatatacttagcaaagcatatgcaaaaacatatgcaagaactagtatgaaacattggagtaaagcccaaaggaaatatgcattaaaagtaccagaacatgaaaatcctgtgttcaaagaagcgcattcagcggctttaggctgctgccttttgcaggctctgctctcccaccaggcttcagggctgtctgtttctccacagtcagaaagctaaagcttgctctttggccctaagtcctgacaacttgaaaatcttagtattgggcattcctatttgaaatccctaataaaagtgggaaatttttgaagggccatccttttcagtgtttagcttggaattcatcctgcccttcaggggcctccaaaaaagacaaaccacttcatcctctgaaacacttcattatgagctgaaagggagccagtacagaagaccctattctatctgagatggaacaggacagtatgtttgtcttgtttcctagtattgccaggtcttagggtcaccaagccatccactgtctcaagttggtcttatttatttgtgtcatgcaaaggggaattcattttctaaattgttaagagttaaaatatgtttattacactctttggaaggtttggcccggcgtgtatcacagccctgtcttgaagcactgaggtttgttttccatcaattttcgcctcaaacatgaaagaagtttcaacagtggctaggatattacctgtcattttaatgatcagatgaagagaagttaaattataagatgacctggacaacaaccagacttcagaatccatttcaataaagtgttagtgagcttcccagtacccctgatgatggtgaaaaaaataaaatgtcagccaagcatttcaagacagattagagaattacccaattccctccacctcctcactctaagtctaaggcaaatgtttgtttaaaaatttaaaactaagcagtttatgttcaactggatgaattcattcatttgggacagaacaccaaccaaaaaatgtaatctataatgtttgcttcatacctagtatattcttcatgaagaactctcttttctgtgtcattactcaattggaacaccataaatgcagcaaaaagttttatttaattattagctgttttaaaaccaatttatttatgataacaataacatttgtcgaccacttttgtatgcctggcatatccttatgggaacttttatttaatcttttaaaaaatcctacaagataggtacttattacccccctactttatagatgactgaatagaggcctctgctggttaggtgacttgccaaaggccatccagctgtggagcaggaactgaagcccaggagtctcactccagcacggtaccctcttcactagatgattttctgtcatgtagctcaattagcccgggtaacatggttggttgatgacacgtctactagatgatcactcgagaaaagaaagttaatcacgaggcattgtttttcagggacaatgggagaaattgactttttaacatgcttatttagcatctgtataattgtagtgggccctgtagaagtaattttatagaagtagacttaggtagaaatgaagtaggtaacagtcaagaaataagattgcttatttgtatgcaaaacaatagcctatggcttatgttgccaagaaaagactttgtttttcctttttaagtgatgactacccatatgctgctcaaaagagaccagagaaaacatcaaagaaccctacaagaggctgaaccagagaatattctggaaggttgttaaagaataatttcactgaggagaaattttttacagatgaaactggcagatgggagttattcattcatctcttccagaaatagctgaaaggaatacaatagaaatcattctattttgaacatatatagggtgatggattcagccaggatgctaagacagttttggattttttcagttttatatgcttagggtttccatgaatatcactgaaacccgtgattcagtaacttggagtgctagaggtttaatgctctctctgcattgtgaaccacatcatttagaacagaacctttggaaaaagtaaaggttgttttgaacattggtaagtatccataccaagctgtgttatacagccagtcattggccatggccgtcagagaaagcctttgtctaccacttaccgaaaggtgtgtattttgtgtgtatttttgtgtgtgtgtgtgtgtgtgagagagagagagagagagaggaagagagtgagaagaatcttttttatttgtttttttttgttctaaaatgtccatcttgggccaagacactgtgtacttgcttcggggaaaaagactataaaataggacacttgtttcaaaaataagtagtttttctagtagaattaaatgatagcagagtaagttcttctcactggcgaaatggaaggtcactgtatgtccagagactttatttacacctataaacgttatgactgtggcacattaagcccatattcttgtacataaaaagccactttacctcagccttaacttgttcctgtaaaaacagagctttgttttatagcctgtctagctgtatctctgcttgacaaatagacatcaaataaagaagcaattgtgcaagaaggctcatgtaacttactcagagactttggctagatctacttacctgaacagccttcagtagtaacaaacggagcccagctgataaatagctggttttaattttcatgaaagttagaagtatcacctgccaagagggttggttattcttgtagtttgggttcaaaagccttgctggttccagaatgatgatagccactaacatttatatgatattctgaccttttcaaaatcatttatatgatctcattttatccttacaaggtttttagaaagtaaaagccataatatatatagcatatactgtttcagtttgtttttcacgcacatgaatttaaacacacacgatttccagaataatttactatcaattccttaatagactaatgtactctttttttttcttttcttattttccttttcttattttccttcttttgtgttgtctagacagttttacttccaattattttacaccatggttagtcatcggtgagcttccaggcctttgcagaacattgtgattttttcttttcttttctttttcttaagacttgatgtaaaatcatgacttgtcttttttctgcttggttttctcacctacccctagcccctctttgctgtaatagatattgaccctaagtccttgagttatctcagtcagggcactgggtgagggaaggcctatcagacatctgagtggttgttggaaaatatggaggagttaggccaactaggaggcagaggtgttccaggctgagtaaactgtatgcatgcaaaaaggcacagaggtggggcacagtgtgaggaggctcggaaatgtaatgtgagcagacccatggggctgcttggaaggggtggtgtccatcagaggaggctgggaaggggctaagtgaaggccaggacaggttgggagaactgcagtctactccaaaaagctaaacagaaccacttaaggcttttaagtacaaggatgatatgatcactgttcccttttcatagttataccttgtttctacaatacacacacacacacacacacacacatacacacactgcatctgatgctcacaaggtcaaagttacatagttaacatttctggacacttttgcccttcaggttctatttctactcacttgacctcctgcccattcattttattcaattcagtaaacatttagttaggaacatcttaaagccctccaggagcagatctgccacattgtatgtttacatggacttaaagagaatatgaggatttgggtgatgaaagacttttcttaatttaaacttggcaacatcctttcccatcctcatactttcttgttaaatgtgtccccttatgactgccatggtgttgcacgtctgctcagtttgtgggagctccataccacatctattcctgcctgctaccagaggaccagcctttggaacaagactgctggtccagaactaagtaatgtgggagcctgtactttctcctgtattttgcattatcttgaatataccctcttgtttcattttgctggtatctacaatttgacccgcatatgtctgaaaacagaattctattttttctaagactaaccttaccaagctcagacatagtagtaaagaaatctcctttttgactacttcagtgacatatcttaatatgaaagcatttagcaccatgcctgacaagtgggggatgctcagtactttcgtttcctctcccctctaccctttctccctatttttatttatttgtgttgctttttggtgttttggttgatattgttgcatcagcttacatgcatttgatagatccatgatagatagataaatagacttctttatctatagacagactatctatagactagatcttcctttcctttcctgtcctgtcctgtcctttcccccttgattctctttatatatatatttctcacattggattcttgatatttggtttctttaattttcacatatagtttttgtttgtttatttatttattgaaagccattttatccaagtgattgtacttaattatgggagatacaagccaggataagataaaatcctcagcataggagagtctggtacaggagatacacaaataaagacgccaaaacatgtgatgtgccctttgggaacatctagggtatttgagagctagggcttgactctggatttggggctggaaaaaattttacagaggaagtgacctggagaggccaaatgctacgaacatggttttagagccacgtttttggttgagtttgtatcatagcttcgcactaactagctgtgtgaccttgggtaagttatttaacccctctgtgcctcagttttctcatctgtaaaggggagattataatagcattaccttgtagatgttgttaccagtgttgaatgttattatatatatctcatttagaatagcacttgccttttagaagcacttgatagatattagccattgtcattattattattatttctataattattatcatagttattctttaagctgattcatgaagaatgttatttaaaggaacattcctggcagaggatataatttaattggtgttactttgaatataataacccctccactatattttctaagtggatattgttaatgcagagagaaatgatcaatatttttatacttatattttacatgtattttgtaatcttctacctagtctatgtgataggtggaaaataagactttttattttatatttttggaattttttaggtctacaattatatcatctggaaattatgattattcttttttctaatgcatacatttcttcctttctaaaatatcttattatactgctttgaatttctggaacaatgtcaagtagtagttgtgatagctaagatcctcatttttaacctaatgctaacgtgaatattttgtctgctttacttataaattttatgttgcctattagttttagatccttattcctagttcactggcatttttaaaaaaattagagtccagagtgctcatcattacactatggaatctctatttttttttgaaaattagaagtggatgttaaatattatcctctattgagattccgttttgatatatttatttgaggacttaattgaatcattttgcatttctggatcaagttatctttaattatacttttaaaaatatgattctgagtttgaattactaataccttaatggattttgcatacatatacatgcatgagattgctctcaaattttttcctgaatgagtttgtactcagggatttgggtggttttatagcatggtgatgctaactttggaaaatagatcttcctagaaatgttaaatgttctaccactgtccagcatctttagaaaatgccaagttcccttccctaagatcattcttttaattatttttcctttatatttgttgtaattaaattttatcctctatgagctcctttgaattttcccaactttcagaagattgattttgtctttttcctcaacagaattggtaaaggctttattttccactttattattttacttctttttagttgtaaatcctatctactctaatgagccactttctctcctttgtaattatatgctggattcctatagaagtatccaccaatgctgaattcttttaaaacagtgcaagatgtttttagacagtctcagggtctatcttcattggtgtctctttaagttacttctgtgctaattccttttttactaagaggaaacttcagtgattttcccaaaccctttcacttttcttttgagcaaggggtgtagtaggtgttgaggatatggagtatataccatgatcttctttttgccagtctagaactcagattgtttggacagtaattcacaactgcatttctatgtgtctttcctttctgacaaggagaagcgagagaatgggatagtttagacttgaattttggaatcagcatataacagatttgaattcaagttctcccaatcactatgtatgtgactttgagcaagtcacttaagctttttacagcttagtttcatcattagtgaaatgagacactaatcactaccattctagatcactattaaatgagcaaacacaaaataagtaacactatggctagcacataagtgctaaaaaaaaggtactaatgtaattattattcaattatgattaacatattcttatataaaaattgcatccggttcatcacccctcaaaacccatagtctggatctagttgtctggattatctaaagtgtagataatctgtacattcctgccttgtacattcgtacctttttttgagtttcttcaatttctgccttctgtgtttctctcactactgcagtgtgctttggtagaaaatactcatgacacagcagacctgggctctactcctaacagggtcattggctcactgtctgaccttgggtcagtaaatctttttatcatttattataataactgccaattactgagcatcactttacctctgatgccttatataaggttttatttactccccacaatcagttttaggaagatactttcatttctcaaatgaagaaatagaaactcaaaggtattgggtaatttgcccgggagctaacttgatgtgtggtttttctgggacataaaggtgcagattttctataaggaacttaaacaaataaacaagtaaaaaccaaataacctcattaaaaatgggcaaaagacatgaacagatacttctaaaaagaagacatacaagcagccaacaaacctgaaaaaatgctcataatcactaatcaccagagaaatgccacccaaaaccacaatgggataccaactcacaccagtcagaatggctactgttaagaagtaaaaaaaaataaataacagatctgggtgaggccacagagaaaagggaatgcttatatactgtaggtaggaatgtgaattagttcagccactataaagagcagtttggagatttctcagagaactgagagttgaactaccatgcaacccagcaattccattactgggtatatatccaaagaaaaataaatcattttcccaaagacacatgtacttgtatgttcatcgcagtgctattcacggtagcaaagacgtggaatcaacccaggtgaccatcagcagtggattggataaagaaaatgtggtacatatgcaccatggagtactatgtagccataaaaaacaaaacaatgaaagcatgtcctttgaagcaacatggatacagctggaaaccattatcctaagtgaactatgcagaaacagaaaaccagataccacatgttctcacttatgagtggaagctgaacattgggtacaatggtcataaacatagaatcaatagacactgcagaatgtaagatcagggagggcaggagtgaaggttaataaaagctacctgttgggtactatgctcactccctgagtgatggatccattcatacgccaagcttcaggatcacacaatataccccttccaaacctgaacatgtacccccgattctaaaataaaaattgggaacaaaaaaggtgcagatttttacctactctactgctcaaagttgtgagacccagggtcaggtgaagttctttcataaactgtggactatgatgtcaatggaacagctctctcagctcagtattttctctcctggccaccaccctgtcatccctataccttctgacttgtggattgtacagtgagccacttaccctcattccctctgggttttcacatcctttgtttccctccattctctcccttccttttctttgttctgtagtgtttccacagagctgcttcttggagctcctattctacatcccctttccttaaccagagagagctctctcttctgcctgatgttttctgtttcagttgatctttttggtgtttgataccattttaaaaattgttttcatagcttaattgaaggcagacagttctacatttcctctttgtgtttataaaagcttggtttgaaaaagggcagtgcaggatgtataggaggtaagaaagaaaagaacagaaaccattgggaagggctgctatgttccatcttcaaagaaagtagagctggggttagtccaattgtttgacaattgcaagggagtcttagtaccatagtttggacaaaacctgactttttattgccaaaaaaatataagatagagatggaggtaaatgtgaataattcaaagtaatgtttaaactttcaggatatttcaccttctctggaattagagatttatgctagtaaagagttagggaggaatttgaaatgtttatgttaccagagtgtaaaaaacattgtccagttgtttatctaatctttcattgggcttgcttttaaaaacacgtttagatttgaagtagcctgggaaaaataaactgttccaggccataacttgatgccccagtggatataacatggatccttcttcattcgttttgagaaatttcccaagcagacagatgtctttataccttcttttgcagtttcttcatccataaataactattatcaagaactggaattacaaatgctctgttatttctttttaactttgattcctacagaaattactactgggatcttatttcttctctggggtggacattttgttgttgtacctattcagtctcacaaattctccatgtgtttttatccagtgaaattcatttcctaaagatttgtatcagctaaagcaaagaactttttgagaaccttttttggttcacagagcagccaggtctactgggggagtagaaagaagagattctatactgtgttctgttgtaactgctttccaacctcccagcggaaaaggcagataatactatgtaaaaattagaattgattttggtttccgttgcttcctcctaatctctcagcctaaattcattcatttaagttgacaactaaatatcgtgtgcctgttgtgtgccaagcgctgttccaagacttaggatactgtagccaccaaattagatagagatccctgccattttggaactcttattctcacaagtgaagacaataagcaataagcatgataaataagtgaactatgtatgtgagaaagtagtaagtgctaatgttaagtgttacagaaaaagaaaatgtgtgtcagaaaaggggtgggggccacatggtcataatttcaaattgggtggtcaggataggctttgttcacaagacaatttttgaagaaagacttgaagaaggtgagggaattattcatgcagaaatcagagggacaagtgtttcaggtaaagggaatggtcagcaccatccctaaagtgggaatgggcctggtgtgttccagggacagcaaagaggacagtgaggtggtgtggtaggagaggaggctggagggaccagatcatgtgcagcctttgtgcagacatttgctcatttgcttttcctctgggtgaaatggggaaagccattttgaatgaaggaatgacatgactttaccttttaaaacgatcacgggttactcttttgagaatagactatagtgggggtcagaggtaaaaatgggcagtccagtttaagggttactcagagaagcaatttagcaatacagtaattccctccttatccatggaggatgtgttctgagactcccagtggttgcctgaaactgcagatagtactgaaccctgtactatgaaaaaatgttgtgttttcctatacaataacaggcaggcagcatatgcagcatggatgtgctgaacaaagggatgagttacgtcccatgcaggatggagaaggatgacccaggatttcatcacactacccaaaacagagtgcaatttaaaacttgtgaattatttctggaattttttatttaatatttcagactgtggttgattgcaggtaacttaaactgcagacagcaaaactgcagattactgtaattcaggtaagagatgatgatagattgtaccaaagtggtagtagtggtgagaaatggtcttattctggatatatttcaaatgttgaaacaatagaatttcctaacaaaatggacatgatatgtgagaggaagaagggaatttagaatgactctagtagttttggctcgagacactgaaagggtggagttgagatggggaaggctgtggggtgagatgggaaaggtttgtgaaggataagagtaaagtttgggacatgttgagtttgagatgctgttagagatctaagtggagatattaagtaagaagttgggtatgaatctggggttcaggagagaaatctgggctgaagttacaaaattaggagttgtcagcatgaaaatgttactttaaagccagaagactggataaagtcaccaagggagtaagtttagaaaagagatgaggaccaaaaactgagtgctggatattgtaacttttaggaagtttgggagaagagaaggaaccagcaaagaatactgaaaaagagcctgcagtgaggtaacaggaaaagcagtagaatgtggtatcctagaagtcaagcaaaaaaagtttcaaggaagactgaatgatcagctgtgtcaaatgctgctcacagatcaagtcagctgagagctgaaaattagcccattgatggaaccatgtgaagatcattgtgatcttgggcagcttctgtagagtggcagaggcaaaagctagactgggatggatgtgtgagagaaaggaaaaaagaagagttgtaaagagcatatatagagaactcttcggagaagctttgctgctaagaggagcaaagaaacggaagaaaatgctggcatgaaagtggggtcaagagatagttaatttttcttgatttgatgtatattgttgtcctctattattgatctggaccctaatctttgttctttctttacaaagctgttatttcttactggccactgtttgtttttttgtttttttgttttttttttttttttttaccagatcagacaaccaattaaggttttatttgaatatttaacccaactattggtgttcctagatagctatagttgctgctctgtcttcctaaaatttactaccctttgtaccttcagttccccactcatcttacatgagaatctcaggcttagactggaataatttggcagtatagggcaaaaatgatgctgatgctgtaaatgcttattattataacacttgtgtatcatttactatgagtcaggcaccatttgaagcgctttacatccatttactcacttaatctttacaataccctatgaactaggtataattattatctgcattttacaaataaggaaattgaagcagagaaagatcaagtaaatagtttttcttttttaaaaaaaaaactaataatcatggagctgggattaaaattctgacggtttagctccagaggccatgcttttgaagcaactggagaattttaagagcaggcagttagctagagagatttcattttacataatataggaatttgcttgagtgaatgggttatgtttttggagaaacaggatagaatacaggagctgattggtcatttccttagatttactagcctatacattagtgggctgtgctcagcccacaatcctggaaggatgtggtggaacattcttaaatgatgactttttttttaaaggctgtatttcctcaagtttcatgaattcctttttaagtcaacaagtaaatattaagcacctactctttgcataagaggaaaaaaatttaactccttccctctatatgtttattttcctgtgggaagctgatttgtttatcacacaggctatagaatcatttggaaactaaaatagaaagggctttgcatgtgaatgtaatattttactattttttaaaaggatccttaaaatttctatgtctttagagatgaggtgtgaactaaatgattctttgttaagtgttatttcttagagcactggtgagcagttgccactgaatccttcattaataatcccttccttttccagaaggacttgccaacacccgtaaagtattcactgggagaattaaagtcatataaaaataattggtgtttgcttccttcaaggcatacatttaaatacattgctctatttctctgttccttggctgcctcctatgtttagtaacactagatcagcagacttcctctttcaaggttcagctgctggccattacgatttcccatgagaaagcaaacctaccactgttttacccttttatcttaatgtttcatccatttgtgtcatattatcttgtgggtttgcatttctcagtagtaatagcactgctggtaaatagaaaacaatgaatgtgattatgtacccctggccgtcgtcgccatcatcatcatcatcatcatcatcatcatttgagccctttaaaaattcctattgtaatctcagaggagtggttatctatgatagtagactatccgtggtttcattttaaaagggatgtgtacagtattttcatgtgaattacttttaatgccttggtgacaattttgccattcaccactgagttcagctatgaacattccaccactggtctacttactccatcctcaacttttttacctgagcgttttttagaaagtcatatataaatttatgctgtattcatggcctgcagtttcatgtgtatttggctgtaacttgtaatgactaatatatattgggagttagaactgaaaataatagctaacatttactgggagtctttctctgtgccgggcattgtgatgagccccattacaagcatctaatttaatcctaatctctcagaaagcacatgctatattttctgcattgaaaggaaagggaatgaaggcccagactttgactttgctcaagatacatgatacttgccatgtcatgtcccctttcagagtgtccctttctatgatcaatggtttagtttgccactctgtgtgtatttctcttttctttaaaatacgacattgtttaatgggctgttaaacaaatatatcgctagatagtagagttgcctgggaatgagtcctgagtgtttcttcagtttccttgtcctatgtggaaggatatgataaaacaggcacactccagagctgttgtgttcttttctgtcttctctcaacctgtttccaagccagtgacccagctggactctcagtttcctaatcaccacctagactctgtcattattaaaaacaacacaatttggtcaagattatggcttttaattgggatgtggaaagaaactcaagttgaagaaatgttgccaggatcattggggaatgaatagccacttgatgcaagagggaaagctgtgaagaacactagctctcttattatgtggtgtccaggcaaaggggagttatgctcttactatttcatttcatttcatttttttgagaaattattattgcagaaccattggcttcctttctttctcaactgtagctgtaatgttttatttgtgcatgtgtacttttgagagagtattggtctctgaagagggagttagaaaaggaaagtatttgaaatggaaatatcttaaaattatgtgtctttccaattgtacattggacttctttaggatttagaaacaaaatggaaaataaaaaatcacaaataccttcttttcaaactagaaaacattgtactgtatagtgaagaattagttgaaagacagtagatcttacatttcattgcagagtgttccagacattgatcaaatggcaaggaaaagcaaatattaactttcttttcctccccaccttctcacaatggctgggcaatacttttgtattcctgtttggaggatttaatggccttgttaacatgtgtaaaaaccctgtgattgaagactttaacaaaatagtgagtagaggttttttttgttttgttttgttttggttttttaggttccatgtttatgttcttactgggtgtgtgtctttcctagtgctctaggttaagaactaaatgtgttagaaaaaacagatgtaatgcaaataaatagaagagttctcatttccttcagtgaacagagctctgagttcctgagcagtaattttacagtaccttctcaccatatcagaagaatttgtgctgaacccagctgcttttctctgagttttgttgtatcataactgattaacaattgatagggccagacagcaattcacctacatatggtagggggtcgcaatgcaccaacatagtgtagagaccgctcttgccaacaattaattggggaattcactttatgaagccctgtttacagactgacatctggagaaattcttaacctggatccattccaatctgtaggatttatggactgtgcttgcttttttgtaaatagaactctttttctgcttagtacattgtgtttacataattatcaatggatgaaaatggctatgtttctgtaatttcttaattctcgccaccaagtgagtctaaattctaaccagcaatccagctaaaagaatacttggacacctatcattattcaagttgtggaaacatcttaatactaggagcaccctgctctcttaaatcccgactctctgactggagcccttataccctaagggacttagtgttcagcctttacgggggttttaaaacttgttgagacacatgctggacctcttaaaatgtattagactctcttttattcacacgctttatctctgctctgaggtgtgaaatggaaatattttcatacatgggtacatgcatagtcttaaacacgctttcagttcccaccatgttgtggggatcaaagttggttatcaggcagcggaactgagctccatacatttcgcggggcatcctattggacacacactacagtgaccttcacctgcccctctgcagctgaacactgttgtctctgtcaatgtggtcagcattgttttgcaaaaacagggagaaagaaaagtcatgggatggatttacaaggaacgtagaaaactgaatatcatatgttggcactggaaacctaagactatatagaaaggcatttttttctgctgctttgctgagtttgcaactgtaaaattatacctggttaagggggttttgcctctatatgacaacacagtgaagagtagagtagaaatggaaatgagagagaaatggacataagtcttccagtcttacctagagagcaacagcagcattgaatggtgtcaacctgattcaccatgctgtattaagagcacagtaagcaaaatgttccattcccaagggctttatttccaagatgtgctttgatgaggtctgtgcctgttgtatttattaagaatctcctatatatatgttattctggaaaatgtctgctcagtgagtgcctttgaaaacccaatttcataagaccacacatctacaaccatttcatcttggacaaacctgaaaaaaacaagcaatggggaaaggatttaatggtgctgggaaaactggctagccatacgcagaaaactgaaactggaccccttccttagaccttacataaaaattaactcaagatagattaaagacttaaatgtaaaaaccaaaaccataaaaatcctagaagaaagcctaggcaatagcattcaagacataggcatgggcaaagacttcatgacaaaaccgccaaaagcaattgcaacaaaagccaaaattgacaaatgggatttaattaaactaaagagcttctgtgcagcaaaagaagctatatcatcggagtaacaggcaatgtacagaataggagaaaatttttgcaatctacccatctgacaatggtctaatatccagaatctacaaggaacttaaatttataagaaagaaacaaccccatcaaaaagtgggcaaaggatacagacagacacttctcaaaagaagacatttatgcagccaacaaacatgaaaaaaagctcaacatcactgatcattagaggaatgcaaatcaaaactacaatgagataccatcttacaccagtcagaatggcaattattaaaaagtcaggagacaatagatgctggtgaggctgtggagaaataggaacacttttacactgtcggtgggaatgtaaatgagttcaaccattgtggaagacagtgtggcgattccttaaggatctagaaccacaaataccatttgacccagaaatctcattactgggtatatacccaaaggaatataaatcattccactgtaaagacatatgcatgtgtaattatttacaatagcaaagacatgaaaccaacccaaaacccatcagtgatagcctggataaagaaaatgtggtatgtatacaccatggaatactatgcagctataaaaatgaatgagatcatgtcctttacaggaacatagatgaagctggaagccgtcatcctcaggaaactaacacaggaacagaaaaccaaacaccacatgttctcacttataagtgggagtggaacagtgagaacacatggacacaaggaggggaacaacacacactggggccagtcatggggttggaggcaaggggagggagagcattaggacaaatagctaatgcaagtggagcttaaaacctagatggcaggttgataggtgcagcaaaccactatggcacacatatacctttgtaacaaacctgcatattctgcacttgtatcctggaacttaaagtaaaataaaaaaaaaaacccaacaatttcacagaaatgttggctttccaagatggcccctgagcacagaacagaaacacacacacacacacacacacacacacacacacacacacacttatatatgtgtgtgtgactattgatacatataattgtagatatataattgatatataattatctatctatctatctatctatctatctatctatatataattagtcaaaaaaattcccaccatcatacctttaccaattgggtgctcttgaggaaaagttaagtccaagtgagggcagactaagccctttggtctgaagtccagtgtggaagaagagaggtcatggaggatggatcagaggaagtgcagtcccactttttctccataactttttgcattttgtctccattgtaccccttgtgtaagtccttgtctgtgtttatccatgattcttcctcgctatacctcctattctggtttacgttcttcttactgctaatatattttgtatgatttactattttgtcatttacaccttttgtaaatcacctctaatgtcttgtgtagaagtgcatacacagaaagataaaatatgttatgatccattctctctcctcccctttgcttttaatcctgtctccctctctcctgcccatcccccttccttctattcttccattttgccaaaaactttctaaatactcagccagtattgctacacaagcatacagcagatgcctggctttttatagcttacattctccttgggctagaaaaaaatatttgaaacaactggaaaactaacagagtagagaattatcagaaaatttatacatgtctatgtacctatgtgcatatatatgaatcatctctctctctctctctctgtcacacacacacacacacacacacacacacacacacacacacacagtaaaatttctccaaatgaatatatttatagagtctctgagtctgagggaagcttcatatttaagatagtgcgatattcttttcaaaggacccattcctcacactgcacatgaattataaaccattgaaatgaaatctcaaaaaaacactttattcatcaagtaaatcttgatcaaaagaaaaatgtcactggtgtatatttttgaggtttctgctgtttttaattcttagtggcaattcaggtcatgcaaacagaagattctttggcaagtcagaacaaggtctgtggtcatttgtgattctcttaatgtgtctccttgcctgattcctcttaaatatatgaagaaaaaaagaagaaaagattttctcctctgtgaaggagtgggacactctcatccaatacccagtttattacaaaggtcactattgcaagaaaataaaccagcaaagtcttcaaatatacccacagaacagcttgccagccctctggattttctgtatcactgaaaggaaggactagttaggacggccaactcacaagcaaatccattaagatcttcctgcaaaaaaaaaatgtgttattgagaaagccctggtgcgataggaaggaggggaacctgcactagctctgggacatttgtggcatcagttcccctctctgagcctctgtcttgatatctactacatgaaagtgattaaacctaaagctacagttctttgattccaccaaaaaaatggtgcagaaagtgcatgtataccaaaaaaaaaaaaaaacaaaacaaaaacaaatagaaggcaggaggtgataaaatgcacggtgtgctgagcgtgatgctaggtttacatgatctcatggcatgctcacagtcggcctcagcatcaccccctctttaaagatggggcaactgatgatctgcctcgggtcctacagctaggtgcagcttggtccactactgtgataacttgaactccactgttcaagacttaagccttgttctttgccttctctccttcaggggcctctctgttcactccccacttggcttcacttttgatagaggagaagagaaactcctggaaacaattgtaaaatattggaaaatctaagagtttatgggaaaaaaaaaaaaaccttctttaaaaaaatttccccagtgtaatcataagaaggacatcagacaaattccaatagaaaagtatcatgcaatatacctgaccagtactcctcaaaactgtcaaggctatcgaaaacaaagtgtgagaaattatcatgaccaagaagagccaaaggagacgtgacaatgaatgttatgaagtattctggatagcatcctgaaaaagacaaaggacattaagtaaaaatgaaaaaacctgaataaactgtggactttagttaataataatgtatcaatattggttcattagttgtaacacatgtaccacactaatgaaagatattaataggggaagctatgcagaggatatataggaattctctgtactagctgataaatttttctgcacatctgaaactattctaaaaaataaaatctattagagaaaaatttttttaccgttacccaacaagaaagaacatttgtcacagttgggcaaaaactatgctttcaaacttatgataataacaccataggatattctggtagtagtattgtaagataagacatctggcagtgttaaatgcctctaggaagtttgaaaattacaatactgtatgcagagaagctttccgtgagccttagattaggccagggttgccaaactacttatggcccacaggccaaacctggcccaacacctgttttagtaaataaagttttattggaacacagccagtgctcattcacatttatgtattgactatggctgcttttgcactatgacagcaaaatggaatagtggtaccagagaccagatggcccacagagtctaaaaaatatttactatctggccaaccccctggtttaggctatttgaattacaaagtaggttttgaggcaagctagctaagaggcccaattcacctggggtagaatcaaatattggaacccagcagatcaagtagcaggagagatattaggcagggcttgagtaaaatagattagccaactccctaggtggccatctggttaaggttttcaggcacttttctctttgctggagagctgtctttggccccagggatatatcagtttgtttgaaacctaccctgcctatcccccaccttagggactttatcttgacctgtttatcctactcttcttttggtgttcctgactttggcctgaaaatagtcagtgaaattttctacttaaataaatttttggctggctaatgattgctatatgtatgaatatgttatcaatgtggaaaagtcaaatttttacagtgaggtttagttaacacaaagggccatatacataatttgattgtcagcaattcagtcataggccccataataaagtgcctcaaagacattctttttaacatccattgatgtagtctccaatttataaatggttggttctatgctgattgttcaaaattcattatatatgcttcatattttataatttcacgagttagttttccagattagtccagaaaagtttttaaagtaataacttaattgtaatagggctcaataataaaactatcacatataacagcaatattccattgtagaaatgcatctagagttctgactcaagatgccagattcccttaattatattccacctagcagtggtgaggggaacctagacatcctgcgctggtgggagagagagattgttctgaacaccatgaccactagagagagagctgccacatttagtcactagatgtatgactagaaagaatgaacataagttgggaaagcccattttgttgccacaaggagtttgctggtatttgaaccttagataaataggaatttgctgtattattatttttaaccctaattctacatatcacattaattaagttagatcatatctaacttaattattagttaagtagttagtgctactcaaagtatcgccggaagactggcatctgtctgcaaactttttgttacctgacattcacaaagtgttgagaaacttttgtagcaattgaaagggcttttttacgactgttgaacctaattctaaaaggtgaaagctgatgtcttattcatttaatttttctactagttctttttattcatttctgttgccttttacaaaagtattggtttagatagattggaaatttgaaaagcaagttttttttttttgagaagcattgctgtaaactatagagagccgggttacagtggtatagaaacttgtgtaagccttagcaaataccatatctcttggttttatttaataaattgaaactttctagcaggcccgactctgcatagctaagtcagagatgcaagaaatgtaaaatttatattttctttaatagcgagagggtaaggaattcagtctcagttattattgcccacccttgccacaccccactgcatccagggaggcttatacatggggctcagaaaatgaggacacagtagctacccacagcctcaatgcctgagccatcagtggagtcaactccagggctcactatggctaaggctggggcttctggtgcccagtccttctgtgtcccatgcctccatctctggatgatgtcttgttaccttgggctgtgggctgctgcctctgagccaactcaggtaccggctgcctcttactctctcagttccgtctcttcagggagccctggctatggaaaaccaaagctggaaagaaaagtatttccaggctacttttattcatgggggccccattacaaacttccttggaggtgaggaggcacaaaatgatctggggtaacattgtaggaaaaggggcagggggagggccagtagaagaaaagcacacattactatcaatacatttacccttgcgaagtgagggcactgagccctttgtgacagcgttatttgaggatggagtgagttactgtactgaaaatgcaaggtagagtgctcagcacacagtaggtccatgggattttaagtctcctgccctcctcgaggcgagacgcttgcctgatttccaggccagaagcctgcagttctgcttgtccttgcctgagggctcatttgtgtcacacttgccattgtgtttggatgacttcctccagctgcagcttttcttccccttctccttttatgggatggactctaagccaagggtacttcatctggagtccatagaacccaggcttcatttccatggatgacctcagagagtttcagtttgtttggaagttttatattttatctatattcttttgtttgcttaaccttaaatttttaacaaatacatatttttttcctagcaaaagtatcagatatactcatctgttgtttcttagcagatgtcaatttagtagatgtgggatggggcctgagattctgcatttctgacaggctcccaggtgattcctgttcggctggtgtgatctcattacatgagcaaggccaaagaggccttccgaatttgtggacttacctcccattgcccattagcccatgagctgccattttctttttgcaagatacgcagtcatcagaagcagcatctgaaatccttataattacatgccacagccccttgatctcccagtgtcttgacttctgcctgcacatcatcctagttaagcatgggtaaaagcataagtaattgcacaccaggggctattaccatcccgttcacctccagctatggagcccctagtgctttcagatggatggccagtctaacttcaaaattccattgtgaagacctacttcttgttatacaactactcccagtatcagtgattttctcaagaggacagagcctggggcaaggattaaagtgatggctgtttgagaacacaaactcagggaagggagggtgaggacaaagggcagcaaccaagggaatatgtgaggccatgcagagtggtgctgcctgcacctgggagtgcctctttccaagagccatgaagaggctgagcaggtgcagctacacagccctttttttcgaggcctacagaagagaactaatcatctggcatattcctagttggtgggagcagagggggaattctctgctcagcttcggcttcttttcttttcctatgatgcacccgctgggcaggatgccagagcccaccaacattgttcttcccaaactggaagtggcagacactctgggtgtgctgttgggcagtctggctacaggaggcatccaaagaaaggggggtggtaccaggcagggtggctcacgcctgtaatcccagcactttgggaggctgaggcaagcggatcatctgaggttggaagttcgagaccagcctgaccaagatggagaaaccccatctctactaaaaatacaaaattagctgggcatggtggcgcatgcctgtaatcacagctactcatgaaggctgaggcaggagaatcgcttgaacctgggagacggaggttgcggtgagccgagttcacgccattgcactccagcctaggcaacaagagcgaaactctgtctcaaaaaaaaagaaggaatgaaagaaaggtgggtggcattcccagggcaagtggctggtcagcccttgctgtgggtgtggagtctgaggaggtgcatgcaatctgtgtccactacagcacctgaaggttagagcaccagggcagggcaccttgccgtctctgtatgtgggatagggcaaagagaagagaggaaattacgttcattgttgataatctatagcaactggcttttccttttgagcccacgtgatagagaactaggaagtcttctatttctgttttgtcaaaatactgagtcagctggaatgaaaaggacactaatttatcagtggagacctgcctgtccccaagcacatggcagctgtcttaactgctcatcaaactcgctctcatctgttggctgggggacgtctcttccttgctcctgaagttgtcttgtgtgtgaaggccgctgcctgagtacagcattcctggcctcccccacctccctctgtctcagggatggagaagtgacttttctgcctttttttttcagggttctgttcagcagggtgcacatcccttctttctgctcttccctgtcattagtcttccaggtctcccctcagcccctgccaccaccgcatataccctttgcctttttactcagttggatgagtgtaaagaagaagaaaagaactggctttttgggcctctccaaaggtctcagccccaccgtgtgacaagactggagttctgtgacattggcaagttactgaatctcatgagacctcagttttcttataaaatgagaataataataatacctatttcatggtgtagtgtgtaggaattaagtgagataatatgggcaagatttctaacccttagaaagtactcaataatgatagttcttgttactgtgatctacaggctttggagagattaaaaataagcctggttctccttctgggtaaggcccttgtcattttcgggtatggctgggcaagttccattgcattgatggataattctaatgttttctattcagggaatctctgaggatagctctaattcttattttatgagtgtggaaatgtgtttctctcatttccctcagcatcgatttctgtttcagagttgatgcagaggcgtggatagtaaggtgtgttttccttcaaacctgggatcttgccacttccctctcatttgaatgatgtggttttgaaatcagtgctgctgataccctctctttcctcagaatgatgtgagcttcataaacccctttatgcataaaaccaaacttgagagctgaggctttggactctgtgtgtgagaagcctcagaaaaagaaatcacacttcattaacaagaagaatggcttcggaaaaaagcatgtacagtatacaacatgttagtacatttccaggaaatgatggcaaatcagtcaaatcaagttgcagatgtagtcaggaaattctctcatgattgtgagtttcccatacaagattttggtggataaagtcaaatgagttatacccagtacttcaaaagcacagcagtgccagctcatcctcaagtcacctttggattgaaatcttccacaatgcagttcatgactttgctgttgaattatgaagtgtttgtgtctgtgctgtaaggtgttgggattcaggaatagaatcaaattccagagaaataccaccacaaccaccgtcccagaacaccagcaacctttctctttcctcaaggaaggcttctttccctcatggttcatgtgctttgcttcttttatagtttctgatgctctggtattaaagggaattcctgccgaggggcctttatattctggatatcacatatgctataggataggttttgtcctttctgactttaaaaaggataaatttaaagacaatactgttgctgctgttgccaagtcataatcagtataatatgtctttaggggcagtaattcattcccagtattctcaccaaaaagaaacatttaaggttattcttttcaggccactcctgaagattgttgtcacgtcatttattatctttatgatcagtgtgttcctaagctatgattgctgtgtagagaggcagattttcttacacattgcttaaaatattgtttgtatttttcaactaggtggttgtactacaatcccagagtcagacctagaagaaagatcagtagaacaagactctacagaactgtttaccaaccacagacatctcactgcagagacacccaggcctggtaagagactggatggccttcacaagcgttagttaagtcagaagcagtgacaatctggtcagtttttgtcataccagagagcattccgcaaagctgcttgttttccaatttcttcattcttccccttagcactggtgcagctgaatttgatcctttgtgtattcctgtcactattcagatcttttctctctctttctctcttactctctttttttccagaagtttcacccctccaaggagtctcggaataattcaagtagagttgtttggttgagaggaacatccccatctcaaggccgaacctgtgtgaacctcatgccaagcacagatatagggctggcgcaggtgcttcctaaagctcaccttcctggagatgacatgcatagaaagaggggttgggactttttacttcactaggagaacttgtaacaccatggggaagtcagctgaaacttgtcttgttttgccaggaaaggaagtagttgcctttggtcatccatctgctaatagtcacagaatacagtgaaatgacatagttttgggttagattttataatgcaaagattcagatccaaaataatttcataccccattttttcacagaattcttatatagtaaatgtatcaagtttaataaagcatctcattgtcaaataatatcttggattttatttataattagagggatttatgagtgattgctctacattatttcttcaaaggaaaggaaaggaattgaagactttgctactctctggtaagacttgaatgtgattattttataaataaaagaaccactatgaaactttcatgtgatttgttctattaagctaaacgtggaagaagggaagttttctagtattgtatgaaaatgtttaaatattttcaaggaagctagtacattaacatccccttttcattaccccattgggtggcaccttttaaaaatccaggttattaaaggattcacactttattacagttaaaatttaaggtttttatgtgtaagaagtgaaagaaactttgctaatttcaagttcgaattacagttgtgagattgatttatttaaataaaaatatgcctttgccagttttggaatgcctctcagtacaaaggggaaagttgttcatggtttttctatatgtgaaatgtcaaaaaaaaactgcagaggatgtattacttattatttgtagcatcctcttttaggagatgcagatatattatcaaaataacatcattatgatcatttatagccatgatatgagcataaaattttactgaaattatcattttctctttaagtcctttatgtcaaaaagtaaacctatcagtgaaatacaaaaacaattatagagatggttctgaaagagcaacagaaggctgtgtggattctattggatgctgtcttctcaacggccttgtgatttatgcagtgttgaattagctggcattatttttatgttttagcaggtgaactatggaagctatgtggacattacatgcattaagggttttgttgctttggactggaaaatatataacttatggtacggcacaactgccaaggcctaatcagagtaagatgcctcttggaataaccactttccccagtgcttaatgtctggagcagagagggtctctattctggctaatgtggggaaaacgttaccaacaccctacttcccagatttttttgccatcatttcattttaattgtaaactcagaccccaacccttcacttcaaggctcattttgaatcaattatctccttatccctacaccaagagccacattcgaggtcctcttggaataagtggacaaggcatcatggactgtacttttagccctattttctggccctttattatattctcctcgtttttgtctttttattttgcttcaacatttagtgtattctctcttgttgtgtctctcttatatgccccttaaatcatttctataatggaatggggaaatgaatatagtcccactgtctcctcttaaggttctcctaatcacctttcttggcattcatcttccgctctttagaatccctggagaactctatgcctctctacatacctctctcttacttattgtatttcagaagtcatgttttcctttcctggtaggatagatttgcaagctccttggacataactgttcttggattcttttcgctgcttggtaaatatttgttgtatcaaaaggtcaactaatctcctaaaagaagtcaacaagtcatagagaaatggagaagccggtgatttagaacattgtggtctaaccttcctaatttagtatttcagtttatgctgagaggaagctgatgtgactgtcctactattttttcttaaatttggctttgaagagagatttgaatcttgaaaattcaatacttaatgattttgttcatgagtacttgggtaacattgatttaaacacaggattcaggttttaaataagatgaataaaaattctaatacaacattagttacaaaaatgaacatttatttagaataagaaaagaataacaagtcacatttgtaaaaagctgataatcaccatatatatcacaaaatctatacaaatatttatattaactacttgatatacctttttaacaattctgcattttcttgcacacatttcttattcacttctttaattatagacaatttgtaatttcattttgtatacagtgaattaaaagataattttttctctgaaattgttgatcagacttttttaaaaaaaattactgatagtttgcaaaagcttctttcagctttacaactcatcatttgtaatgtcagccaggtttttaggattatattatcagggcattttaatttttcttatgcagtgatacattttaaatagccatgcaattgatagctctctttttttttttttagataatttcaacttttattttaaattcaggaggtacacatgcaagtttcttacctgggtatactgggtgatgctgaggtttggggtacaattgattccattacccaggtactaagcatagtacccaatagctattttttaacctttggcccctctccctacctctagtaatccccagtgtctattgttgttatcttcaagtccatgagtacccattgtttagttcccacttataagtgagaacatgtggtatttggttttctgttctggcattaatttgcttaggataatggcctctagctacattcatattgctgaaaaagacatgatcttttttataactgcatagtattctgtggtatacgtgtaccacattttctttatccagtccaccattgatgggcacctaggttgattccatgtctttactattgtgaatagtgctgcaatgaacgtataagtacctatgccttttggtagaattatttattttcttttggatatatactcagtagtgggatgactaggtggaatggtagttctaagttctttgagaaatctccaaactgctgtctacagtggctgaactaatttacatttccagcaaaagtgtacaagcatttccttttccccacagccttgccagctattgttttttgacttgttaataatagccattctgactggtgtgagagggtgtctcattgtggcttcaatttgcatttctctggtgattattgatgttgaacatcttttcatgtttgttgaatgcttgcctgttcatgtcttttgcacatttttaaatgggattatttgttttttgcttgtttatttgtttaggttccttatagattgtggatattagacctttgttgggtgcatagtttgcacatattttctcctattcaatgggttgtctttttactctgttgatagtgtcttttatgatgcagaagctctttagttaattaggtcctacttatcaatttttgtttttgttgcatttgcttttgaggacttactcataagttgtttcctaagaccaatgtccagaatgatgtttcctaggttttcttccagtattcttatagcttgaggtcttacatttaaatcttttatccattttgagttaatttttgtatataatgacagataggggtccagttttatttttctttctatgactagttacatattctagcaccatttattgaacagggatccctttccccattgcttatttttgttgactttgttgaggatcaaatggctgtaggcgtgtgactttattgctgggttcactattttgttccattggtctttgtggaaattgacaactcattagccagtttatcatcaaaatcctcattgaaatgatcttcattaccactagtattttatttcaaatcagcaagaagatatttaaatatttttcgaatatgttcatgcgatttactcttcttcattagctagattattagacaatccaaagtctgcttattctctttcaaatgtatcatctcatcttaatgagttaattttggtatgatttgaaaatgtttttgttataatttgcttattgacagaataacttttatccattttatataggagttaattgggaaagttattttatgatgagtttgtaattgtatactctgaattattaaatatattcttaacaggcaagaaattctcctttgacttggggtccatgaaactggaatcttactgcttctgcttttacatgtctgatggtcaggacgtcagatttcatatgtttcaaatcatattttatctccaacacatttatgcttctggtgccaggctgcatagaacatgcttatttagtgatacagcgttttgctccacaccttcctcttatgacactggcttaagtgagagcagtgggtggtaatgatattcctggaatccattcttccagcagaatagctatcagtaatttaaccatatacagagttgtctgtaatccacataaatatatccagttagcccaagttgaatgtctccccaactcaacttccctttagccagattgtcaaggccaccacccttccaatgcctgctacaaggggaagacaggcagaagagacagtagttttcaccaatcatgattaaaatgtcttttttcaaattgtgcaaaagcatatgaccatacacctgggcaaggaactgccctgaagtttaagcctgattagcatcacagtaaatctgtttataacaggagagagtgagcgagcgagatagagagagagaatagaaactacactttaaattattggtttgttaatttcctccatggttgaaataactccaaaatatgtatgggatagcactatgagtgtggcgggtggaaagggcagattttgtaagtgtcttatttctgtactgctataacagaataccacagactgggtaatttataaagaatagaaattaatttcttagcattctggaagctgggaagtccaagatcaaggcaccagaaggtttggtatctggtaagggtccaactcccacttccaagacggcgccttgcattctccagaggcaggaagcaatgctgttctttgcgtggcagaagagccaagagagggcaagagagaaagagggagtagggggcaaaattcaacttttgataatgaacccactttcaagataatgacattaatctcttcatgagggcagagcccccatggcctaatcacctcttaacagtctcgcctctaaatactgtttcgacacgacttttggagggaacaaacattcaaaccataacagtaaggaggtattcaaaattcccttaaatatactataggtcttcttaagtttgccagtgtgagcctcgacctagctttgggctcaaatgtaagtacacttttacttttcatttttagtaattaattgttccctgagaaatatcagcaaacctttatggactagcaaaacagcaattctctgttcgctgtcttggttttgtggagagatgtttcaccttatacattcagggacagttctactaatgcttatttcttagcagccactccatgaattgtcccaaaagggactgagtcagtcttgtatctcagttggctgaagggtcggttttagataaaaagttcacagcaagctgtcagattgaagagggcccagccgcttcattggctccaggatcatcagattggagaaagtgaagaggtttaaaatgctattaaattgatgaaattctgtttaacaggctacagtaatcatgtttattccgtctggtaccagttccagaaagagaagttcatgatgtcacctgtgaactctcatttctatgtgccaggcctcccaaaagaacattaagatcatctgaatatgaagaacagttggaactaaattcttttatgtaaacaaaaaaatctagaaactttatcttctcagttagaacagagtactgattaagcccagacacaagtcacttaccactttgtgaaatttaggtctgtaatattcattgaatcctttaatattatcttctttaatattataatatttaatataataataatataatatattataataatgtaatattatatataaggtatattatatataatattaaagtattatatttattcctttatataatattatatattatatgtaatatataaggtatatattatataataatattatttaattaattaatattaattatttaataatattattatataaggtatattatatattaaatgattgatatttaatccttaattaataattaatattaatatatataaggtgtattatatataatattaaaggattatatttattcctttatataatattatataatattattatataataatattatatatggtatatattataccttaaaccttatatataatattattatataatattattatataataatatataaaggaataaatataatcctttaatattaaaggataaaatatatcctttaatattaagaagttaacatttcttaacatcacctcctctgatgcctggttgtctttgtccttcatttgagtccctcccatcagttgcatgtatatcattggtccctacagtggcactggctcatgtcatctctcccttatcttctattgtgtagaaatagttaacagataacatttaagtgaactgttatttatttaaggatgaaaattaggaaattactttagatctctagtcgttaagtgaggaaactgaagcttttattttactaagtcttttgggataaaaattaagttactcattccttgggggaaagtatggtgtgtaatactcatcttttgcactcagcagctcacaaaaatgaaaaaagcaatcaacaagtatttctgaaagaaaacattaaacattctccagactttaatcacatgaggatggatagaggatgagagttgggatttattttcaacttttcccccaaaatgtcaataacaaatcataaaacacatacacacatacacatacacatacacttcacattccctacttctaaaaccagtgccatctggatctggtcctccctttccatttcagtaacagtgatgtacttttccccaggctgccctccaatgtcatcacctcctctgatgcctggttgtctttgtccttcatttgagtccctcccatcatttgcatgtatatcattggtccctacagtggcactggctcatgtcatctctcccttatcttctattgtgtagtctattccttcatcccatcaaagctcatctgctaggagtcttgtttgcctgattatcccagtacctcttccggatgtttttccaagctttactcatctctgtctggtcagggttcattctatttttagacagccactcaaagtccacttctttaaggagacaatatgatatagagaaaagaccttatgactaggaatcagatggcctcaattttaggcctggtcctcttgaaaaggtgctttctgatctgtgtcagtcacttagcctctcttcacctcatttttatatgcactaaatagagatctattcattcaacagcaaaattaagttgttttcagacattgtcctgggcaccagggctccaaagaacaataaaacatggatcttgtccttaaagaactttcagttcagtgggggaacagagaagaaaatggacagttgcaatacaagatgacaaaaactcaactttagaagaaagtaattaggaaagggagctagaagatgtagtttagcatctccaagctcttattatttcatctgcaaagtggggggcctgtcccacctgtgtcaccatcctcaaagtattgttctggaaatcaaagaaaagggcttcaaatgcttgaaagaaccctaaaatgtaagactgttgttccctattggttggaagagcaattgtgaattctccttgattaacgtcttttataaccgtgaaattcctgtagtgctcttttacttgtcacttcaaagtttgtatattttcacttctccataatgttatggagaatgtatactgtggtacaggggtttttcagactggctgtacatcaggattgcttggataagagttggaaggctgtgaggggagggttggaattggaaatatgacttgtatgcatcccatttagtgtagtgccacacagaaaaataataccttctataaagtgacaaaaacctcattcgcttaagtggatattttttgatcctcgcaacaacctcactatgtttgcaacatacacgaaaaaaaattaacatcccaagtcacagatggaaaagtgtaggatcagagtatatagtattcccttaaagtgacccagcaatgacaaaaataggtgacctgggcaagaagccaaggcttcttgtccccagtccggggttcattatattacagagaaagacatatcatgaataacaccaaggcttggacttctaccattagtctagagtaaagtgtttctcaggctttgaagacttatgtcctaatttaagaaagaacaaccatacactctgtttctgcatggcaggctatatgccatgactaactctaccagttgacacaactaaatgctgggaaaatacaataaatatgcctttttatgatatgctgagctgtcatgaaaagcatgaaaacagaaatcctgagaggtcagcctgtgccaaaccagctttcacattgatagtttctgctaaattctgtgttgaacaacttcatgccagtaaatacaaaaacttcagtgaaatggttattctttttaaaatacagttttaaattgactaaacaagaaagtgaaaacttgaataatcctataacaattaaaaatatcagaagttaaccttgccacaaaaaatacaataacgtgacacatgactttacaggtgaatcctactgacatttgccttatggttcccattacccaccctctttatattgtagtttcttttatattatgtatacatacatttttaaaattccgtctgtacttatttggtcccagatataaggagcttggaaaacgtcactctgtcctaacaagggaaaacctgaaaaaaatcagtaactcttcttatctgtcagagaagtgaggtcagagggcaaaccactgccctgtggtttggagaaaaatacaggtgcatacagagaatcacaagtttttgcagcagaaacccatgagcagaaacctctatgggagctagtatcagcgcaagaaaacctgaagtgtaattaactaattgctggaggcccagagtggacaggtctgagagttaaaaactccagaagacccagtcataagggagcctccacactttcatgagttttcctttcaggagcttgaccatgttctgaagtgaatatttaaggaaaatcctttcatgtttccaacagtgtgagaggaaatcaaacgattttgaaatatgccagagcatcctatccttcttaacaaggccttccttcaagtgaaactattttccagagcataaactactggagttttaacagagcctaaccaacgtgaaagacgggaaatacctgatgtcagtccacagtcaatcctgtttcactgaaggagtggaggtggggagctaagaaggacttgtgaagtttgcagttcagatgccagctgactgcaacactgagacctaatcataggactatagaatgccttctgtgccctcccctgccccacaaccttaccaccacattactaaaggcttgtttaccacagttctttttacccagtacatcatatccagctgccaagaaaaacttacaaggcatactaaatggccaaaaatacagtttgaaaagacatttcaagcatcagaaccagagtcagatatggcatgattgttagaattgtcagaatgggaatttaaaacaactctagtatactaagggttctgcactggatcaaataaacagcatgctagaacaaatgggcaatgtaaacagagtgatgaaaattctaagaattaagaagtgctagagatcactgtaaaagaaatgaagatgcttttgatgggctcattggtagactggacatggctgaggaaagaatttctgagtttgaggatatgtcaatagaaacttcccaaacagaaaagcaaagaaaaaaaaatactggaacaaatatccaagaaatgttagacatctacagagatgtaacttacacataatgggaataccagaaagagaaaaaagaaacaaatatttgaagcaataatgactgagaatgttttcaaattaatgtcaggcaccaaatcacagagccaggaagatcggagaacatcaaagtgggtaaatactaaaaatccacacataggtatatgagtttcaaactgcagaaaatcaaagataaaggaaattcttgaaagaagctagaggggaaaaaccctgcctattaaggagaaaataatcctatccacttctcagaaactaagcaagaagggtggagtaaagtatttagtgctgaaagaaaaattcactagcctagaactctgtaccctgcaaaatgatccttcaaaaatgaaagggaaataaagactttctcaaacaaacaaaactgagggaatttgttgtcagcagaccagccttgcaagaaatgtgttaaaagaagtgattcagagaaaaggaaaataatataggttagaaatttggatctacataaagaagagcatcagagaaagagtaagtgaaagtaaaataaaaatttttatctttattagttttgattgatctaacagataatgtttattcaaaataataaacaatgtattaaaatatatatataatgtataagtgaaatgaaatatatattgaatacatatatacatacacgtagtgaaatgaatgacaacaatgatacaagagatgggatggaagaattaggattattttgttgttataaggtattcgcactacttatgaaaaagtatagtgttatttgaaagtggacttggattagttgtaaatatgtattgtagatatactagggcaacctctaaaaagttacatatatgttatataactttatataatatatgtgtgtgtgtgtgtatatatatatatatatatatatagaaaggatagagaatggaatcatataaaatactcaatgaaaccacaaaaggaagaaaaagagtgaaagagaaaaataggaaaaaaaatggggggtgggcaagaaatagaaaacagtaacaaatatgatagatcttaatccagttatgttaatagtcactttgggttttttttcattttaatttttgctttttgtcttttctttttatagatttagggagtaaagtgcagttttgttacatggatatattgcatagtgaatgaagtctggacttttactgtaaccatcacccaaatagtatacattatatcccatgtataatttctcatccctcacccctctcccaaccttccaccttttggagtctccaatgtcgattattccacttgctatgtccatgtgtacacatatttggcttttgtttataagtgagagcatgtggtatttgactttctgtttctgggttatatcacttgagataatggcctccagctcattcagtgttgcaaaaaagacatgacttcattctttttttttaaataaacgggtagtattccatagtgtatatataaatatactatattttctttatcccatcatccattgatggacaactgtgatcaataatcactttcaatgctaatgatctaaatacaccaattaaaagatacattgtcttaatgaatcaaaaaacaagacccaactatatcttgtcaacgagaaattcattttaaatataaagacacatatagattaaaagaagggaatggagaagtatataccataacactaatcaaaagaaagcagaagtcaatgtattaatttcagacagggacttcagagaaagtaagttatcagggataaagaggggccaaacataatgataaagaggtcagttctctgtaatgataaagaggtcagtgcctccttcttcaaatgtgcaaacatcagtgcatggccacaaggatcacagataatcagggaaacttgacactgtcatgggagtaaaataaagcaccagtaaccagctctaaagaaatggagctttattgagtgcctgagaaataattcaaattaatcatcttaaagaagctcagtgaactgcaagaaaacacagtagacaactaaacaaaattgggaaaacaatgcatgaagaaaataaagtgttcaacaaaggaataaaaaccatgaaaaagaaccaaacaaattctagtgctaaagaacacagtgaatgaactgaaaacttcaagagtgctccaattggagactcaattgagcagaggaaagaatcagagagcccaaagacaagtcatttgagattacgcagtttgaggaacaaaaagataaaataatgtagacagcctataagaattgtgggacataatcaagccaactaacatatgcattatggaagttcttcaaaaatgaaggggagataaggatgttcccaggcaaacaaaggctgtgggagttcatcactactagatctaccttacaagaaatgttaaagagagttcttcaggtttaaatgaaaggacacatgctgggcatggtgtctcatgcctgtaatcccaacactttaggaggccaaggcaggatgattgccttaggccaggaattagagaccaacctgggcaacatagtgagactctgtctctacaaatttttttgtttcagaattagctgggcataatgtcacatgcctgtgttcatagctactctggaggctgagatgggaggatcacttgagcctaggaagttgaggcagcagtgagctgtgatcgcatcactgcactccagcctgggtgaaagagcagaaccttgtctcaaaaaaaaaaaaagtaagacattaactgacaatatgaaaacctatgaaagtataaaactcactatatagatgagaatgtagttaaattgagactacattaataccatcatggtggtgcataaatcactttgacctctagtattaaaattaaaagacaaaagtaataaaaataactatacttatgataatttggtaacagatacacattatctacaaaatgtaaattatggctgggtacagtggctcacacctgtaatcccaacactttggaagcctgaggttggaggatcacttaagcccaggagttccagaccaggccgggcaatatatcaagacccccatctatttttttaaaatgtaaattatgacattaataacataatgtgagtgagaagtttaagatttatcatatgcaagtgaagttcttttcagcttaaaatagacttataactatgagatgttttacataagcctcatggtaaccacatacacacatacacacacacatgaatagacctgtagtgggtacacaaaagagaaagagaaagaaagcttaccactatgaaaaaaattatcaaattacaaagaagacagcgagagaggaagaatagaacaaaagtactacaaaacaattagaaacaacaaaatggcaatagaagtccttctcattaattacattaaatataaatagattcttcaatcaaaagacagagtggctgaatggattagaaaacaagacacaactacatgcagcatagaagagattcactttacctttaaaaatacacatagcctgaaaatgaaggaatgaaaaaagatatttcatgaaaactgtagacaaaagagagcaggggtgtctatacttacgtcaggcaaaatagactttagtcaaaaaatgtcacaagaaacaaagatatatataattatatattgataaagtggtcaattcatcaagaaggtataacgattgtaaatatgtatttgcccaatgttggaacacctaaatacataaagaaaatattaatagaactgaaggatgaaacaaatagtaacacagtagtagtaagggacttcagaccccactctccacaatggataaatcatccaggcagaaaatcaataagaaaaacagctgacctgaacaaaactagtgaccaagtagacctaacagacatatgtataacattccattcaacagcagcagaacgcatgatatttttgaatgcacatggaacattacccaggatagatcatatgttaggtcacaaaacaagtcctaacaaatccaagaagattgacataatattaagtatcttcttttacctcaatgctatgaaactataataacaggaaaattggaaaattcacaaatatgttgaaattaaacaaaatactcctgaataaccaatgggtcaaagaagaaatcaaaaaggaaatccaaaagtatcttgagacaaaagaaaacagaagcacaacacagacaaaacttatgggatatagcaaaagcagttctaagaggaaagtttatagcaataaatgcctacatcaaaaaatatgaaagattttaaataaataacctagtgttacacctcaaagaactagaaaaggaagaacaaactaagaccaaagtcagcataggaatgaaataataaagatccgagcagaaatacatagagactagaaaaataatagaaaagatcaatgaagagttgcacttttgaaaaacaaacaaaataatgcaaacctttagctagagtaagaaaaaaagaagatgcaaataaaattataaatggaggaagagacattacaacctctaccacagaaatcaaaaagatcttaagagactaatataaaaactataggccagcaaattggattacccagaggaaatgtacaaagtcctagaaacatacaacttaccaagactgaattatgaagaaatataaaatctgaatagattaataatcttgtgtatagtaaatccttaggactccttaaaaaaactgttaaataaacccttaagactccttttaaaaactattaaaagcaataaattgagtaaagttgcgggacgaaaatcaacatataaaaatctgtagcatttctatacactaacaagaaactacctgaaaaagaaatcaagaaaaatcccatttgcaataataaaaaatatcaggaataaatttagccaaggaggtgaaagatctatacactgaaaactataaagcattgatgaaaaaaaaggaaaaaaacacaaatgaaaaaatatcctgtctttttgaatcaggagaattaatattgttaaaatgtccatactctgcaaagtggtctatagattcaatacaaacccatcaaaattccagtgacgtttttcacagaaatagaaaaatcaattctcaaatttgtatgcaaccacaaaagactctaaatagccaaagcagtcctgagcaaaaagatcaaagctggaggcatcacactacctgattttaaaatatactacaaagctatagtaatcaaaacagcattgtactgcaataaatacagaaacactgaccaatggaacataacagagtccagaaataattccatgtgtttacagtcaactgatctttaacaaaggtattaagaatacacaatggagaaaataaatggtgctgagaaacctgggcatccatatgcagaagaatgaaaaattgccccttatctcacatcatatacaaaaatgaatgaaaaaagacttaaaagtaagatgtgaaactgcagactactaatggaaaacataaggaaaagcttcttaacattgatctgggcagtgattatttggacatgaccacaacagcaaaaatagacaaaggggatttcattaaacttaaaagctctgcacagcaaaggagacaatcaaaagagtaaacagacaacctatggaatggggaaaatatttgtgaaccgtgtatctaatgaatatccaaaatacataagggacacaaaaaactcaatagcaaggaaacaaagaatctgattgaaaaatgggcaaaggacctgaatagacatttctcaaaagaagacatacagatggccaacaggtatatgaataaatgctcaacatcattcatcatcaggaaaataaattaaaccacaatgagatatcacctcacaccttttagaatgactatgatcaaaaagacaaaagtgctggcgagaaagtggagtaaaaggaacccttgcacattgttggaaatgtaaattagtgcagccattagtgtaaagaaagcagtatggagattcttaaaaaaattaaaaatagaactactatatcatccagcaatcccaccatatccaaaggaaataaaataagtatgtcaaagagatacctgtattcccatgtttattgcaccattattcaccatagccaaggtatggaattaacctaacctggataaagaaaatgtggtagtacatacagtggaatactatttagcctttaaaaagaaggaaatcctgtcatttgtgaaaatgtggataaacctagaggacattatgctttgtgaacttagccaggcatggaaagacaaatactacaatgggctgggcgcagtggttcatgcctgtaattccagctctttgaggggccaaggcagagggatcacatgaggttaggagtttgagaccagcctggccaacatagtgaaacaccatctctactaaaaatacaaaatttagctgagtgtggtggcacgcacctgtaattgcagctactccagaggctgaggtaggagaatcgcttgagcccaggaggcagaggttgcagtgagctgagatagcgccattgcactccagcctcggtgctggagactcaatctcaaaaaataaaaacaaaaaaaataaataaaaaagaaaaatactgcatgacctcacttatttgtggaatgtaagaaagtcagactcatagaagcagaaagtagaatggtggctctcaggttctagtttgtggggttcagatgaagaaggggaggtgttggttgaagcataccaagtttcagttaaacattgtgactatagttagtaataatgtatacttgaaaattgttaagtgagtagatcctaaatactctcaccacacaaaaaatgaaaagtatgtgaaatactagatatgttaattagcatttcacagcgtatacacattcaatatcaaagcatcactttgtataccgtaaatatatacaatttttatttgtcatttatactttaataaagcttgagaaaatacatacataaaatacaatttacatggaagagcaaaggcctcaaaacagccattcttgaaaaatttgctccaccagatatcaagtctaattgtaaagctaaaacatagtatggaattaatgtagggatatactaatagaccaatgcatcataataatgtctccagaaacagaatgtccaaatatgacagagataatattgcagatcagtgggtaaaaatagttttcaataagtgttgctgaagcaattggataaccatattgagaaaaatgaaattagactcatacttcaaccatacagaaaagtcaattttggttggattaaatacttaaatgtgaaagacaaaacaacaaatattttaggaacacatgtaggagaatgtctttatgacctcagtgcagtgaaggattccttaatttcatcatagcctaaaagaaaaatactgattgccttaaaattaagaatttatagtcatcaaaagacactataagaaaagataaaaatcatgtcataaagtggaagaaaatatttccagtgcatataactggcaaagaattagtatttagagtgtctaaggaacctccagcagtttgataagaaagcaacatcttaatatgagcaaaaacatacatggatggcttgcagaagataaacaattaatatgctaaaattggaaaaaaaaaacctaatctcattagtaattgaggaaatgcaaattaaaacacaatattttgttgcatctaccagataggagaaaaaggagaagtctacaaataccagttggaaaggacatagaacagaaaatacccacatctgttgaatctgttggctcagctcaactgttttggccaagagtttggcatttgttagtaaagttgcacgtgcacataacctatcaccaggaattacattcctagatgtataacttagagaaaatcttgcccaataggaattttgagaatgctcataaaagcatgattaaaaaaaagaaaaaccaaacccccaaaccatctaaaaaggcatcaactgtagatttgaccaatttcaatatattcttactgtggggtactacacagcaacaaaagttaattaaagctacaaggattaacatggatgaatctcagagacagaagcaaattatagaatgtatatattacgattctgtttatgaaagtctgaaatcaggcaaacataacaacatattgttttagggtatatacctagatggcaaactgtaaggcaaagattaacaaaatttttaaattgaggttacttcttggaagttgaggagagagaaaataccactggggaggggccagaaggcctgttttatttcctaagctggttggtgagcaaatctttcattcattctattattaaaaaaaaaaaaatcatataagtcttactcttttgactgtttaatttattttaccataaaaaatttaaaaacagaaaacgacatgcctctaatttccctcatgattctgataaatttcagcccttgagagagatgtgcccaatttgcaaatctctgtgtatcttggccaaaagagctttttgtcagactttatttcccttggtttaagaaaacaatggctattttagttttctaaatgtaaaattatatataatactatactgaatatgacttttataactataaatacctatccttgtctgtttagatgtctatttcttttccacccaccacctaccacccacctccaccctcaacccttgaatattaccacacagtggccacattagaagccaaggattgctagtgggcagaaaattttgcagctgttaacttctgagctaacaatcccatctgtatctcctcatcctgtaaacattctgtttggcagtactgttgagatctatttctcctcttttactttctaattaactttccatgtgttttctttaaattcaccaccagcttggcataaagtaatttgcttcaccaggtggtgtttcacacattccagatgttaatataggtcttaaccctgtatcagcttcatgagtaacaacagcgcaatagtactttatgacagccaccaaatgagttgcagaatatagttgataaaagataattgtaaatagagaaaccatgtaattgattatccaaactgtaacattttgggggagttaaagggggcactattaataattatgctgaaataacaggtgtaaaatagaatagtcctgggtgtaggtcatcctgattatagaggaagctagctcagtgagtacccagctgaaggcacatctggtctggtacaggttatcctttcaacgattgaaacatcataaacagtaatcaccctgggttaagaaatgtgtacggccataattgtagtcctgaaccagtactctcagtagatgtgtctgctaggcttcattgacaccaaccaatgatgtacctgtttattgataaggagttttattggaaattcatgtgaagcaacaagtgcccaactattctatgagggaaaggtcattttgtatgttttgtcatttttttgtttgattaccacctgacgaagcacaaaattatagtaccttgggtcctattctatatgggctcaaaatctagaaatatgacaggaagaatgaaaattttatctggagatgaaatagaaatgagttgtacaggtttataaataataataaaattatgaaaatgagcctttattgtgttcctactatgttccaggccctgaattctactcatattatagcacctactcatcttaacagccatatgaagaaggtattatttctgttgtccacatgaggaaactgccaagaaatttgcccagggttacataggtggaagacttaaggaaataaatttaagtctgtttgatttaaaaacctgtcttctatctactatgactactgatcctctggattttttcttttattatgtagattaccaactgtatcactgctggtgcaagggtcaggctccctttgcacattcctaaagtgactcttaagtttcatgtaaacaactgctattgtaattaatacattaatttcaggaagcaccttaccatgatttttatgtctgttagtgatggagcctaacagatccaattctcctacttaggtgggtaatgctgatatttttcctcataaagatacggtcataagatatgcttaactgtttacttagccacagttaaggattagcagttgtttataacttatcttagcaattagaataaatatataatcatcttagttaagctctcataacatttctaagttgtcacactaaattatatgtctgaaaattaaaaagagaaattactaggatggtgggtagtctagtttaactagactagctatgaatatgtatccattttggaagtgatatggtttggatttgtgtccccacctaaattcacattgaattgtaattctcagtgttggaggagaggggcctg

SEQ ID NO: 5664 - DNA, 213748 bp, Homo sapiens
  PKD1L1 gene - 47587530 - 47761277 of chr7; NCBI Entrez Gene ID: 168507; Build 35; sequence includes 20,000 bases upstream of initiation codon and 20,000 bases downstream of termination codon of the gene
aagagcatcctgctccagcagagtgaaatccatacggttatgcctttgataatattgtgtaaagcgattcattctgatgtcactcattttgtttcttttaataaacataaggtgggacttatctttggtactttctcagaggtagaaaggatgttttctttttttttttaattccactccagaatgacaggccttgtattagttaatgtatatattttcactcttaaaatacatagtaagtacaaataaataaaattttctttgacctgaagagggagattgagttatatttcaagtcccctgtaaataaagatgccttggaaattatcatagtattttaaatagttaggacctaatgcttaatgaatgacaacatttacaagttgcaatatttcttcaggatgctaaaatcagtgctaaagtgaatcatttatttaagtaaaatgcattgagtatctccaggtttcctgttacgtgggaagatgttgtatttaaatgcattcctatcattttagcctctgaaagcacccatgaggacagaaacgtggaacacatggctgaagtgcacatagatattaggaagctcctacagtttcttgctggacaacaagtaaatcccacaaaggccttatgcagtgagtgtgcttctctgttttgtttttcatattctttcatattctaaatactgcagtcaactctagtctaacagattgcatatagtctcataaatccaaaaaaaaaaaaaaaagctcaattatgtggactttaacttcctagaacagtggggttttttaaattttcctagattcagaagtacctaaggtggcagcagagaaacaacccctgggcactctgttagggcctgaaacctgcagccacactggttggtaggtgggttgtgtgctgcctcagttggccagcacacctggagatgccatcgggagaatgggtgcagatcatcccaccttctccatggtcatctaatttgacctgctcagagtgccagacacggtttggcttggatttaagttttcccttgtgatgtcttgtttcctttctgtggctatgctggcctgcattcgctgccccatatctgtcccttggctgctggttgttaacagttgcctcttgattctggctgggccccatcttgtgaggtcacacacctgctccagcactcttcatctactgaccacacatgagaaaggcattacctgccaagagcttttcaaggcatttttgtcaccttactactgaaatcacagcaacctaaaagcgactgcatcctggatttgaagttccacgttttgtagcatagctcccaggctgagctgagagggaggttgagccaacactgcacctcatccccttcagatctgcagtgtgctgtagagaaggaacagaagattctaggtggcaatgtcaaggaccagcccttttgaatgagagacatgaagagaatcagaagagaccatgggaggggcaatgggtgtttgggaattggggaaggtgtcacacagttggagtgatgggcacagaaggagatatcgccagagaagcagctctgagggtagagatggagaagctagactaggccagatcatggggagttttggggtgaggtacctgtgctgcattttaaggaactttgacatggacgatgtcatatttctagggctgagcatagtgggagctgtgtggcagtgcagggtccttaaaggtgcttctgagaacctcgatgtgcatggagatcgcctgaaggtcatgtaaagggactccttattcatagtttgggctgggcctcatggctgcacttctcccaagctcctgtacaatgcccagacccttggtcctgacaagcacagtgtgaatggtgagagagtgaaatacccctcctgtctgcagagtgtggaaacacagggtgtggggggcccctgcgctgcacaacatcagtctttgaacttggtattttggggactttctgaatccaaggctgttgaggaacatggaagagttcttatcaaaggtggttgactaagccaagtgtcttcccaacattcactttggtgtctccacgtgtagcagagaaaggaagaccagcaaattgtgatgtagcaaaaattttttttaaaacaccgtgggttgaacttctcataccttcttaacttcccaaagccccttttctgtctctgttagtctccttcaggtgtcggctcaattgtcccctcctctagctaggtcctgccaccctcagtctctgcctctcctgtgcccttgcaccacctctcctaaagaatgtttgtctcctgcttgtcctttctggtcctttccccaacctcccatctcctgggattggcctctctgcagcctgctcacacatggtttcttgtcactcactcatatctgctggagagctttcctcggctgctgtgctgcagctccccgagctctcggtggttgtcacactgtgtgctcctgcccaccctcatgtgctctttacttccctgcttggttgcatgcctgatgccttggattttagccatcacccatggccctcacgggattggcaggaccgttgagatgcagggatccatcccatgtagcagtgtgtgacacagcctgccccaggtgttgggggatcctggctcttggctcttctcagcacagttcctccactcactggtgaggagctgctcttcgctgcagaaggatgctcatgtgggtgaatgtggtttgccaggaagccagcctgctgggtgttttgccaagggcttgggccgcttcacttttcctctcctcgcacagggagccgccagtgctggggccgtgatgtagcctcagctgtggcagtgagagtgagagactgtggtctctgcagctgcctcagggaagacagatgcctaaaacaggaggtgcaggctgggaaggctgttctgaaaaagtagagatcaaaatgtgtgtgctgcactaggtctctaaaatcatggcttttctcttcccagatattgtgaataacaagatggtgcattttgatctgcttcatgaagacgtgtcccttcagtatttcatccctgcgctgtcctagcaccctgtcgctggagttggcatgcagagactttgtcaggatgggagaggccgcaggtgttgtgttctgatcactggtctgtgccctcacagcaccgcacatcgacacactgtacttatttgtccctctctaacattttaactaaaagttgattcaacaacacacagttggataaacatatcacttcatgttgctcatgtctgttttgctttgtttttaagacactgaaaagaaaagctagaatttatttattcagactttaaagaacaatttctcattgatgttgtgaaaatcgtcatgtatttagacttggtgtagtagccagaattcgtaaagctgttgcctgggagcttggtactttccctccaggcagaggctctagctcagcacggcctgtagcgcacagtcagtcttgcatttcagtgtgttcaccccgctgctcctgccccttggagcccagtgacagaaagaacagcctctgtcaccccgccgccactgccttggttactcagagcactgtggggtgtcacagctgcagcatttggagtctctctcttgctgaggactcaagcccacctgagtccactcccctcttgatgcctagagagctggcccagccaacacagctcttagctgggagctccttctgccattccaactagtttcttcctggggccagttttgggtttaggttgtaattccttatatttctttcttccacagtgtatcggatctgtcgttctggaaagaagacccttctatttagagtagaaacaaacgaaacttctaaggtatcatctgtgttaagtgatgagaccatatttctttgatgtttctgaacatcaaagctgattcagtactggtagatgtgctcattctccctgaaacatacccatcatatttcctattataattacatctcattgtcctgtggaggtggacatgataaacattatcttttgttttcttgttttgttttgtttgagacggtctcattctgtcacccagactggagtgcagtgccacaatcatggctcaccgcattgacctccttggctcaaggcatcctcccacctcagcttcctgactagctgggactactggtgtgcaccaccacacccagctaattttcaatttttcatagagacagggtctcactgtgttgtccaggctggtcttgaactcctgggctcaagccacccgcccacctgggcctcccaaagtgctgggattacaggcatcagccatcacacccatccataaacattatattaatgtcacattacaaaactgagacctaagttgcttaggataaaatgaaattggaagactagctaacatgaaaatttatattttggctttttcatgttttttgataaaaccagtgtatttgaatgattcttttgatgtttagtaatggttttttgtttgttttttggtttttttttttgagacggagtctcactctgtcgccagtctggagtgctagtggcgcgatcttggcttactgcagcctccacttcccaagttcaagcgattctcctgcctcagcctcccgagtagctgggactacaggcgcatgccaccacgcccggctaatttttgtatttttagtagagacggagtttcactgtgttggccaggatggtctcgatctcgacctcgtgatcacccaccttggcctctcaaagtgctgggattacaggcgtgagccaccacgcctggcctatgtttaataatgttgaaataggatggaatattttgttaaattaacattttaaaattagaagacaccgttttaatttttaaacccttcctcctctcattgtaacgaaattaattccagctgcagtgagaaaacttaaaaatcatgatacaaaatgaaacaatatctgaaagtagttttataaaactgaaattgctgttaaagagaatgtgttagtgacttaaccatttgctctatgtgatgtttattatcaaatacatataattttgaagattttaatgaatggcttaagattttatctttgtgtagaatgtggctaaagaaaccttagttgagattcaagaagttggtgtctgtttctgattcttatcacaacttgctacttagtgtctaccaagtcctccacctctttgctcctcaaagagctgtgaaaaatgatggcaggagccggtacaacaccacagacttagagaagggcacagtgctgctttattgaatgatctaccaaggtaaaattttgccgggtcaagaaatagcaatttaatccatttaaaggaatgaatataatttgaaacattaacttatttcaagactaacatctcaaagtgttgagaccttttttaaaagagctttctggattttgagcatactttcactggctgtgatttataagaatttgtggtttgtggagtactgtcctaaatgccagggtaaaataaggcagtcccatgccttacctgccctgggctcagggcctcacatccttttggtacgcacatcttttctcttctcccttgttctgctctcccgcagcatatacctcctagccccaggcaattacttgtctaatatctatctctatatatttgcctattctggcttttagctttttttttttttttcctgagggagacagggtctggctttgtcccccatgctggagtgcagtggtacagtcatggctcactgcagtctcaaactcctgggcttaagcagtcctcctgcctcaccctcccaagtagctggaactacaggtgtgtgccactgcgcccagctaatttttatattgttttgtagatatgaggttttgtacgttgcccaggactcctgggcttaagcagtctgcccgcctcagcctcccaaagtgcttggatcacagctgtgagccaccacacccagcaattctttttatccaagaattttatcacctgagttttgaggtcattctgtgccatatcagagacacttaagaatttcccattccagttgctcctggctagcatccaagtggccctgccatcctcctccagcccttccttggcccagcagggaactgcttggccatcaggtctgtaggctgagtttatagtgaggtactgtgcctggtgtgaaggagcccactcttggggacctagaatgtggcctcaacagtagtcctggggttgggattctggttcagccactaggcaaaggtatttaatgacattcatgttcttagtgtatgttgccaatttagcaaagcatccatcgttttgaagaaataacaattcagaactttttaaaacagctgtattgagatataattcacatatcacacaattcaaccatttaaaatagactgtctagtggtttttagtatgttctcagagttgtacaaccatcaccactatcaattttagaacattttcatcacccagtaaagaaacttcttaaccataagtaatcatttttcatttttctcttctcccttattctgctctcccccaccatatacctcctggccccaggcaattacttgtctaatatctgtctctatatatttgcctattctggtttttagctcttttttttttcttgggggagacagggtctggctctgtgccccaggctggagtgtagtagtacaattatggctcactgcagtctcaaactcctgggctcaaccaatcctcctgcctcaccctctcaagtagctggaaccacaggtgtgtgccactgcgcccaactaatttttgtattttttgtagagatgaggttttgccacattgcccaggctggtctcaaactcctgggctcaagaaatctgcctgcctcggcctcccaaagtgctaggagcacaggcatgagccaccacacccagcagttctttttatctaactgtaactatatatcgttgaccaggatctgccttccccgctgcccccaaacacttaagcatctggtaaccaccattctactatctcctatgagatttgcttttatagattctaaatataagtgagatcgtgtactgtctgtacccggcttatttcacttaacataatattctccaggggttcatccatgtggttgcaaatgacaagattttgttcttttttattgctgaatagtactccattgtgtatatgtccattttgcttatccattcatctcttgatggtcacttaggttgcttccataacttggctataatgaataatgctacagtgaacgtgggagtgcaagatgcctttttgatgtactgatttcatttcctttgggtaaatacccagtagtgggattgctggatcatatgctagttctatttttaatattttgaagaacctccatactgtttgccttaatggggatactaatttacatttcctccaatagcatacaaaagctttttttttctccgcatccttgccaacacttaccttctgtctttttttttttttttccaagaaaggcccaaacaaagctaatcttttgtctttttggtaatggccattttaactggtatgaggtgactgaggtgatatttcattgtgattttgattttcattttcttaatgattagtgatgttgaacattttttcatatacctgttggccatttgcttgtcttcttttgagaagtctattcaggtcttttgaccatgttttttttttttttaattagaaaaattatttatttctgctcctttcatacatcttattgttcaggaaacagtcttacatacatatctgaaataatctaccgtcacacactctagttaaaggcaaagcaccataggtaaacctgatcagctgtccagagttctgagcttatggaatcttgcttcttgattttacgttaatttctgaaaacagaaacgccatctccaaaaggtgttaagggggttgtaaaaaataatcactttatttgatattacagctgtaaatatggagctctttttttttcttttttacagtttttttttttttttttaatttttttttattgatcattcttgggtgtttctcacagagggggatttggcagggtcataggacaatagtggagggagggtcagcagataaacaagtgaacaaaggtctctggttttcctatgcagaggaccctgcggccttccgcagtgtttgtgtccctgggtacttgagattagggagtggtgatgactcttaacgagcatgctgccttcaagcatctgtttaacaaagcacatcttgcaccacccttaatccatttaaccctgagtggacacagcacatgtttcagagagcacagggttggggatagggtcactgatcaacaggatcacaaggcagaataatttttcttagtacagaacaaaatgaaaagtctcccgtgtccacctctttctacacagacatggcaaccatccgatttctcaatcctttccccgcctttcccccctttctattccacaaaaccgccattgtcatcatggcccgttctcaatgagctgttgggtacacctcccagacggggtggtggctgggcagaggggctcctcacttcccagtaggggcggccgggcagaggcgcccctcacctcccggacggggcggctggccgggcggggggctgacccctccacctccctcccggacggggcggctggctgggcggggggctgacccccccacctccctcccggacggggcggctggcctggcgggggctgacccccacctccctcccggatggggtggctgccgggcggaggggctcctcacttctcatatggggcagttgccaggcggagggtctcctcacttctcagacggggcggctgggcagagacgctcctcacctcccagacggggtcgcggccgggtagaggcgctcctcacatcccagacggggcggcggggcagaggcgctccccacatctcagacgatgggcggccgggcagagacgctcctcacttcctagatgggatggcggccgggaagaggcgctcctcacttcctagatgggatggcggccgggcagagacgctcctcactttccagactgggtagccaggcagaggggctcctcacatcccagacgatgggcggccaggcagagacgctcctcacttcccagacggggtggcggccgggcagaggctgcaatcttggcactttgggaggccaaggcaggcggctgggaggtggaggttgtagcgagccgagatcacgccactgcactccagcctgggcaccattgagcactgagtgaaccagactccatctgcaatcccggcacctcgggaggccgaggctggcggatcactcgcagttaggagctggagaccagcccggccaacacagcgaaaccccgtctccaccaaaaaaatacgaaaaccagtcaggcatggtggcgcgcgcctgcaatcgcaggcactcggcaggctgaggcaggagaatcaggcagggaggctgcagtgagccgagatggcagcagtacagtccagcttcggctcggcatcagtgggagaccgtggaaagagagggagagggagaccgtggggagagggagaccgtggggagagggagagggagagggagagggcttttgaccatttttaaacagggttatttgttttcttactattaagttgagttccttttatattttagatattaaacctttgttggatgtatactttgcaaatataatattttctcccattctataggttgtcgcttcactatcggttgtttcctttgctgtgcagaagctttttagtttgatgtagtttgatttgcccattgtttgcttttgttgcctgtgcttttgaagtcttgttcataaacttcttgcccatataaatgtaatgaagcatttctcctgtgtttcctctagcagtttcatagtttcaggtcttaaatctatgtctttaattcatcttgagttgatttgtgtatatggtgggagataagggtttaattcattcttctgcatgtggattttcagttttcccagcatcgtttattgaaagactgtactttcttttcaataaatgtgtgttcttggtgcctttgttgaatatcagttggctgtaaatgtgtggatttattcctgggttctctgttccattgatctatctgtttttataccagtaccatgctgtttttataactttagttttatggcatattttgaagtcaggtattatgatgcctccagctttgttctttttgctcaagattgctttggctattcaaggtcttttgtggttacatacgaattttaggatttttttttctatctgtgaagaatgtcattggtattttgataggaattgcactgaatctgcagattgctttggacggtatgaacatttaagaaataattctttcaatccatgaacacaggataactttccatttatttgtgtcttcagtttctttcatcagtgttttatagttttcatcctagagatttttcaccatggttaagtttatttctagatatatatatatatatttttttttaattgtattgtaaatgggattttcttgatttctttttcatatagttcaccattaatgtatagaaatgatactggtttatggctgtaatcccagcactttgggaggccaaggcaggtgagttgcttgagctcgcgagtttgccaccagcctgagcaacatggcaaaaccctttctctacaaaaaatacaaaagttagccaggtgtggtggtcccaactacttgggaggctgaggtgggaggattggttgagcccagggagttgaggctgcagtgagctgtgattgcaacactgcacttcagcgtgggcaacagagtgagatcttgtctcaaaaaaaagaaataatactagtttttgtttgtagattttgtatcctgaaactttactgaatgttttttagttcgaacagtttttttggtggagtctttaggattttctctacttatgatcgtgtcatctgtaaacagagacagttaacttcctcctttccgatttagatgccttttctttctcttgcctaattgcctaattacagcatgttcctattctgtaaatgttcaatgaactagagaatgattcttgggtagttaatattgtcaatgttgatgaactcttttccttcgctgaaagcagctactttgttggaggtttcaattctgcgtggcaatttgcagcatttctagtggtactgctccacattttacagctttatgaagaaggtgtttactttttttgaaattaccttgagacatttcaaactgtgcagaagatatatgcacaaaagcaaatgtcttgcagtttgctatagccacttatacatcatctggctcttgaatagctttaattcagctgttgaatctcacttgaatttgagcaaaaccttcatctttatatgtatctggacaaattacttcaattgcttgacagtaatgaccaatcaatttatttaaaatagtatcatttagtaggacagtgtttttctctggtttgagcaacgaattcaaccagtcctctgggttgatcatcatcatcatcatcatttggttatcagttcctgagttatttttaccagggagttttatacctttagacagctattttgaattatctcaggaatgtcatatatctctgcctctttagagtcagtcactggcactttgtctgtttggtgacatcatgtttccctgactgttcttcatctttgtagttatacattgatatctgtgcattgaatatgtaggtatttataaacagtctttgcaatctggctttgtctgtgattgtccttgtatagtaggtctgtccagaaattgtaagcatactgtcttttttggtctttaagcccgtgaacgctacagcccgtgtagtgccaaatggtgccctaagcccaggttccctgcagtccactctgtgatttgtttgttgactgctgtgagccccacccccattctttgtttctaatttacacctagcaggctaaccctgctggcacctgcagtgcttccagggggaaaggaccatagtgtgcccctgtgaagagtctcagaatggtgcggaaggtgaatgcccacctcccgctctcttttcccactgtagaaactgattccagagaaattctccaagtgcggtgctatgtgggcttgcgggagaggtgttatgatcaaacagaaccattctctttaccctctgttcatggtttttcttggctctgtggtccagtgagttgtcacagcttcactcccaatttctgggatattcagggcaataatcttgccactgggtatttgctagttgaaattatgtggtagggagagaagccagtaagcttcacttctccgtttggctgatgtcactctcgaattctgtactttcatacggattgtaatagggagggtctaaaaggaagcttcagttttggatttttagagcttcttctaagtacaattgttgaatcaagaggtaaaaatggtatgttataactggaaatacgctgagattaaaaaggagataaattagccccattgggacagtgctattgggaatgtgaattgataccactttcctggagtctagtttagtatttattttatatgtaatgcctgaaaagatgtgtgtctcctttgactcaatacttataggaatttacacaaaggttataatcaaagattatagaactgttatactggaaaaacacgaaatattctaattatgaattaattggggattggttaaataaactatggtttgatatgctctaaaaataatgttacagaaaaaagtgtactgatatggcaaaatgtatgacttatagttaaaaaagcaggttagatgttgatagatacagtatgatagaaaaagatcaggaaggtatatgctgacatttaaatctggatatttatgagtgttttttttatttcaatctttgtacatgcatgtattttctagaaattgtattactatctttgtaataaagtaaattatttttaagggactaaataataaatatttgttacttgagtgccttacacattcactcggcaattacagtttcccgaacattggacttcagactcttttcacagcacatccttattttcataaatagaaaattaaactttttatttgtcattttgatgttatgccaggtttagaatactggagtctcgatcaataaggtggcaccacattgcagaatcatctctttttaccatgggcccaacatggatgaggatcaatcagtgtctgtaacagtctttgcagtgagggcagagtgaccagttattaagttgtaggctaaaagatcctgggagagaccagccacgcacaggacttcacaaatcactggacagtaaggaagatgaccctgtgggtagcacgagaaaatgtagccgccttcctggaatctagttcctattcgcctgtagcaccaaatgaaccaatcttacaaccataaccagcatatgtagcttggaaagatgctgaattccacaccctaagatctgggaatggattttggctctttccagcgtcctagtctggggcaagtcattcagcctcttgagacagtttctctaacagtgactaaacatgctgaccacctgtggtggttggaataagagaaaatagcattactcattggcaggtttctaaattgggaagcgtaaaatgtgagcatttataagcggtcttagtctgtgttgtgtggctatagctgattcccacagactgagtcatttataaagaaaagagtaattacagttttaggggctggggtgtccaaagtaaggtaaggggatgcatctggtgaaggcctccttgctgtattgtcccctggcagaagggcacaaggcagaagtgggtgcaggagacagaaaggaggcaagaggggcagaccatctttgataacaactcattctcctggtaacagcattaagccatcatgagagcagagtccttgtgacttcatcacttctcatcaggctctgcctcccaacaccactgcagaggaccaagcttctaacttatgaatttaggggacacacttaaaccataacataagccttaccaaacaaaacaagcaaaaattggcttttttctcagtgaaaatacgctgctaaccagaggctgccagttcacggcagcacacagtgcagactgggtgacttccatggctcttccgaggctcatagaggtttggttggcgtgtcttagcgcaccatgacatcatccagtgaccttagggctcaaaccttgtgaccagacagccctgtgtttctaacctcaagctatttaaaaatttaaaggaggctacatatatacactaaccactttttaccatactagtttcaatttaaaattatctttttggttatcttccttgctgagagaaaattctagtgaagccttctgggggaggatcctccccttacaggggaagaaaaacatgaccagacagaagtgagaaccagaacagagtggagggcatctaccttgtgtttttgtcttttctctgttcacttctttcactgtttgcaaataaaccctgccaaggaggcagagcacataaggggccctcgtgagggaagtgcttgatgggatgctggacttcctcattaacacttcacctagttcaaatttggccttcccacagcagctcctacctggggctttaccagtttttggagcatgcagtcttaaatctagaaagaaatgcccagtgtgattcttagatgtttggtggcttaacctgtcccaaatgacaggtgggcctcccttcacactggacaggtctgaaataaccaagagaaacagtggtgctccaactcagctccatggggaagctgagagggaccatgggacttgtcctgggtctgccttggcatgtaccatcatacgatctgggctcacataagtagcagtcctttcctaagaggattctattcatacttcatgaaataccagttgtctatatcaaataatcagtgtggagaaaccactccagacgaaaggacaccttgatggaaacaaggtgggcaggtgagggtgaggaagctgagatgatacggataattgtatactactcaaaataagtgcttgagggcctaaaacattaccccatgtaatacatgtgttatgcttttcttaacaattgcattggaacaagataaatgcagaggtggttatggcaattccctatttgtaatgtacttttgagacagaaaaatcaaagtgatcaccaaactgtagtgctgaaagatgattcctactgtgatcatcgcattccttcagtggaattgctgcatgtgactttgcagagagaacagttagggtatggttatgttcccctacactccaagtggccaaaggacccaaggcatttgggggcagcctatcaaggtatttaaatatcaagccatgatatttaattttattttgaagccaatggaaagcacggaaaactacagaagagagaggtgccatttataattcaaattattgaggattttatataagacagagtacctacttttagtcccaggtatagcaaatttgtcttttctaacttgacaatggctttaaaagtgtaccatgatgcccttccactgcaaattacagggcactcagctatttttcacaaaatcatgatacttcaataactatgttgtttttctttagtggagctactattgagcctcacagatgattgacacatatttccctgcaaattaacatcacttaggacatacttatctcagagaaaacggcccagaagcatattggggtgaagggaggctaaggccccagagctcttctgggcatgagatttctttctcagggggtgcttatgattggctgcttgtcccaagatgctaatggaggcagggaaggctcactgctccagcccatggggcggagcaaggccagtccctgttgcttcgggttccatttatgggctttctacctgtgctcacttccccaaagccacccctgatttgaatgctgatcagcagccccattggagcagcctgcttgcaaatggggtggagggggctgatcgcagccttgcccctgctctccttggtgcagcctgctctgggaaccagctcaaaggatggtaagtttgacattctaccaagatcttatcaatttttctttcttttcaccacaactaattacaaaaatttgcccaagcactgtgtttgtctccgtgagtgtgatgggacccagagcgtgggctgggagtggggatagggtgttaattaaaaaaagatgtagaatatctaaaggtaaatgagtagaggtccacaagctgcctcaaggaacagaatggaaatgacagtgactggcagtcttgctaggaagggacatgtcagcatgtgctactgctcatccaaagagaagaaggtcaagtgatgctggtgggccaggtgctttcccgggaagctccatttggaggtgagaaactgaagcaggcagaagatgagatgataatgatcagaacctgggcttgcattgaaacctgagaaacgaagttggttgctcatgataaccatcattctagtgttatttttccttgtatattttatgtatacacttgcctgagttgcaaatgtaatatttccccaaatctgaaacttagtatcattaaatgccatctattacatcttcaagtatgaaaacccatgtgagaacaattgctgaagtttccatctgaggaggaaccctgtgctgtgtaaactgcagctctgtgcctttttacactgtgaactgtgtaaacacctgtgtttgcttttctactttgactactgaaagtcttcaggcagtgctacctactttcaggtattcattctgaactatgtgcatactaaacaccttaagtctgtggagtaaggcaggggttgactaagtgaactattacctaagaagcagttttagaaactaagtattaaatctgaaatacagaatgtggcttaaaaacaaattctaaggaggtggcttttgtttaaaacaatgaagacaaagggaaagacctcccaggatctcttccagccagggggttccgtccttgcacattgatttcatgcaaagaaatgatttttcttgtgttttttcctcctttcagcaaggtcataaggagagtcaaaatcctgatcgagtctttgtttctaaatgaggagcttagatagtgatttcttaaaatgggccatatttggaagccatttacctaattttattcagaatatttttacttaaagcagttttcaaaactcgacgttttccagtttgcttggctgcatccacgtctcaccttaagcagcacacccctccgtcctcgggagggaagcagtgagtttggttctgtgttgtgctccctgttgtaccagtgcagtgctcggcaaaccccaggtggaggagtatggcccaagaatgtagatgaactgggaacccctcccttgtctggatgcagctgctctgaggaaacaatgctggccgcactgcccggaaaaaggcgaggctgcccagcccagcgctggccccgagggtgttctgcaatgatggaaacattgtatagtttgtatcttggctactgagcccttgaaatatggctaatgatggagaagctaaagctaattctttttttttttttgagacaagagtttcgctcattgcccaggctggagtgcaatggcacgaagttggctcaccacaacctctgcctccccggttcaagcgattctcctgcctcagcctcctggatagctgggattacaggcgtgcatcaccacacctggctaatttttttgtatttttagtagagacggggtttctccagctaattcttaattctatttaattgtaagtaacttaagctccagtagctgagagtggctatgagagtggctatgagagtgcctcccacgtagggcagtgcaggcatatttcttccctcaattatgtcactttctttgctcctcctcatttcctggcatctttggttagcactgctggcttcaaaaacatcacaaactttaaatgtaggccctgttctcaggatgtccagccccacaaggaaggaacaggcagcagcaaggtcagagcatccaggtgtgcgtgtgggtatggatgccagcccagcaggcagggttgcacaggtgtctttacccagtggactctgtttagatttgacaggaaggtgtcagagcaaatcacaggggcttcagaaagaagggattttgttcgtttacaaactgcagtttgcagtttatccttttcttggtcacaggcgcatttgaaagtgtattgctaatgaaattggaaagtatgcatttcccccaaatctgagatttactcacaacaagcacagtggggacaaagccagaggcactgacaaggcagtgtgagaagagcagaggtggcagcaggccccaggagacaggtgtgttaggtcaacagcaggccccttaacccaccacagggctctggttactcacctcattggcagcaaagttccagaaaacacaggatccaaggccggacacccgtagcttggttcatcattgttcaaggggtctgtgttcccatctgagaaagagcttgtgcctgaaaacgttcccactcttcttggtatcactctcttcagagtggagagaaaaaatatctagtgttctgagtaaaacattaagttttctaaaatctctgaaggtttaaatgttggtataaagaactaagacaactaacaagtgctttaaaaatataagagaaaatgtttcgtaatggagagaactcagtctgacccgccagttgcaaacaaggagaggtgcaggaggttcggaaccagatcattcctaggttctgccgtaagacagagtgcgcctagtgtgtgccttgccagccttccttaggaatgctcttctgctcttgtggaaggtatcctgttccccagtgcagttgtggacagttacagctttttttttttttttttttttttgagacagagcctcgctctgttgcccaggctggagtgtggtggcacgatctcggctcactgcaacctccgcctctcggtttcgagcaattctcctgcctcagcctcccgagtagctgggactacaggtgcgtgccaccatgcctggctaatttttgtatttttagtagagacggggtttcactatgctggccaggctggtctcgagctcctgacctcgtgatccgcccacctcgacctcccaaagtgttgggattataggcgtgagccaccgcgcccagccaacagttacagctttttattctcagacttctctcagcttccatgtacagtctctcccttgagtagtgatctgtttcaggcagccacaaagatccctacctaaaacacacttttgttttgttttgttttgtttcattttgtttttgaggcagagtctcactctattgcacagtggtgcaatctcgtctcactgcaacctccacctcctaggttcaagcaattctctcgcctgagcctcctgggtaactgggattacagatgtgtgccaccacacttggctatttttgtatttttagtagagacggggtttcaccatattggccaggctggtctcaaacttctggcctcaagtgatccacccaccttggcctcccaaattgctgggattacagacatgagccaccacgtctgtcaaaagcacacttcttaggaaggaatttgtctgacagtgttaggaaaacaaaagctgtttctgcttgggaaaatgttactggagtttggatttttccctctgtgtttgatgtgtgtcctgataagaggtcacaagtacagaagctggaagcattaagctctatttctttgtcttccagaggatgtaggaagaagctggtctgctgactgtcatacttgtgaccagcttgcacaggacatggccgaggaggcagcccagaacatttctgatgaccaggaaaggtgagttatcactgttctcagagggtttggtaagcttgattttaaagtatgcattcagaaattttctttcaaaagtcatcacctctaggatgtgggctcactctggcacgagtggaggccctgtaccaggagggtgcatttggccggcggggtcagttcagaggttggagttggtgttgagaatggagttttttcctgaaggcttttgagaagactcctccaagcggatgccttcagccatgagaagtgctgattgctcttcctgcaaatgcaggataccttccaagttcgaggactttctgctgcctggtagtagacaaagttaagctatctgcttgtctgctaggtcccttgcatggagaccaggagaaacctggcacaggaagagatcatggggtcttggcccaggggtcttatttctttttttttgagacggagtctctctctgttgcccaggctcgagtgcagaggtgcgatcttggctcactgcaagctctgcctcctgggttcatgccatttatcctgcctcagcctcccaagtagctgggaccacaggcgcccaccaccacgcccgactaattttttgtatttttagtagagacggggtttcactgtgttagccaggatggtctcgatctcctgaccttgtgatctgcccgccttggcctcccaaagtactgggattacaggcataagccaccgcacccagcctccatgggtcttatttctaaaccctcttccccatgctctgtgcgcgccagcacccatgtgttgttgaggctgggcagcctgtgtgctctgctgttgactgtctcatggcagtgtgacatggtgcaaacctccatgccccctttcctgggcgtgaggccagcaaggtgacctgcctgtgggatgtggtaaggacccaggtgggtcaccgctgtcccctggcctggcatgatgggagcctgtgcctgcagatcttgcccagtggggtaccccgccactgcaggtcactttacctcctcacccccagatttctcatcctgaaaatctgagtacccctgttgtcacatctgtaaactccagagggtcgttataaaaatcagtatccttgatgaatgcttgctgtcagcatttctgcctttgttagcttactgtctttgtgccatcaccatcattttatcaaagaaacccaaagcaaaccaggatgagaaaatgaggctgcacgtgttgacggggttggtcacattcatgcttggaaatttctttgccttatgtcactcactgctgccaagcattgtctgattttggctacaattttttcccttattttttctggttacctcatgtttcttttattccaaatgcccatgctcctgcagactcccagagccttgatgttggcccaatttgaccttcactcttatcagtcagggaattgcaaggaattacccctttgcccttagaaaggaaagaaaagctgaggagcggaagtcgctgacttgatgttttttcccctgtatatttatacatcttgtacttgcagaccaactagttcatgcacgcactagccattgtaattggtgtcgaggccccatttctgaagtcatagccttttggggtttcctgagtcacctaaagcaagacagtgactgatcttgttcatagaaacagaagaggtttcttgactctcctgtagccctcatttcatggagttaggcctgtagtgtctgtgtgtgtgtgtgtggtataggacatgtgtgtgggtggtgtggtgtgtggtctgtgtgtagtgtgtggtgtatgtgtggtatggtatgagtggggtatggtgtgtgtgtgatacatggtgtgtgctgtgtgatgtgtgtgtaatgtgttggtgtgtgtgtggtgtttgtgtgtatggtgtgtttgtgtggtgcgtggtgtgtggtgtgtgcgatgtgtgtgtggtgggtgggtatgtgctgtgtggtgtgtgtatattgtgtgtgatgctgtgtggtgtgtttgtgtggtgtgagtgtggtgtggtgtgagtgtgtggtgtgtgtttgtgtggtaggtatttgtcctaatgctctccctccccttgccccccagcccctgacaggccccgaaaaacactcactcttaagggattctaagagatctgtcatgtaattcaaacaaatggctcgactagttcccttgaggcacatgatgcctcagagactgtgtttgagccatcagtatcatcctgttccccgacagtcacagttaactaagaggaagccaggtacctctgtgaaaatggtgctgattctgtgccagggcctggggacctgcctcctcacaacaccaggaaaaagagcctcccttgtatttaaattatctcccccttccattttttttatttgaaaagacctctgaaatctcaaggaaaattagctttgcagcactatccttggcgcctctgtgagtggaggacacacctgttggggatgtgtttctcaccttctgagacagaaaattacttctcaagggccaactatgtcccaggaaccagggctggtgttttctgtgtgtagcacttggaagttatcctgttgtgggggtgtctgggagggtctcggaacttggtgggtgccagggctatctaaccttgtgtgggcccagagtggtgggcagtctcacagctgtggactgtggggcgcacgtggtggacagaggttaggttcgtcctttccttaattttatttgcccgctagatcattgcagaaatcctctaagtctgatctggtctggtctgtatgattccaaagttgtccccttttctattattgttattttttattttttcatttctctggcctttggaagacaagcatagttgagagtaggcaaggaaatccttggaattattcaacagtttgaggcctttgacctagtgaccatcttcatcttcaaaataacagcttttcacctccctgcacactttcctcaactataaatattgtcctcgtctgccctctggtggcggcttcttgggcatcaagaaccaggcttgtaaaaattgggtgaaactatccagttttatctttgtagaaaccttgcttaagataaagtagatatcctctagactttatagacatccaagacaggtaaaaaagagaattctaaagagctgaatgcatttttcaggggaaagaacaaaggcgaacacctttagcagctggttaccaagcatttagctaatacagggcggccctttctagaatgacagtcctggcagcagccccgtgaagtaggtctgtgtcgttcctctcaaacagagaaggagactgacacagagaggcaaggtgactgcctgtgtctagaagaagtggatgtagagcctgcccttctccttagcacagcagcctatatggagctgggaacttggcaacggttcccattgccctgtcgctgggaatgggcatggaggagaaacccaaatcacaccatccatttctggctgaatcaagaccagaacccaggaaacccgcaccttagttcaggactatttcactcgctgcacttgatctttctcaagtcgattggtgccagacacagatacctcaggacccaaggagctacaggctgaaagggaatgaccagggaccagatgatgacccacgatgatctctgctgacaaacatgagagcagcagacagctgtcaaggcctagggagtccagagggaaagtcaccagctgtgccaaggggcagagctttggggctgacttcagctgcagcttgagctctggaggcacacctgtagagagctttgaaggaaggtgccatagaattggcatcggctttgggtgtgctgagaaccaggtttaaacgttggctctgcctctcactgatggtgtgagcttcgctgagttaatttgttttgctgggccttcatgatcccatctgcattaggctattcttgcattgctataaagaaatacctgagactgagaaaggaagtttaattggctcacggttctgcagccagtacaggaagcataatgctggcgtctgctactggggaggcctcaggaagcttacaatcatggtggaaggtgaagggggagcaggtgcatcacatggcgacagcaggagcaagaggaggggaggagataccacacacttttaaatgaccagatctcggagaactcacaaagacagcaccaagccatgagagatctgcccccgtgatccaaacacctcccaccaggcctcacctctagcactggggattacaattcaacatgagatttgcacagggacaaataccaaaatgataccagcatctgaaaaagtaactgcacggaacctctcaagtctgttgtggaaataaacagggaggatgccatgcagtgcctactctgtgtctgcgctggcatctctccccagggtcatgggttccatgctgttcttttctgcagcatgccagatccccatgggctggaagaatgtgctcttagggctgtgagtgagcagcaggaatggggatgatgaggcaggaagagaggaggaggaagaggagccctggaagctgccagaccttgccctggaaggtcagctctgtgcatctgggcaggaagccctggaggcagcaggaagagagatggatctgttcggaggctgttttagtagtcagatgggaactatatttcagttaatcttctaaaacagaccctgagtttgggaaatatgaagtgaaaagaaccatagatgcgagtctttttgttcatatggcagccaattttgtacttaatacttttgtggcagaaatatggatatggatggaagagtggtcacaggatgtctgtgattaaacgattgtacttaatttaattttcctctggttattttctttcccttaggtgtctccaggctgcctgctgcctttcctttggtggtgagctgtctgtgagcactgacaagagctggggtcttcatctgtgcagctgtagccctcctggaggtggattgtgggtcggtaaggccttggggaaggaggcatggccaccatgataagaatgttgctttatttccctggtataaacaggacatcttccacatgggaatttcattttctgcttttaagaaacagaaggaaggtcagagtgatcttaaacctgctgttttgcaagtgcctctaacttaaatagtccacatgccaggatggtacacacacatatatatatatatatatatatatatatatatatttttttttttttttttttgagacggagtctcactctgtcacccaggctggagtgcagtggcatgatcttggctcactgcaagctctgcctcctgggttcacgccattctcctgcctcagcctcctgagtagctgggactacaggcgtccgccaccacgcccagctaattttttgtatttttggtagagacagggtttcaccgtgttagccaggatggtctccatctcctgacctcgtgatctgcccacctcggccttccaaagtgctgggattacaggcatgagccacggcgcctggccaggatggtatatttttaactccttcactgggccccacccctgactttctgctttaggaggtctggggtgaggctgagatctgggggccacacttcgagaacaaccaagactgtaagtggggcctcccagagcccaatgaagggaatacttaggttacaggaggtgtctgcatggccacaggtgtggggttttcctcctcgtccttaacacagagagtatctctgtttttaatttttaaaatgaaaattctaaagtgttgcctgaaacgtaattgccaggattcctttaagtagaaggaatttttgagttttcaacttaggctacacatttggtagacctgagaaacggatttttaaaattaaatttaaaaaaatttttttaatttctaaagagacggatttaaatggagtgggggggcgggggcgcggggcaggaggcgggtgtgtgcctggcatcaatgttgaaacaatgcaacgccaattcttttgcaattcttatgttaagatcatgtggaattgttacctaaatgccaggggtttgcctgacatcctgctgctgctgcttacgtacagagcataatcatcatgaagactgcgaggattgccagggaagaaagctttatcaggtgctgcagatgaggagaagggagataaagtctcaaatatatctccccatctgactaaaacttgggggtttatatagcagggaagacgagaaaacaaaattagagaggggtgaggaagcaatctgaggaatgaggggcctggctggatgcagggatctggtgggtccctttcctgggttggtttcctgagggaagaactcagatgagatggatgttaagtttcaggttttaagactaggagagtcagtttccatgtttattcaaaaaacctataaatatcacttctgtgggacaattaagccaatttcaggattagtttcactcacttagtttatttctccttttgtgacatactttattcaattttgcaattttatgtactttttatgattttttatttatttctttctgttcaggggtatatccacttttttttccagataatttgagcacagtgactttgatgactaattggtttcagagaaatatgagtcacttgactattctagcttattccgaaacattttctaaatatttcttcctctcggatgtgtccagttcaggaaattacttcatacctcagttggtgcatccagcctgcatgggtgctcaatggcactcgatggcatttgtagcacgtcacatattaggccaggaacacggcctttgatttttcctcagcttttgttatcacaagatattaatacactggactcttgacagtaaatagtgactttgactcacaatgttaaaactggatttgatattgtcctaggctaaacttgagagtgtcctgggaggctaggggcaagctgactgccagcaccactgctggggtgcagggattggaagccacatcccctgtgaggatggcccagccctggcctggagctcctggagaacctgctgctctcggcggcctgcaggcctttgggttccttttagcctgagcaaagctggccagaataacagactggggttaagagagcccaggcagaaacaggtttccttacagggactcgggtctgacagaaaagcagcagggtgctccagtcccctcttcacccgccacccccacttccttcccctcctacctggggatgagaggggtgggggcttcagggaaagcagctcttgcacccaaggcagtcgcctggcttcttgctgagagtggctctgtgcagggccaggtctagcagaaatattttcttttaacttttattatggacattttcaaacatctgcatgagtagagagaatggcatcacaaacactcaaggacctgtcatcgctggcaacagttgtcagctgtgcgcagatcctattccagatgctctcacagacatgggatgtggcagggccctcagcctcccagccgggtggacactggctccgctcactgcccggccttcagccctcagagatgggaggagtgaacgtcagccaggtccgtgctaccatcagggccagattgcctgggtgggaacatcctgcttataaactttggagtgtctttaatggtcttcctgtttgtccaacagctccccaaccactccttccgactgtggtgttgccccctctactacacacccctgagcaggacctttgaccctcattattttatgaccagaccactgggtgtttctggaacaggcattcattatcagcgtggctggtggttgtgcgtttcctcatattgcttagtgtgggctacacctaagacattgtttaagcaaggaaatagaaagaaaacacacacagcaggacacggcagcccaaggacacgcatcttcatgatcagcccgttgttaggcccaggtggctttgaccttatgtataacttagggcttctccagctttatgttctcaccttcccagcacattgcagtcttcagaatgtttgcttttttttttttctctagaggtctatgctaatcatgtgcttcttatgagtgatgggaagtgtggctgtccttggtgtgctctgaatggaaaggcagaagaccgggaatcacagagcccatcctcatcagcttccaggcagaaggtattcctggatctggggaaattaggcttttcttcctgaatacagtacatgtacagtacagctaaaaagcacctccatgtttcatcaggaattcatcagggattgttttcctatcatgtgtgtttgtgccaatgaagcaagtgtgacttataaagccttaattcagctccagagcatagttccacatataagaagtgcaggcagggctagcccagcccagaggagtaggggatagccctcagatggggagtgaggggtagccctcaggtggggagtgggggctgccctgcaggtggggagtaggggctgcctcccaggtgggaagtaggagggtagccctcaggtggggagtgggggctgcccctcaagcggggagtgggggctatccccggggtggggagtgggtgctgtcccccaggtggggagtgggagctgccccgagatggctccagcacagacaaggcttccagcagccaaagcactgaaaccctgcttaacttgcgcagtgtggggagctcgttgaagacccctattaattaagactgggctacctggatgtttgtgaattcccttgcatctgtttatcagagtagctaacagggcttgggtctgaaggcctgggcaatgccctggagatggaggagaagcgtgagaggagtgactctcacatctgtgggtggggtccgagagaagagtgaaaacttctgagtgagacatgcttttcacccagaataagcattggttccaaagggacatgcacagacagcccagagttgtgcgtttctagttcaaatttaaagaagccagttctctttgaagctcccagaacctctgctgtccttggcaaagactctcctgcagttcatttttcagtattcctcatgcagagcagcgttattaaaccaccccctccgtagcacatccatctgagtttatattgaaatgaatttgatctcaacccacagtgtttgtgtttgggagcttttctctgctctgccatcacttttgtcagcgaaagttcaaggaggcatttttaggttcccaaggaaggatatttagtaagatgagcgtctgatggttctgagaacaggaggttggggagaggtgttttagaggggaggtgatattacctgcgtttctcacattacacaatgtaaatagccacatacagtgacttccttaggcttttagtgccctcacctccaaacacaagggggcaaacagacctcatgcttcttgaacacttggtgcagatctgctatgcagaatcacctagggagcttaaaagtcaaagaaaccaaacaaaaccatgcacaagccctgcctctgaagattctaacagacatgctgtggcgtggctcagggtgatggtgcttcaaccccaccccacccaggtgactccaaggttcagccacctgggacctcagctttgggcatagatcgatgcctttaggatttgaccatcatgtcccaaagggcttggtcctggtgaaatgtgcaatcagggggctctctggttttggttgactgggagacccatttccaagctgcattctggccgctctgctctctacagccccagtgggctcaggcgaaggtcacacagggccatacaccagctcctggacgtgctgggcagtttgctgattgggcatagttataggatagtgtcttgcaaagccctgtgtctcccatgctgctcactagcaccatgccttttaggggttgtaggtacatgcagctgtctcagcccctgggtttcacatcctcaggaaactgccaggatctacccaggtcctgctctgggaggccacagaggggttccctgttctcgtcacagaagaggggcaggtgccaggcgtatgcactcaggcacgagctggcatctttcagctcccactctggccttcttgacaccttcctgtgttgttctcctgaaagatgaagcacctgatgtcctgtagttacaaatctgtaaaaggcccacagcacagggagcgcacatcccagggaggggctgggccgttggttaacctatactaacttcttaactggctggaactacttctggtaacagctctctcaagagccagagtgaggccctgggccctcagtctgagggatggtggctgctttttgtaatcatgtccacagtggggcgttgtctctggacaggcgtcctgtgtaggaaacaaggtggccagcttcccgtaggccaaaagtgtcccccctcctcctgtgccgtgggcacctccctgctttcctggtgccaccaggattgagattttgtcacaaggagagctgcacaggtcaatgcaaggtcaacagaggcctcatgaccaagatgggctcccagcacccctcacctgccctccaatgcccccaccccacctaagctctcagtgtgcacaggccgagcaagcccagtggcattgtctctgagttctctcttgggctccatctcacttccagtccagcagccagcccggccaccccatagcctcagaggtgttcaccctctgccttcactccacaatcaagacctgccatcctcatagccctctgagtggatcccctgctgccactcctgcctgccaggctctcttcagtaccgcaaccacactgttgcttctgtgcattggagcgtgccactcttgtgctcagaaccctccatctcattcagaatgaaactccacttcctgagtctgaccccacttggcctcccgtaactctgaggtcacctcctgtgctctcttggttcccacttgtggctgcagccccacgagacttctgctgctcctgcagtgaagcaggtgtgcctccaccttcggcatagctctgcattcctcctcttccagctctgcttagatgtcgtcacacacagcggccttctctgaccctgtgtataaaaaagcaccgcgccccccccccccacccccaccccgtcccgaccccgcacgaatccctcctgcagctctattcttccgcagcacgacccccagcagatgctgttatggctacatgtttgctttctggcttcctctggcagaacaggagccctgggaggatgaagctgtctgctttcctcgctgttgcttctctggtgcccagcacagtgctgggcgcacagcaggggtccactgctattttgttaatgaagtaatattactttcccaaatgtactgggttttcataagcagctctctcacattattttattattttttcttacagaacatttggaaaacaactagtgaagcagcgttaagtgttgttaatgaaaaaacacaggctgttgttaatgaaaaaacacaggcgcctctggattgtgataacagtgctgataggtatgtcaatgtaccatggcgaaatattgcttttctgaacatgcaaatgacatggaacttacaaagaattgctcagatgtgaaagtcgatgcttgttcctacatggcccgagggtgggttagcaaatgcagctcttaaattgatggaaaaaagaatggtgttctgaagttaatttgcaggagtagaacaggtagtatgacaaacccccgaatgctgggagccgtagaaggtgatgtcatacaagaatcatcatcatctctattttgaaatctgggaaggaatatggtgagccttctgggtacaagcactcaacatgatggtaattggttatttcatggtgcataacatacagactttaaaacagcattcgatgaaccttgaagacattatgctttgtgagataagccagtcacaaaaagacacatcctttataattctacttatgcgaggtccctagagtagtcacattcatagacactgaaaggagagtggggtggttgccaggggctgtggggaggaggaacggagggttgtgtaatgggcacagagcttcagttttgtaggatgggtaagtcctaaaaatgtactgcacaaccatatacatgtgcatacacttaacaccactgaactgtgccttcaaatggttcagatggtaaatgttatgttattgttttaccacaatttaaaaaaacacaatagcaccaggcaatacaaaatttaaagtagacataattttaaaaaatagttggccttctctaatgtcaccctgtacctgaaattgatggttttactccttctaatggaaattaaacatttaagcatataaagaacaaatgtaacttttctttcttaaaggaaaaacatgggtaaatgtagatgtttgttttcctcgttattattcagttccactgttttcaccgatgcgacttttcctttcatgttattgttcaaaggcagtgactggtagtggcccatcaatgttgccaagaacagctaaactgatcacagttctttctgatatacctccaatccacctgatctttactcttgatttgctgctataatattgctccttttatttatttgtaaaatcctcaaacctgacaggacagggggcagggcagagcatgtggctggcaccatgccctgggagaccacgggccaagtccaacctgtgccaatggacgcacatgattcagcccctaggtggaaatttaggaaaagaagaatccgtgacagccacctgtgagggcaggccacgctgcacacctgactgtgttcccccccattgcagtctccgagtctttgctgacagcagtattggggagaattggacccttcagatggtttgtgacccagacacttggatgcgtgggcccaggtctgttgtttttcggactccattttgctaacaatatgcctaccttttatggccggatttgtctgtctgtcccccggaaatctgatcgctgaggccctgtgtagcatccatttcagggcagagcatctctgtgtgaaattcttacttcttttggattctactgggtagattggcacatcccctggagccccagttaagaaaactcattctttgctgcttgagcagaacaattttctccaatgctagggtcaaccaatgaagaatttcgcagcttatttttgagaaattatttcaagacttagctaaggtgtaagtaactgttcaattagcaagaaatcttcaagtggaatcagcactccctgggtgccgccacgggaatgtcattcttgtctctctgctgaggcctggcaatgcaggcagggcctgtgaatacacacgagaaacaagagcagagtggggtctccctctgcgggagctcattgactccacctcccacctcctgcttagctgccacagtctgtcttgggccctcactggttacaaatccgaagtgcttgggtgagcaaacctctggcctgtgtgcttggttagaaggaaagggtcttccttcctagcaacagaagaccttcttagctgtgagcagagttaagcctggtgggggtactcttgtgtctgtctcctgaggcctgagcgcaatccccccacccccaagccagtccctgttctgaggccctttacttttgtgattgaatcacaatcaataaaagcctgacattgtggaaagacacaaacatgcacggactttaatctggacagacacgggtgcccttttctttttccccaggactcagctaagacatgcaggtttgttgttgttgttttcctaaagaaaatcactacattaagaactaaagggatataaaaggaaaaataggaagcaagtgactaggatgatgaatggactaaaaatatgtcacattaggaacagctgaagtgacttcagatgtccctctgggaggacagaagatccgggttgacatgccgttggaagtacctggaagtgggcttcatctgacagagtggacagcatgtgaacccctgcaccacaagccccagagccgaagtgtcatgagtagtgcaaggttagagataactaggtccacgcatgtttgtgtttttccacagtgtcaggcttttattgattgtgattcaatcacaaaagccatgagctacatggagctcctaaggaggcaattttccgtagtatttcccattactttgcagccagagctgcgggcacacaggctgatgccactccataagtcagtcagtattgcaaaccatacataatagtatacctaacctataaatggtgtaaggtaaacattccacagcaaacaaagtaacatttaacatcaagaagaaaaagagataggagaaagggttaatgaaccagtccaggggaagccaagaagacaaaaggagtcccagtctggaccgaaggattcatcagtcttacaagaaaatcttgaaggtagcagagcttctggcggcagatgtcaagctctcatcacgagtgactgcaataaagtggcagttaagacggccatttggagctgttcaggcctaatcttgtatggtcacagggccctctggtgagaaccaatagtggaagagtgtgcgcgtgtccttatctggttggatgcagcctttatttatttatttatttattcaacaaaatatcttctccttgttggcagagtgctctatgaaaagaaatggaggctttttctaagatggagttagttatgtcatgggtacaccatacacgaaggctgatcatggtgaagagagggttggggacaaacagggcggcccaggcagtggcatggtggtcactgtgaacatcccagggccaggacgttgcgttggatttgaggttaagtgcagtccacattgttgacctaaagaaagaaaccgaggcaaagttaataaacagggagtttatttgggccaaggttgagcaccgcagaatggggaagtgcacactgcacactgggaagtgctttggaaaacaaatgagaggctcaagttttaaagaaaaaatgacgactcaggaagggggcaattacagaagttgttcctcaggaattctcgttggtttacagaaataacattggtcagtgattggctatacattgttgaactataaggtgaatggcattttttggctacttggcgtcagtcagtttagaacccacatagcaagtggcttcaagaggtcattgtttagctcaagtggagtgagacacgactgctgtcatattttaatgcatctctgggcctgatcatttaaagggactcgcattcctcagataaaatgtttctttttctttctcatcatctaatagtttactctgcaccggggcaggtctattctctgagctccatgctaacagacacggacagtgagcctcagctgaggcactagaatgatgactcttgtataggtggggactgagctccagagcctctgaccctgggcctgtgtcctccaacgtgcctccaccacctcttctgcagagcagagcaagcccagagccagttggctgcaggcattggaaatacttgtcttggatttttctcatgcatgattataatgctggcctggccttgccacagcctgagacagagacactcacctcattggagccatgtgggaggagggaggctgagagtaaggctggtcttgccagaggtggggcctggagccgccgccgagaaaggaacctgctgtgcctcacccactcctgcagggctcgctggggctcatcagcagggtgaggtggtgataacagctgaaaacagggtcctatgatgggggacacgaagatgaccggctaactgaccctcgtccctgctggccagaggcacggtccttgagtcccattcccaagccctgcctccctgccaggtttgactgcactcggaataagcaagtagttaccaccaggccttccgcggtgccccctcagtcactgcaccacagtatgttccagtcaagtccaggccccacagggaagacagagcatgttttgtatgtgactcgcccctttgggtgaactgtctgaagcagtggccatggattttagtcaatcgtttaataagctctactctacctaagacttctccctcgagtgcctgcagcagccccgctggtttggcttctaaccacatcatatccccatggtcagcctgggcctgactcccaggaatgagcctgcaatcacagcaagggaatttccagcaaagcctggtgaagggcatgatttgtaatcaaataagccagatatgtgactgaaacatgaccgggtttccttttctttctgcactttccttcccatacagaattccccacaaacctttcattataatcgcaagggcctggagcagtggtggccccaggttccatcacaggcggctgtgtgctactgggaccgcagacagcacattctctgctcttctccaggttggtatctaacccctgcaattgaatttcatcagaaagctgctggtgagcatctgatgcatatgggggagactcacccgtatgtaggcggcctcagagtttgtcagtgaaccatattttgcatttctaagtcatttggacactgctcaggcagtttgaaggcatctctaaaatttgtcaccacagtaagggaaaatatttttgctttctgtaagagcatttttgctgtctgtaagagcgccatctcccagctgacaaccttatagagttatagatgaccttatgcaattgctaattttctattggcttagctgaaggggtaacatgaacttctaatactaagcaaccctgaaattcctgatcaaacatgcctcatagttctagctggtgccagctgggcgctgtcttggctagtatgctggaaagtgtgaatcctaccactcacaacatagcgccaatgcacggggccaatttgtggtcacccacccaaatagcagagacctcagtagcagtggggctgtttgttaaattggctttttgagcatggcggacatcagctactgatgccagacgaggccattcaataaaccctgaactgttcttaaacttttaagctccagggcaccacttctgcagcagctccctgcagcctgaagatggaggcttcctgctgtgtcctgagactgctgtgctgtgcggaggatgtggccacggggctgcttcctgggactgtcacgatggagacccccaccaaggtggccagacccactcagaccagctcccagcgagtgcccctgtggccgatttcacattttcccacttctcccagaaggtacggtgaaggaggtatggaggccagcaccacttctccaatccccagtctggaaccatccatgcccaatccgttagtgattttagtatcttcgttgtttgctttaattatagttgcagttgagtccagtgactttcaagttacaatgctgtagacataattggccactgtttgccatcagggacccatgccacttggttgcctttatgtttcccatcaatcacatactgagactaaagctttgtctgactgtgtatattttgttgttgttgtttgtttgtttgtttttttgacagagtctcgctctgtcacccaagctggagtgcagtggcgtgatctcggctcactgcaacctccgcctcccgggttcaagcgattcttctgcctcagcctcctgagtagctgggactacaggcatgcgccatcacactgggataatttttgtatttttagtagagatagggtttcaccatgttggccagactggtcttgatctcttgacctcgtgatccacccgcctcggcctcccaaagtgctgggattcaggcatgagccactgcacccggccgactgtgtgtattttattttatttttttttcgagagggagtcttgctctgtcacccaggctggagtgcagtggcgcgatcttgggtcactgcaagctctgcctcctgagtttatgccattctcttgcctcagcctcccaagtagctgggactacagtcacctgccaccatgcccggctaattttttggatttttagtagagaccgggtttcaccgtgttagccagaatggtctcgatctcctgaccccgtgatctgtctgcctgtgttttttaacgggacatgcacagcacactggaagaggaaaaaaaaaaaaacatgggagcatgagaattggccattaagatacttaagccatttctacctccatgatcttccttttcctgctttctttaatctttcgtttatgccacgtaatggtaccaacaccatatgctttactcaagaccagcttttaacacataaatgatcttgaaagtcctgtgtgattggaagctgagacttgagtatcctagactatttccaactccccaaccaatttgcagcacaaggagctagggagaaatgtagaaagggtggcacccaccctcacggggagcttttcgcaaaaacacaggaagtagtgacttgtgggagataccatctttcgtgtctattaaatcagtgatgagagaaactctaccttttactgttactaatgtagctagagcagtgactcccaaatttttgctgacctcagattcacctgggggcttgctggccccaccccagtttctgacccagtgggtcaggggtgggtcaagaatttgcatgtctcacaagcgcccaggtgatgctgatgctgctggccctgggaccccactctgagaaccagtggaagtgaagcctttcatcaggtttctcagacttggcttctagctggctggacccaggccaggctgcttggcttctgccctcccaccccagtggtccactgtcatgaaatctgaagcctctccctctctcccacagctcccacggccttccgcctggcattcctcgcacccccagcttcacggcatcgcagtctggttctgagatcctctatccccctactcagcatcctcctgtggccatcctagctcgaaattctgataacttcatgaaccctgttcttaattgctccctggaagtggaagctcgggcacctccaaatctgggattccgtgttcatatggcttctggagaggctctctgtctgatgatggatttcggggacagttctggggttgaaatgaggctacacaacatgtctgaggcaatggcggtgactgcctaccaccagtactcaaaaggtaaggtgcatggtgtccttatcaggagcctgggaaggaggtcctgagctaggggacccaagaggcagtgttgggaaaagaaaagaaactgcattccgtttctctggactcagccaaccttcctggctccaagaatagtagctcagtggcacactgcggacgtaggtgggtttgtgcactgtgttttgcactgtgaccaactctacatacttcattgcatttaatctttccacttgccttgtgaggtagatgtggtgaggctggggacttgccctgaggtcccaaaggtaatgtactggcgcttcatcctacacagaagcagaattctaaaaataataactattgaaaaattacttaaattgtccttcaagctcatgcacacacatatgcacacacacaatgttctatatgaattcttttgcactaaaatttccaacattttgtagtctcaacaaaagtaagaaaaaattctttacattccagcgttggacccattctactcagacaactactaaacccctagagatgatgattgggggtggagggtgagtggagagttctgatacttttccacttacggataggatttaattttttctttctttttttctttcgttctttcttccttttttctgagacagaatcttgttctgttgcccaggctggagtgcagtggcgcaatctcggctcactgcaacctccacctccaaggttcaagggatcctcccgcctcagcctcccaagtagctgggattacaggtgtgcaccaccatgcccagctaattttttgtatttttagtagacatggggtttcactatgttggcctagctggtcccaaactcctgacctcaagtgatctgcctgcctgggcctcccaaagtgctgggattacaggtgtgagccactgcaccttcccccccggccttttgtttttaaagttactttttgaacatatacattctcatggtgtaaactcccacattctagaaagttatatagtaaaaagtccttttctattgacccacagtcaactactgccttctacttcttatatcttttatgtgtataaacaagtataagtgttgtttcccctcctttccacaaatggaagtataccacacacagtatcccactccttgcccacttaaatgcatatccatatctagacgggcttccctgtctacacagaaagagcttccctggcttttggtgtggttgctgagtagtccattaatttaatggaccaaatctattcagctctttctttttattgctgaacattgaaattgtttctgatctttcagcattgcaaacaacattgcagtgaataattacatgtgtatgtcatttaatggaaagccaagattattgcctcaaatgctatgtgcatctgtaattgatagttaatgctaaattgcttttaattaggactcttgtcctatttacattcctgtgaacgatgtagagatcaatatgataggtaaaaacagtatctttctgaagttttaaaatttacattttattaggttcatccttgtcaactgccagtgtatgaccatattcaaccaagctgagcactttcacagttccatctaatatggggtttcaatgagctcttttgttattaagaaaatttgtcggctggatgtggtggctcacgcctgtaatactagtgctttgggagaccgaggcgggtggatcacgaggtcaagagttcgagaccagcctgaccaacatagtgaaaccccatctctactaaaaatacaaaaattagctgggcgtggtggcgcgccctacttaggaggctggggcaggagaattgcttgaacccgggaggtggaggttgcagtaagctgagatcgcaccactgcattcctgcctgggcgacagggcaagactccatctcaaaaaaaaaagaaaatttgtctttttagtactttttttttcaatttgttatttgtgttttggttttacttatagtttttttttcttttcatgtaggaatttttaacttttattaagtatactttatcaacctttttttcatggtttctgagttttatgtcatagttagaaattttttccttactctgagtttatggaacaattctctcatggtttctcctagagtttctgttattctgttttctcatttaaatattgaatgcatttgaatatatatcctggcataaagcctgcattatagattccatttgactgtttcctgaatggccacccatttggctcagtgtcatttgctggaagattccattgccacactgatggggcgtgctctctctacctatgctggcttcctctctgccctcaggccgtttgctggcatcccttgttcactcatcttctctagcatggccatccatttggctcagcatcatatgctggaattcggttgccacaatgatggggtgtgctgcctctaccaatgctggtttcctctctgccctcaggtgatttgctggcttcccttgtcactcatcttctctagtgttattcttgccatttttgcttgttcctttttccacatgaactttagactcacactgactagtataaaaatatcttattggtatttttatttaaatcatgtgttgatgaaaagaatcaaactaagtaaaatttttgaatagatttattctgagccaaatatgagtgaccatggtctgaggcacagctccaggaggtcctaagaacttgtgcccaaggtggtcatgctacagcttggttttatacattttagggagacgtaagatatcaatcaatacatctaaaatgtacattggttctgcgcagaaaggtgggacaactcaaagatgggggtcagggaggctttcaggtcataggtagatacaaagattttctgattggcaattggttgaaagagttaagttattacctaaagacctggaatcaatagaagggagtgtctgggtgaaaataagtggtggtgaagaccaaagattttatcatgcagacaaagcctccaggtagcagccttcagagagaagagattgtaaatgtttcttatcagcctttaaaaggtgccagactcagttaattctgtcctggatcaggaaaagatctggaaagggaagggaattctctacagaacataaatttttccctgaactcctggcctcaagtgatcctacagcctcagcctcccaaagtgttgggattacaggcatgaaccactgcgcccagcctgaacatttcttcatatggaatttacatgttgcttgtatgatattttattttttgcactatttattataaaagggatattttttcccattttgtccccaaactggttgtcattggtatatagaaaagctgctgctatttgctgttcattttgggtctcctcttttcgtaggacaatttcaaagtgtcaaatatattttggggtaaaatactttgatttctttcagggcctgctatctgtcatgttggtatcttattgctacaaaaagtctgttttgtcattcttaaggcctctgtttaaatgttaatgctggtcagttgtgcctcaattccaatgggaggagggtatcgtggggcatgtctgaccctcccttcccattatggcctgaactcatttttcaggttaactttggaatgcccttggccaaaaggaggggtccattcagtaggttggagagcttagaattttatttttcatttacaaatgtttaatatataaattaatttatgtagagtctttatatttacgagtctcccactgcatgaactgccctgttcctgtccattttttccgtgcatctttctttaaaagtattttaaacatttctgttttttcttttcttttctgttttaatagagacaggagtctcactatattgaccaggctggtctcgaactcctggcctcaagtgttcctacagcctcagcctcccaaagtgttgggattataggcatgaaccactgcacccggcctgaacatttctttatgtagaatttacctgtttcttgtatgatattttattttttgcactattgtattataaaagggatattttttccctttttttttccattttgtccccaaactggttgtcattggtatatagaaaagctgctgctattggctgttgattttaggtcctcttctctttcactgaattctcatgttgtttatagttatcttgaagtgtattcttcagtgtttttcagctatgtaaacatattaattatgaatggtgattatcaacctctcatttccaatttgacctctccagtttctttctcttgtttaattacaatggctgatactgccagaacagtgttaaatgagattgatgatgatgggcatgtcggtctcaagatccttccagtgtttttgaactgcttttgtagaattataagtaataagagtgatctagcatgactgactccatcttgcttctaacttcacagactaaatatttttcttgcttactgtaatgcagaggccaagataactatgagaaggattaggtttatcattatacttggaggcaaaggaaactggcaccctccatgtctgaagattaaagccacattcataaggcaaggttaaaattatgataggggttaggactttgctaatgagtaggcattaaaccataacctgccattgcttagtttgtgtttctataggttgtctattgccccagagtcacgtaactgagggttgcaaaatgtgtaactttcccaactactcctgtaaataacatcactattgtgaaacctaaagatctgattttgagatattttttggatttaacgtttcagtagaccaagagacaccatctagttctaagactaccccctcacatccctgccaaggaactaactcagctgcacaaagacagtttgggatgctcctgtgatttcatcccaattgttcagccaatcatctgttccagtttcccagaaccctgctgggaaagtactttttaaaaagtacttttacaaaaccccagcctccaaattctgggggagacaggtttgagaactttctccctgttctccttgctcagcaggcctgtgattattacattctttgttgcaactcctgctggtctcattagtcttttttcagggcagtgggaaagaagaacccatcaggctgcgacattgttccattaaacttgatactagatttttgacatatataatttatcatgtaaaggcagttttcatcttttcctctcttaatgaagacttaaaaaaaaaagagttgttgattttgttaaattctctccagcatctgtgaagctgattttataacttttttctttgcttctttagaactccaaatctcatgtgttctattagccaatatcttattgactcattcttgaattcctaggggtgaaaaacacttgattttggtgaattactttttgattatgctattgcattcagttttctaacatagtattcatggttcttcctcataaatggcgttggcttctaatcattgattttatttatttatttatttttattatttatttatttatttatttttgccagagtaggcacagatttattgaagacaattcacagagtgggagcaggcttgagcaagtggctgctcaagagccccctcaattagtgttttttgttttttttaaaatttatttccataggttattggggaacgggtggtgtttggttacatgagtaagttcttcagtggtgatctctgagattttggtgcaaccatcacctgagccatatacactgcaccctattactagtcttttatctctcacccacttcccaccctttccccctgagtccccaaagtccattgtgtcattctttttttttttttttttagtatttattgatcattcttgggtgtttctcggagacggggatttggcagggtcataggacaatactggagggaaggtcagcagataaacatgtgaacaaaggtctctggttttcctaggcagagggccccaccgccttccgcagtgtttgtgtccctgggtacttgagattagggagtggtgacgactcttaacgagtatgctgccttcaagcatctgtttaacaaagcacaccttgcactgcccttaatccatttaacccttagtggacacagcacatgtttcagagagcatggggttgggggtaaggttatggattaacagcatcccaaggcagaagaatttttcttagtacagaacaaaatggagtctcctatgtctacttctttctacacagacagagtaacaatctgatctctcttttccccacatttcccccttttctattcgacaaaaccgccatcgtcatcatggcccgttctcaatgagctgttgcgtacacctcccagacagggtggcggccgggcagaggggctccccacttcccagatggggcggctggccggggtgggggctgccccccacctccccaacggggcggctggccggacggggcggctgccgggcggagacgctcctcacttcccagacggggcagctgccgggcggaggggctcctcacttctcagacggggcggccggtcagagacgctgctcacctcccagacggggtggcggcggggtagagacgctactcagttcccagacggggtcgcggcctggcagaggcgctcttcacatctcagacggggcggcggggcagaggtgctccccacatcccagacgatgggcagccgggcagagacgctcctcacttcctagacgggatgacggccgggaagaggtgctcctcacttcccagactgggtggcgggcagaggggctcctcacatcccagacgatgggcggccaggcagagacgctcctcacttcctagacggggtagtggcagggcagaggctgcaatctcggcactttgggaggccaaggcaggcggctcggaggtggaggttgtagcgagccgagagcacgccactgcactccagcctgggcaacattgagcactgagtgagctagactctgtctgcaatcccggcacctcgggaggccgaggctggtagatcactcgtggtcaggagctggagaccagcccggccaacacggcaaaaccccgtctccaccaaaaaatacgaaaaccagtcaggcgtggcagcacgtgcctgcaatcccaggcactgggcaggctgaggcaggagaatcaggcagggaggttgcagtgagtggagatggcagcagtacagtccagcctcggcttggcatcagagggagactgtgcaaaggggagagagggagagggagagggggaaagggaaggggagggggaggggagaggggagagggagagaggagtgtcattcttatgccttagcatcctcatagcttagctctcacttataagtgagaacatacgatgtttggttttccattcctaagttacttcactttgaataataatctccaatctcatccaggttgctgtgaatgccattaattcactcttcttatagctgagtagtatctcattatatatatatatatatcacagtttctttatccactcattgattgatgggtatttggtttgggttggttccatggttttacaattgcaaattgtgctgctacaaatatgcatgtgcaagtatctttttcgtataatgacttattttccaatggatcgatatccagtagtgggattgctggatcaaatggtagttctacttttagttatttaagtaatctccatactgttttccatagtggtttacattcccaccagcagtatagaagcgttccctgttcactgcatccacaccaacatctactatttttttattttttgattatagccattgttgcaggagtaaagtggtatcgcattgcagttttgatttgcatttccctgatcattagtgatgttgagcattttcatatgtttgctggccatttgtatatcttttttttttttttttttttgagaattgtctattcatgtccttaggccactttttgatgggattgttatttgtttgaattcattgtagatactggatattagtcctttgtcagatgtatagattgtgaagattttttttcccactctgtgggttgtctgtttagtctgctgaatgtttcttttgccatgcaaaatctctttagtttaattaactcccaactatttatctttgttgttattgcatttgcttttgggttcttggtcatgaaatccttacctaagccaatgtctagaagggtttttccaatgttatcttctagaatttttacagtttcaggtcttagatttaagtccttaatccatcttgagttgatttttgtataaggtgagagatgaggatccagtttcagtctcctacatgtggttagccaattatcccagcaccatttgttgaaaagagcgtccattccccactttatgtttttgtttgctttgttgcagatcagttggctctaagtgtttgggtttatttctgggatctctattctgttccattggtctgtgtgcttatttttataccagtcccatgctgttttggtgactatggcttcataatatagtttgaagtcaggtaatgtgatgcctccagatttgttctttttgcttagtctttctttggatgtacagcctcttttttggttccatatgaattttagaattgttttttctaattctgtgaagatgatggtggtgttttgatgggtattccactgaatttgtagattgcttttggcagtatggtcattttcacaatattgattctactcatccatgagcatgggatgtgtttccatttgtttgtgtcatccatgattttttttcagcactcttttatagttttccttgtaaaggcctttcacctccttggttaggtatattcctaagtggttttttttttttgtttttgtttgtttgttttggttttttttgcagctgttttaaaaggggttgagttcttgatttgattctcagcttggtctctgttgatgtatagaagacctactgattgtgtacattagttttgtatccagaaacttagctgcattcttttatcaattctaggagctttttggatgagtctttagggttttctagatatacgatcatatcatcagaaaacagtgacagtttgaattcctctttactgatttggatgccctttattcctttctcttgattgctctggctaggacttccagtactatgttgaagaggagtggtgacagtgggcatccttgtcttgttcgagttctcagagggaatgctttcaactttttcccattcagtattatgttggctgtgggtctgtcatagttggcttttattatattgaggtatgtcccttgtatgccagttttgctcagagttttaatcataaagggatgctggattttgttgaatgctttttctgcatctattgagatgatcatgtgatttttgtttttaattctgtttatgtgatgtatcatatttattgacttgagtatgttaaaccatacctgcatccctcgtatgaaacccacttgattatggtggattatctttttgatatgttggattcggttagctagtgttttaaggattccagcatctatgttcattagggatattggtctgtagttttcttttttggttatgtcctttcctggttttggtattaaggtgatactggcttcataaaatgatttagggagggtttcctctttctctgtcttgtggaatagtgtcaataggattggtaccaattctttaaatgtctggtggaattttcctgtgaattcgtctggacctggactttttttgttgttaatttttaaattaacatttcaatctcagtgcttattattggtctgttcgtggtatctaattctttcctgacttaagctaggagggttatatctttccaggaatttatccatctcttctaggttttctagtttatgtgtgtaaaggtgttcattaagtagccttgaatgatctttggtatttctgcagtgtcagttgtaatatcccctgttttgtttcttattgagcttatttggattttctgtcttctttttttggttaatcttgctaatggtccatcaattttatttattttttcaaagaaccagctttttgttttatttatcttttgtattttttgtttgtttgtttcaatttcatttagttctgctctgatcttggttatttcctttcttctgctgcatttgtgtttggtttgttcttgtttctctagttccttgaggtgtgaccttagattgtctgtttgtgctctttcagactttttgatgtaggcatttagggctatgaaatttccacttagcaccacctttgctgtgtcccagaggttttgatacgttgtgtcactattgtggttcagtttgaagaatttttaaatttccatcttgatttcatttttgacccagtgatcactcaggagcaggttatttaatttctatgtatttgcatggttttgaatgttccttttggagttgatttccagttttattccactgtggtctgagagagtgcttgatacaattttgattttcttaaatttattgaggcttgttttgtggcctatcatatggtctatcttggagaaagttctatacactattgaatagaatgtatattctgcgtatgttggatggaatgttctgtacatatctgttaagtccatttgttccagggtatagtttaaatccattgtttttttttttgttgttgactttctgtcttgatgacctgtctagtgctgtcagtggagtattgaagtcccccactattattgtgttgctgtctatctcatttcttaggtctgttagtaattgttttacaaatttgggagctccagtgttaggtgcatatatgtttaggattgtgatattttcctgttggacaaggccttttatcattatataatgtgcttcttttatcattatataatgttcttctttgtctcttttaactgctgttgctttaaagtttgttttgtttgatatgagaatagctactcctgcttgcttttggtgtttgttcacatgaaatgtctttttctaccactttaccttaagtctgtgcgagtccttatgtgttaggtgagtctcctgaaggcagcagatcgttggttggtgaattcttatccattctgctattctgtatcctttaagtggagcatttaggtcatttacattcaacgttagtatcgagatgtgaggtaccattccattcatcatgctatttgttgcctgtatactttagttattggttttgggtttttttaattgtagttttgttttataggtcctgtgagatttatgctttaaagaggttctattttgatgtgtttccaggatttgtttcaagatttggagctccttttagcagttcttgtagtggtagcttggtagtggtgaattctgtcagcatttgtctgaaaaagactgtatcttttcttcatgtatgaagcttagttttgctagatacaaaattcttgtctgataattgttttgtttgaagagactgaccaaacccttccggcttatagggtttctgctgagaaatctgctgctaatctgatacgttttcctttataggttacctggtgcttttgtctcacagctcttaagattctttccttcatcttaactttagataactcaatgacaatgtgcctaggcaatgatctttttgtgatgaatttcccagctattctttgtgcttcttgtatttggatgtctgggtctctagcaaggctggggaagtttattcccctcaatcattcccccacatatgttttccaaacttttagatttctcttcttcctcaggaacactgattattcttaggtttggtcatttaacataatcccagacttcttggaggctttgttcttactttcttattcttttttctttgtctttgttggattgggttaattcaaagaccttgtctttgagctctgaatttctttcttttacttgctcaattctattgctgagacttttcagagcattttgcatttctataagtgtgtccattgtttcctgaagttttgattgttttttatttatgctatctgtttccttgagtatttctccttcacttcttgtatcattttttggatttccttacactgggctttgcctttctctggtgcctccctaattagcttaataactaacctcctattctttttaaggtaaactggggatttcttcttgatttgggctccttgctggtgagctagtgtgatttttttggaggtgttaaagaaccttgttttgtcatattaccagagttggttttctggttccttctcatttgggtaggctctgtcagatggaaggtctagggctgaaggctgttgttcagattcttttgtcctgtgggtgttcccttgatgtagtactcatccccttttcctatggatgtggcttcctgagagctgagctgtagtgattgttatctctcttctggatctagccacccagcgagtctaccagattccaggctggtactgggggttgtctgcacagagtactgtgatgtgaaccatttgtgagtctctcagccaagtataccagcacagtatttggggtgtctcctgggtcctgcaggagcaatccacttacttcagggagtctgtgggtcctctcagctttcctgatttattcctgcagttgttctggagcaaaaattgactatgcgagcctccacacactgctctgtccatccaagttggagctgcaatctagtcctgcctcccattcactgtgatcccccatttatttatttatttataaaaagtggactaaggcacctaaatcttagaacccaagttccacttaatgaataggtcaactctagaaagaactcagaaggtaacagcaagacctatgattctaaatgccaaaatccttaaaggcatttgcaaatgcagttgaaaaatagtccaattttccagttgcctcattatagcttttctcctcgatgacaggtaggtagataggtactggatcaccttcaaatggctggtgcagaacaatttctagtcattgatttttgtgcagtagttttggtctttgatatcagtgctgtgtgaaagttttctttgtcttttatttgtcctgaaacagtttgaatagcatcggaaatatatattctattttggagaatttcctttttaacactctgggactggtactttcttcttactgccgttggagtagctcagtgataccttcttctatttcttctatggaaattcatctgttaagaattttaatttctccactagttagttctttcaagttattttttcttttataattatctatttaatctaggttttaacatttttttgcatagagatgagcaaaataggctcttatagttcttttattttaattggcatctgtattttcttctatcatttttatttcgttgtatttctttttccttccttaattggttgggtaaattttcattagtttatttaaagaactagctttcagattttgtttattccacattttcccctagtttattaatttccacttttatctttattttcttctttttgcttttataggtattttttttcatcttttacattttcagttggatatgtccacctacaaagaagcagagacacaaaatacaactttaaatgtttacttgtgccaaagtgaaaacagctgcctggaagactcagaccccagtaaccttggatatgagcttatttctgcctttgtcaccagtatgtttttaaaagcaaaaagaggccacaaggagtgggctgatataaagctgtttgtcaggaattttcattggtttacacagatgacattgattagtgattggctatacactctatgggctacggtgtcctgtgtgtggcattgttaggttaatttatagccactcatgggatagctagcagttttaagacaggattccttagcccaaggagggaagtggtctgtgactgctgtctcattcccacgcgcctctggggactgatcatttagaggaggtttgcattcctcagataaaagctccttttctttctcagatgctaaattagttattatttacatttaaaattttcacatgtcatgtggcctcttttgtgaactgctttcgttattaatttctagttttaatgtagcatgataagcaaatcttttctctgctgttttaactttaagtcctgatgttgtctttatggcttaaaatgtggtcagtgttaggagcagcatggctgctcaggaggttacagggagttgcagccctgtgtccctcctgtatggtgagtgtgggctggctccaggtatctgctatctgctgagcccctttgctcacccttttccgtggtcctcataaccacaccccacccaccagtgggaaaggctgatgagggagaggggatgttgggggggagaaaagagagagagaaagagagggaggaaggggagagaaaggaaaacagatggagagggagggagagagagaggcaaacattgggtaagatgaggttgaggatcaggattctgggtgatcctcccacagggttggccctctgtcctgagtaggaaaacataaccctgttttacccttttcactggaaatcccaattccttgaacaacccaggtggcccaagcctcttcctttgtgtcttctgccctgccttgcctatgaagacccctgcagcatgggcactcccacctcatcacacagcctctcacaattttggagattatttcatttgccaccttttggaatcactgtcctagatgtttctctacaatggacttggctttgctgtgtgaatcattctgatcattcttatttgagatatgtgagtttagtgatttttgtctttattgaaatgacagatgtttgtcatattttacattatgggctctgtgtgcattttaaaatacatttcattaaatagtcttttctttcttttgtatgttcatctgagttagccttctgatacttgaaaggtttgtgccttgttttagttgacctcttttatttataaaatgtccttatccctctgtttctttagcgtatccattcatcagctactatgagcaatgatgaaattagaatatttcccatcttcctcttcccttctctcttctttatcaccaattttactcatttttttctcatatatgctttcacctttcttaattgctttgttaaatcttcatgtcttttgatttccagcaattactaatgaggcaatctgcattattccacagctcctacctcttctcttccccagcccaaatttcgtttactgtatgatttctacattgtcagaacatgaaatgtttacctttttttctgctacttatgtattagtttgttcttgcattgctataaagaaatacctgacactggataatttataaagaaaagagatttaattggctcacagttctgcagactgtataggaaacattgatgtgggcatctgctcagcttccggggaagcctcaggaaacttacaatcatggcagaaagcgaacagggaacacacacgttacatagccggagtaggagcaagagggggggaggtgccacacacttttaaaagaccagatctcatgagaactcactatcatgaggacagtaccaagtggcagggattgggggtgacactaaaccattcatgagaaatctgccaccatcatccaatcaccacccacctcctcaccgccagtgctgaaggcccaaccttcaatactggggaatgcaattcgacatgagatttggtgggggcacagatccaaatcatatcaacctgctttcccacattagtcttagttccggttctagagctaatatattcggtcctcactcagcttttttttggcatggtgttcctgtttggttgtctgaagtttgtcctctagtagattttttttaggaaaattcatgcaataagcttcctctaagttcccatattcaaaactgttgctgccattatgttggaacgacagtgtgctggctctggactccttggacacatgttcttttcctggggaatctggttgtctttccattctgttctctcctgtaaccatggttctccaagtttggcccagcagcatcatgaccacctgagactggcttagaatacagactctcaggcccactgcagacctactgaatcagaaattcagctggtggccctgacactctgtctgaagaagcctccctgaaattctccattctgtctttcttaccttgtggtgattccaaagtcagccttcttttttccccgtcattgattaatgtttttctgtgattgtcatgagaattatttcttttctttttttttttttttttttttttgagacacagtctcactctgttgcccaggctggagtacagtggcatgatctcggctcactgcaacctccatctcctgggttcaagtgattctcatgcctcagcctcccaggtagctaggattacaggcatacaccaccacgcctggctgatttttgtatttttagtagagatggcatttcaccatgaaggccaggccaggctcaaactcctgacctcaagcgatccacccgcctcagcctcccaaagtgctaggatcacaggtctgagccaccgtgcccagccggtagttatttctttatttgcaactccagcagctttgccagcacgtgtctaagtgctggccactctgggtcacctttctccagcacatggtgtaccttttcaatgtgtcctttgtttcaggaaagatttcttgaattagatctttacattgtttctattccaatatgtcagctttctttttgggagactggcatacatctattagttctcttttgtcttttcaaatcttttttgtttttcctttttcatctgatccgctttcctcatattttcctctgcatcccttcttttgtgttctacactttccattctccattatactctaaaatgttgactttgtttccttccaagaccagatgctctctggtcttccatctcagaagataacgattcctcaagttgttcagtcctgttcttgtggacagtgtttttctgataaattatcttaatctattatgagtatttcctgaattttccctcttgactcttatagtatcttgtacatgctgaatggtcttttctccctccttttctccctttatccttccctcccttcttctttcctgccttccttcctttcttccttcctttctttttttttttttcttcacagcattactcataatttaaagagttgcatttttttctgaactaactgctggtggagtgtgtgtgtgtgtgttgcgtacacacatgtatgcgtgttgatgatattcacagccactgagccctttggcaactgagttctcactttaggacgttttctgttttcttccttcaatacggttcctgctcatgcatgcttgatatttgccgcttttagcagtttttgcgtctattttgtattctgaacatgctagctacctcctagtttcactaaacaaagagagaaaaagtttttatttttattcactgttttcctttttgtttttggattaactcctagaagattaagtagaaggctaagtatatctctatttcacatcaggacttgctctattataataattttaagcatctgcaactttgatacatattcattggtttcttttgttgttttatgaataaagtaaggaattggtatttgtattaggccattctccaattgctataaagaaatacttcaaactaggtaacttataaagaaaagaagcttaattggctcacggttctgcaggttttacagtaagcacgggtgccgacatttgcttagcttctggggaggcttcaggaagtttacaatcatggtagaaggctacagggcagcaggcacagcacacagtaaaagcagaaatgagagagagtgagatgccacacacttttaaatagccagatttcaagagaagtcactcactatcgcaaggacaccaccaaaggatggtactaaaccattcatgaggaatccactcccatcatccagtcacctcccgccaagctctacctccaactttgggtattacaattcgacacattagattagggagaggtaaacatccgaactatatcagtattacatcttttatcaggggttaagtctaaagtcaacttgaggctaggtgcagtggttcatgcctgtaatcccagcactttgggaggctgaggtggatcacctgaggtcaggagttcgagaccagcttggccaacatggtgaaatcctgtctctactaaaaatacacacacacacacacacacacacacacacacacaaaatcagctgggcgtggtggcggacacctgtaatccgagctacttgggagggtgaggcaggagaatcgcttgaatccaggaggagaggttgcagtgagctgagatcatgccactgcactctagcctgggcgacagagtgagactctatcttaaaaaaaaaaaaagtcaacttgaaagtaagatatgcctggccgggcgcgttggctcacgcctgtaatcccaccactttgggaggccaaggagagtggatcatgaggttgggagatcgagaccatcctggctaacacggtgaaaccctgtctctactaaaaatacaaaaacaaaattagccaggcatggtggcgggcacctgtagtcccagctactcaggaggctgaggcaggagaatggcgtgaacctgggaggcagagcttgcagtaagccaagatcatgccactgcactttagcctgggcgacagagcaagactctgtctcaaaaaaaaaaaaaaaaagaaagtaagatatgcctaagatttggtcacaaagatttccaatgccaaattcctctgagtccgtggagtgtattcttaactattatataaactgccttttctaacttgtggtcgtgaaatctgccttttgacatgaaacaacacgtagcacactcttagttaagttctggttcctgtgcatgggatgacctgcatggctatctatttcactttctacttgtcattaaaattcctgtgcaaaattattttggacacagttaagaggagcagtattgtaagaaaattgcaatagagttatgaatgttgtctcaacatttgagatatagcttccaagatgagaatacaatttgggaaagtgtacctatttcttctacatgttaatctgagttgtgcttagagtacgatgcccttctctctggcctctgcttatcacagtattcccaaatcctcctgcatgctaccatgttcactattcttccccagagatagacttttactctttaagatcattcccttttttcttcttattatgctgctagtagatccacatattattccatataatttggatgcagcaagtgaagagagaaatgactatcttaattcctaagaaagcattgcatactctaggcctatagcacattgtttaaccttttgagcttcagtattccattctgtaaacttgattggtcctttgataaacatttattatgtatgtactaagtgttctgtgatgaggtttgaggacaagaaagacagagaatgtagtgagtctgagagggaaacctggcccacgttctgtagtcagatgccaggtgaagccagtgattctgcctgggtcattcaaagaggctcatggtaggtgcgagttggccagatggaggcacaaagaaggatgttgtaaactgagataagcctgcacaggggcatatttgtgatggagaccggccgtctgagcagtggagcctggttttgtgtggctgatgcatcagttgtgggcctggtggagtcaaggatgagtgatgggaaccagctcagctgagagggaagggctcaggtacagatttgctcctgtgacacatgaggaatcacttaacattatcaagctggggaatgacacaatcaaatgtacagtttaagaatattgtgtagggagttgaggttagagaattgctaatgtctttccagttcagtggaattgtattgacagtctattgctgtgttaacaagccaccctaaacttagtgccttaaaacataaccttttattcagctcccagttctgctgggagttcttcaggtctgagctggtcttagaggggctcactcacagatctgcagccagtctcctggaggagactgacccttggctggggccatggggagactcagtcatgtgtatctcatccttcagcagactaggccaggctattcacatggaaatgacatggtcccaatgacaatgacagaggtcccaagacaagaaagagagggcaagccccagtgtgcaagcactttgaaaatccactggccatatgattagcactgattcgaggggtgaagcaatagtcttctccacttaatgagaggagccacagagtcatattatagttgtattgtaagtgtgtgaaaaacggataagggtttgggaccatttttgtcatccatcatcatagttatttgatatattcccatttggctgtttaagtattatttgtctagctgtgggataactaatatctattttcttccttatgaatatttcctactgcagaggattggcaacgtaattcacaaggcccagtggaaaatgaaaatgcaggactccttgctaaaaataattatgaagaatttcaagatagcagagcattaaatcactcacatagctccattgcgtgaggggctctgtgcaactgtatgggtcacatgcccatgaaatggccctgctgctacaagagacaagaaagatcacctctcctgtatcagttcccatattaatcaccccattttgaccattctacaaatgttaactgttatgcttgttattaaaaattcatcaagtgtccgttcattcttatttttccagaaggagtctatatgctcaaggctgttatttataacgagtttcatggaaccgaagtggagcttgggccttattatgtggagattggccatgaggccgtgtctgcgttcatgaactccagcagtgtccatgaagatgaagtgcttgtctttgctgactcccaagtgaatcagaaaagtaagacgtatgtctggagtctgagcaagcacacttcaactataaatgaagcagggtatctccgctttacttatactgttcaagttatagcagttctaaatttgatacaacatccttcattcattcttccctaattcagaaaatatgtcttgcagaatactgtgttctgagggaacatgaagataaagtcatacaaagtcttcatctcaaggaatctattatcttagtgaaaatattaagatatgcataggagcaagatgagacacgacattaaaaatgcttaggaaggatatggctaaggggctgggagattttaggagataggaactttatctaactgtggggacagggcacatctgaggtgggagctggcatacataatgagccttgcagcacgggctggaggcacattttggtcagacagcatggccttgagctaaaacagaattgagaaagcatccggtgctcactgagtgtgccaggtgcacactgatgcattgatgaaggacaaaatatccattccactttatccactgctaacgcctcactcgtgtcaccccactttatccgcacagctacctgtaagggaggtatttgcttcatgtcagttttgtagagggagggaccggaagctcagaggccattgggggtgggaatggggaactccagccacttaccgtagaaaaaagagtccctacactttgcaacaaagcaaatgggagccagccagaggcactcccaaagtgcccagcctacatgggtgggatgatggggtcacatttcccagaaacaggagaaaggaggatccaatgaagggatgagtctcagtgaactcatccatgtaagaattctttccagctgttccacacagtggctgtacctgtttataatcagactagtgagaaactctccatccaagaagttatgacatacatatggaaggatttttttaacctgtttgcctaccctaactagccggttggtcattcatattgacttgtcttatctaaacctgaataaataagcagcacgtctagccagtgcaagggcacaattcttgtaaatttccgatggttccatgccaggatttagaataggaaggtccaagtttgcatccagccctacagattgataatagggtattcttgtgcaaatctgtaaactatatcttttttttttaacacttttgattatcagattgtgctcagaattaattttcaggcatgcttaatgagaccatgtgatatttatttatcatatatctatttttagtcatatgatatttatttttcaaaaattctgatgcattgatgaaggacagaatacccattctgctttatctctgttataaacaagtattttctctttataaagagaaaattatgcagaagaacagtagtaataataaataaccctcctttcttaatacccttttatgataaatgagttgctctaaatcttcttagacatcacagtactctttcagaatctgattcagtgtttggtatccacctccatatgtatgtacatacatatgtacatgcatgtgtggtatgtcataggagggtatgtgtgatatgtgtgtacatgtgcatatgtgtatagtgcatatgctgtgtatggtgtgtatatggtatgtatgtgtgtatatgctatatgtgtggtatgtgtatggtgtgtgtacatgtatatatacatatatgcacaatcttacattacatcttataggacttaaaagcacaaggcttattagacccctatttaagaactcctgtgaagtgaagactacttagtgtacatattgagaaatactttaaaaacaaggccatctatcaaagtaattaacatatttcaaaggaattagcatatttaataccatgcagggagttctcatttagagaaaatatacaaagaaaaatttaatgacagaaattctgtgattaagtttatgtttcccaggtatgtctgatttcagagcacatgcttagaattttgaaatttattgagattcaaagggggaaagttaaaaatgaaaaatactgactgtgtgttgcatgataaaagtgaattaattttaagactttttctcttatctcctttttttctcattttaggcactgtggttatacatcactttccatctattccttcatataacgtgtcctttatttctcagactcaagtgggtgacagccaggcttggcacagcatgactgtctggtataagatgcaatgtatgtctttgttttaattccagatttaacaaaaacctccctcgcgcagtcagctgagattaggaaagccgtaggcagcagcaggttttgttatcggctctgctggagagccccatttgtcattgaacaggttctttgttcatctgccatttgttctgggaattttctgaaaccacaggcattaaggctcccaattgaaggaatgggaaggtgggttatcgggactgttatctgccagctccatgtgccacaccctttctagcagaatctcaaagggagttggccctatggccttaggagcacctcctgtgcaagcactttggggcctttgaaccagggccagcactgcctaccgcgtgcccacagctgcatccttgctgccaatctgcatgcatatcagagcttcctcaccatcactcaagcccatgaccaagtgggaaagtagaggtactagtttctctggagattccagccctcctatgttgacatagacataccttcctttcttttgccacagccgtctctgtctacacaaatggaactgtgtttgccacagacacagacattacatttacagctgttaccaaggaaacaatacccctggaatttgagtggtattttggagaggatccaccagtgaggacaacttcaagaagcattaaaaaaagactcagcatcccccaatggtcagtaaaagtagcagtcctgctgagtagctgtttgtactgcagcctatactcagtctgaagatcaccatgctgctaccgaaggcattttatggctgttgcatttgtattataatgggccactaggtccttctgtgaagcaaactcaacataagatttaagggaagatttcgttcatttctcttcagcttgaactaagggaaacggtgtagggctttgaagcagacagtcctaggttcgaattctatctcggccacccatgtgacctaagaaattcctcatctaagaaagggcaatgatgcttacccctactgctttgagaaatgaattaaataatgaagaggggggtagtcaaaaatatcaacccccttctcctcaataagatgaaaatcactagatacttttgtagttcttacaaattaaatgctgcctccccctcccccgccttcctcttaaagtatagcagacggtttctctagacctgaccctgttcttgtcttgccatctgccttccctgccctcctttccccatcctgcaggtatcgtgtgatggttaaggcttccaacaggatgagcagtgtggtctctgagccccatgtcatcagggtgcagaagaaaattgtggccaatcggctcacgtccccctcctcagctctggtaaatgccagtgtggcctttgagtgctggatcaacttcggcacagatgttgcctacctgtgggactttggggatggcaccgtcagcctggggagcagctccagcagccatgtctacagtaggtgagccactgcaaggcggcggagtgctctctacagacagcgcgggaatcagagtcttaaggcatcagcccttgggttccacatagagacctgcctgtcagtcaacgtaggtgacagatgattacacagagacaaataagacctgaccatgcttctcaaggagctcctagtccaggggaaagacaaagaggaaagagatgctttcagtacaggggctgtggctgcaaaggaggcctgtgatgtggtggggatggcttactgaaagtgatatcttgagtaggagcttgacaaagggaaatgggagagaggctcccaaacagtgacaaggtcctgggcaaaggtgctaagtgaggtgccaacaggagatgtttggagtgactggcaagacgtatatagaagggtgagatgagtgtaggttggcagattgtgaagggccttgatgtcatatggaagagcatgaactctgtcctttaactctgcatttactgagtgtccactgtgtacctgggacaaagcatcgtggagatatgataaggtgcagactggctggatcactcattcccagccgagcctctagggtgagtcctaggacccaagtggatctaatcctttcagtagggagacacacatggtcaaggctgagcctcaggctggcatcaaaactttatgctgctgtagggaaatgtcaaagggtgcagaagtatctagaaaatgaggttcgtgtaggcagtggcatcagggaaagattgcaaacttcctccaatgcaagatttccatgagaacccacactgcagcctctccacgctttggtggggactgaatggccccatcactaactatggattcaggactttttcatcagaaatagattttcacataaggaaagaattgagcagtagtggcttgtagattggtgcatgctcaattgagcacatggtggcctaggtacctggcgatatactcggtagctccagaagcccttttgtgccctgtggaagtgacatggtttattcggtgcctccactgtcatctctagagtgtgccctgggcgctctgacaacctgagaaaaccatctagtcttcattcttatcagtaggccctacctttcttgctggagctccaggatggcaagtgatattctggtccttgcaaactcaaatttgtggtcttctgatgggaatatttttctctttcaaattcagaagtcttaagtagttatccatgttgcaacatttgcaaaataaccacttatttccttagtaaagcactacctgctgggtcaggagctacccagctctcacctccaactgtcctgaatctctccacagctgtgacatgctccccttacccggagacaggctatggatctatcctgtccttcctgagtttgtaggactctaagaaattggtcaggaaaactgatccatggagcaggaaatagaacaggaagaccatccccggagaccccccagttatgggttggggtacccatcacacagagaaaatatatagatctgttctgttatcaaaagggggccaggtcatggctgtggggagggttgcccaaagaaggaagcaacatgcccctcacatagatgtattgtttgaatatagcatgtgacatcggtctgggagtttggtacttggcctggcccaggctagctggggagccagtctgttgattaaatgatgaaagacctctgtggaaatcagtcttgtgacccttgactcttctgttcttattcatgggatgacttgctgtcaaatactataattctgcagatatgagtgggtatgaagagtgaatgaaagcctgacgttcatcaacataaatttgttcatttctgtgctttccaccgtcccagggaaggagaatttacagtggaggtccttgccttcaataatgtcagtgcctccactctaagacagcaacttttcatcgtgtgcgagccctgccagccacccctggtgaagaacatggggcctgggaaagtccaggtaggctcggagtctgggaaatcctccaccagcctcttttcagcctccctctgagttgggaccactgtttggagtggtgagagtttggggcatgaagcgaggctttgtccagtttatcctactgcaatttacacaaaggagtgcctataagggcttcagagcgggtgacctgggtcctcaggggagggagggctaccccagcctggacaggaggagacagtgtcatttctggggtctggtgtgtgaataagttctttattcgcctgcattactctggcattcagcacagctcactttaaggagctcttttcttttcttttttttcttttcttttcttttcttttcctttcctttcctttctttttttggattatgctaagaactgtagcattttcaggagaatgaaacatttgaatatatgtaacaccaaaatgaaaggacatgatcggttatctgttgaacacctattctgggttagaaaaaatagggttggtttttatttctttcattcctttgaggcctgtgattcagagcaaattttccttttcagggcagaggtgctcaaatgacacatgggaattaaaatccgtgactaagctgcatttgctaaactgctttctgtggcatctgaccccaagaggtcagcccgcagagggtgctggtggagatcagcatgcagagaccaagtgcccggggcaatccggaaagggtcccggcccccacacaggcaatacccctgcccacctttagaccagcgagcacccacgctgttgggcaggtctgcgtgctgggggaacgcgttctctgggtgtgagatttggacccaaatagcaaagggactaaagcaaaaggcacagcaggaaaaagcacagaccctaggcaggaggactctggctcccgtcctgactctgctgttaggacatgggacagagtggttttcttgagttttttatctgtaaaacattgttatttttattttcttatctgtaaaacacagaaaataagattgataatttcattttttcttttctttttttttttttttttttttgagactctgttgcccaggctggagtgcagtggcatgatcttggctcactataacctctgcctcctggctttaagcgattctcctgcctcagcctcccaagtagcagggattacaggtgtgcaccaccatgcgtagctaatttttttagtagaaatggggttttgccatattggccaggctagctggtctttaactcctggcctcaattgatccacctgccttggcctcccagagttctgggattatggacctgaaggaccctgcccggtcattttttctttattttacgtgttttctaaaagtataaagaaaaaaatgaaatcatctcaaatccaggcagtaggtgatagccacttttgtctaattatttattttcagtatttttctaaggctttttatatgtggtatgtgtgtttgtcacaaacctgggttgcagtgtgagcattttcttttgttattaagcagccttttgattacataattttaatgatgtcttactgttaaatcatacataaagattatacatcactatataatgtcctctgattgaacaactgttgttgccagttttctttttatttatttatttatttatttttgagactgagtttcactcttgttgcccaggctgaagtgcaatggcatgatctcggctcactgcagtctccaccccctgggttcaagctattcttctgcctcagcctcccaagtagctgggattacaggcgctcaccaccacacccagctaattttgtatttttagtagagatggggtttcaccatgttggtcaggctggtcttgaactcctgacctcaggtgatctgcccaccttggcctcccaatgtgcgatgagccaccatgcctggccaagtttccggttttctatcactacaaataacttggcaattacactgtctgtacattgttctgcaagtgtatggccttttcacaggaataattactacaagttatagaactgaagaacacaatgcctttcccagaatcttgacaagcctagagatgtttttgtagcagctcacatgtgtccgctctgagggaccaactctcactctcactaggcatttcatattttttaatgtttattatcatgaatgagctaaaaattggcatcctagtattaaaatttgctgtaacccatataaatctgggcagttttgtgacaaatcttagaatgatatcatattcagaatagaaacaataaaaagtaattggaaagtaattttaattataactaaagtcacctaaagaatgtcaaaagtaaactttcatttataatgagcaccaagatttcttaaaatcccatttctcagctgcctccaggtttttccctttccgattttttttttttttgggatggagtctcgctctgttgcctaggagggagtgcagtggtgcaatctgggctcactgcaagctccgcctcccgggttcacaccattctcctgcctcagcctccagagtagctgggactacaggcgtccgccaccacacctggctaattttttgtatttttagtaaaaacagggtttcaccgtgttagccaggatggtcttgatctcctgacctcgtgatccgcccaccttggcctcccaaagtgctgggattacaggcttgcgtcaccgtgcctggccttccctttccaatttttagggaaccttcaggaaaaaaaaaatccctctgggggagaccctgcacccagcatctgcagggtggaggcgctctggccaggcagagactctatcctgaggccccctagcctggcttgctcctccatgcttgaggtggcatctggctccagcccaaagtagggggtgtggaggggcttcagaaagacagagtggctgggaggagtaaggggtgtggatgggtagacactaatattcccccccatatcctcatcctcattggcttattaaagtgagcaaatatgctttttgtatatgtatcagctactattaacatttaaaattctttgttatggaaattttaaagcataaataacagtagaaagaatagtgcaacaaacccatcactttaaaagactaccagggtcataccagaaggttgccagagccaggccaaggagagtgccccaggcccctgatgggctacttggagcatctaaaaagtaacatctacaattgaatgaataatgctaatattttaaaaataattatgctgaaagagaaagagaagcttctgctgttcccaccaagcaggcagacacaagtaacatattggtcacctttggaagtaactagtgccccagcttcttactctgaatgttggtaattaagggaaagaattaagcatttattcttattttcctgaccaaactatagtttaggaaacctcatagttctagttgataagaaaatttttttctcctctctccttttttttttttagcaaaagaacttttgtgcatctcaaatcaaacaattgcacaagggtatgttttggagacaataagggaaattttattataaactaggtttaaattatactaagaacttattgttaatttttaaggtgagatagtagtgttgtgttgatgtaggaaaattcccttagtttttagagatgtatatttagtatttagggattaaatgtcatgatttctgagaatgacttaagaatatttcagtgaagaaaaaaatagggaaagcaaacatctgttgtgtatactgcaaatgattttcttattatattcattgatttaaaaaatttatatatacacataggtgccaaaacccagaagcataacatttatatttttgacgtttggaagcttaaattttttatgtaatcaaatatcagatatctttgctatttttccattaattttatgcataggaagttttttctcatgagtatataaatatttacttattattttagttggtttttttttaaccttttatttttgtctataaaatagatgtagtgtttattctggtgttgtctaaagcccagacctaagaataccattctgtcactatgcaaacaaataatgggagatctacagttaagactaagtttctagtaatttaccagtacattagatgtgatggacattttaatgagacatcttctcttcttgatacttagatatggaggtctcagcctgtgaggctgggagtgacgtttgaagctgcagtcttctgtgatatttcccaaggtctttcttacacctggaacttgatggactctgaagggctccctgtctccctccctgctgctgtggacactcacagacagaccctcatcctcccgagccacaccttggagtatgggaactacactgcccttgccaaggtcagctggctgacttactgctctactggcccaatgaaacccatgcttctcatcgccctggagcaagagctcagcatttggaattcaacacctgttcgatccaggaaaagggaggttgtttaaaaaaaaaaaaatctgcattggattttaagagaaatgtttaattcccccaaagagaacaaattatgttcaaatgcagtcaaagcaattgatgaaaagctccttccaatgtgtataacaaaaccttcctgtgtacctaatttgaataagccctgtgctggtgccgggatgtcaggagaatgtgtggccctgccatttaggggccaatcacccagaaaggaaaggagacgacagtcagagggcagggcatccaagaggcactcacggtgactgcctggcactttgattctcagcatgtgcttggtgcattttggctggaaaaagtggtgaaaatatgcgagttaaaagagggagaggtcatttttaaaagagtaggcttcaagaaacagggtgctgaaaagagaatctgtccacagacatagaaagggattgggaggggcaacagcttggcaaaggctagaagaagaccagggataatgagcagaacctggtgggagattctgggaacaaattgcacagtgggcaggccaggctgcgggaacctgatcagggaccctcagaatatctgcagcgaaggagctttgttcttttaagctgtggggcacgcagtcctattgagcacagttccatctggtgccttgtgtggcttgccacaaagctcctcggcacccaaactgccctgaccttgcctgaggaagcaaatcctcccaatctgtgctgggatgtcacagcgatggcaaatgctggagttgccagaagcttcctctcagtgtctgtacttatctcatcgcgaaataggcaggtaacgatgggccaagtgacaacaggctgcagaccaggcttagcatagcattacttcagatgcaggttgtaggaaaaagcagagctttcccagcaggctgtatactcttctttagaaatgttgattgggaacgagtaggaaacagactgaaggatgggatgttgggagagtgttagtgaaggtgagaagtcattagaggctgaagcagggggcagctggggaatagagagcagagcagggtcaatgtcaggggacctcggggtggtggggagcatctgacctgatgggtggctaattgtaagaagccaaggggaaatgcaaaggaaaatctgtaatactgaacgagtggaggagggtgaggctgctcttcattttcctaatgaaaacagcactatttgtacctggctgtgtgctggggggagggatttggagataaataaggtctttgcacacttgtgtgaacaacctagtaggggaggtagatagagcctgtaaactaaaaataaaatcctaagtcccccccaaacaactaaacaaatcccctcttggccaaggggacccagaaaatacttaaaaaatggagttcctggccataatgggactcaaggtcagatatgcctcattacgccccctccctttcacagtttagacacaacaactgaccaacattaatgttaaaatagtgattataagactgacagaacggactcctttttttttttttttttttttttttgagacagggtctcactctgttgcccaggctggagtgcagtggctgcaatctcggctcactgcaacctctccctcctgggctcaagtgatccttctgcctcagcctcctgagtagctgggactacatgtgcataccaccatgcctggctaattttttgtagagacagggtttcaccctgttgcacaggctgctctcgaactcctgggctcaagcaatttgcctgcctcagcctcccaaagtgctgggattataggcgtgagccatcacgcctggccaggacatactctttatgacaataagataccaaattataaacaagacctaaggccaggcaagagtgaaatcacacagtcctacaattaaaaaataagctgttctcattgccacaggatttttctccccttttctctatcaactaaacaaacactagccttaaaataaacagtattaaaacaattacaactctacaaccaccaaacatcaactaattaaccccccattcctcaagccttaactatgactttaattaaacaaaaaactaatttctataaatttttcctaataaaaaacaccaaccgtaaactaattctgcccagtttgactacgcatttaagtgccttcatgtccctactttaccttttaacataaaagacctaattataatacattgcaatattgtctccacccaaaagtaaacataaagcacatatatatgtttacttattacacaaaaacacaatcctcttccatagatatccataactcctatatcctgtgaatatgtgataatgcattcaactgaaattcctcttacccctccctccctcctccaaatacttactttcaatttcttagccagagactacacttcctgcttacagattataatccctttcttaaaaaataaaactctgctttctaaatatataaactacgtaatttttaaattaaacccagcaagccatagaagatgtgtccagcctatgggacaggccaggtaatgggagctccgaaggaggtttggctatgagctgggagccacttctgtagtcttcagtgtcttcacagggggtctgtgtctttctctaggtcttggagaccttctgacagataaggtaacttctgctgtctctgacctcacagtcagagcctcaggtttcctttgctcctgaacagccctgcatcttccccaagcagcttcctgcttggtgcctcctccagcctttgtatatacttggaatattctcagcagctccttggagctggagaggctgagcaaacagaggttgaaggtggaaatgagagttctaatcctacagctgttccgttgtctttggtcctactcaggagactgatcagcagggaactgtgtgcatctgaagaaaatctagagtgatcaaggctgagacccagtgaaagaatagcaagtattagactgtattttttcaaattgcgtcagtttttttttttttttgacagggtctcactctgttgcccaggctggagtgtagtggtgtgatctcagctcactgcaacctccccctctgggctactgggttcaagcgattcttgtgcctctgcctcccatgtagctgggattacaggcacatgccaccacgctcagctaatttttgtatttttagtagagatgaggtttcaccgtgttgcccaggctggtctcaaactcctgagtgcaagcagtccacccacctcagcctcccaaagtgctgggattacaggcatgaaccaccgcgcctggccgcatcaaacttgtaaaagaacaatatgaatgttttatttataacatgttctgctattcctgggtttaaaagtatttgtcttaaatttcatttacatttcctaaagtccatgatatgtttgggggttagaaagaagcagctctaagataggtgaaggaagttgcacaaaagccaggagcctgaacaattcactgtggagggaggaggtttgaaaactataaaatgtgcacacatggaaagtctctattgtgttcacaagctaggaaatgcccaaatttgtacattaacacaagcttggataggaagatgtccatggtctcgtggactccagtcacagctctcatgtcgtacagtagagtggttattttgactaccaagactgttttagttggagccagggatgcgttgagactcgtcggcttcctttctaattttcagactagtgtgtttctccagtgagtccctgccttgtccctgcatgacatcccctgtccttccttgcccctgcaggttcagattgaaggcagtgtggtgtacagcaactactgtgtgggcctggaggtgcgagcccaggcccctgtcagtgtgatctccgagggcacacacctattcttctccaggaccacctcatcccccattgtcctcagagggacccagtccttcgaccctgacgaccctggggcgactctcaggtgagcaccacccccacacagagctgcgcagctactcagaccgcgcattctgcaaatgcaggctctggaacgttggaggctattaatagttttaaattttaagcacatcaactttcgttaagtttaactgctttatttaggaacaaaatataagggaattgaggaaaagagtggaagtaaaatgtgagtcgctttttaaggtggtgtttaaagagtgatctgttttggaacatgaggcttgagtgtcaccattgttaaattcttggttagtgagatgccgtggtgtgtggaaggcttggtttccacgggttgctcatctccaggtagatgggtctcttgttgctggaggctgcccccagttcagcccttggtcctcttctccatccacaccgcttcccgcctgtgggctcagccagggtcctgatgtggatccatccatgatccatgtgcaacagcctcagacaggaattctctgtttagaccattctccggactctgggctgtgagtcccggcgtccctacagcgccccctctggacaccctcgagacatctcagccacacacctgccttctgtacccgtggaaggacctttccagttgctcaggccaaaatcttctttctctttttttttttttttttttttttttgagatagggtctcactctgtcacccagactggagtgcagtggctcgatctcagctcactgcaaactccgcctcccggattcaagcaattcttctgcctcagcctcctgagtagctgagactacagatgcgcgccaccatgcctggctattttttgtatttttagtagagatgggtttcaccatgttggccaggctagttttaaactcctgacctgaagtgatctgcctgccttggcgtcccaaagtgctgggatttcaggcgtgagccatcaggcccagccacaggccaaaatctttaccagcatcttttactttttctttttcttcctttctttttttttggccctcccttaaacatcagttccacaccacctcccctacccccggtacattgtggtttgagctgccagggtcttgggctcatctccgtaagatctcctggccagtctccacacctccatcctcccctgcagccctgtctccaaggcagggataggttcttttactagtattattggtttttattctttttgatttaggggatatgagtgcagttttgttacatggatatattagtggtgttaaagtctggactgttaatgtaaccattccctgaatgctgtacattgtacccattaggtaatttctcatccctcacccacctcccaacctccctccttttggagacagattcttttaaaacagtcagaagactttacttcacagtttgaccctccagcaccccctttttactcaagagtaaaagccaacgtcctcacagtgccagtgaggatgatgtgacctctcccaacccattgcagcttcagctgtcccttcctgcctccacagctcactgtgcagcccgtttgccttcctgcccctccttggacttacccagcttgcatctctctcagctctttacagcaagggttccttctgcagctcatcactcagttcaccaaacatctgccatcaccgccttcactcattgctcaaatatcaccttcccagtggggcccccactgagactccaaaatgacagatcctaccctgatttgatggcatctttcttcacagtagtcacccttgacatcgagcctttgctcacttactatggtcactgctctggagggcagggctcttatttgatatatcccccatgcctggaatgtagtagctagtcagggaatatttatttataaagcaatagatgagttgcgttgttttcccaacccctgtgatcacacatatttgctgtattccaggtgtggaatttgctgtttcttgagttgagaggaggcaaaaggctgcttggactccccaatttgattcatgcacatgctctgggaaagcccttagccatctgcagacttccctgcacccaacctaaggagacagaggctgtgtcttactcatcttcacatccgcatgccctagcacctgcacagtgcccaaaaacaagagctccatgtgtggctgctgaaatgagctgaatttgttccctgggagtatagaatattccagctaaaccccaggggcagttgctctgcacagcctgtgagctggaggcagtgctcctgctgagcagggtagttcctgagccatcacagtacctctttatgcaggctctggaaacagaaaggtctagaatgaggtgcctgcacaccagacagagaaatgctctttaaaagatcaatatcagttcacatttaggtgacacctttgaaaagggcttatggctgcgggatggggccaggccttcctagccacaaacatttccatagcagcatttcctccctgctggaactatatgtttgagtgtgcatccctgctagagcaagactggctcaaggttggggaagacatcttcctgcttgacctggacggagcagccatgtttatcttgttgggtgtggcaattgttatattgcagaaagactgtgagactgggaggagagatgcctgaagtccatctcacagacccctcactagctgtgctacagggaaacactctgaggcctcccaaatacattttcttcctaaaactgggctcacatagcattcttgtctgtcacatggagctgtcatgatgatggggtgcagtgtttgggacatacttgagggcagcacagctgtgtgacttgggaagtggcagtcatgtgagcagaggaggtcgctgtgcgcagagaagggttaggaagcctggtggggctggaaacaaggctgtctggagtcaggcctcagtgagtcgggaggggtggcctgagcccaccccaggtggtggtgctgctgcacttttgcaacctcccacttcagttacaggagaaaatgtgggaagcaatatctcttcccagcacgtgtcccctgtggtccccctcacctggggaaaacccgtgcagtgacacagggtagtccctgactctgcctgatgctcccctcagccactccgatgacttctccaacaggtatcactgggaatgcgccaccgctggctccccagcacatccctgcttcgactcctccactgcacaccaactggatgccgcggctcccactgtttcctttgaggcacaatggctcagtgacagctatgatcagttccttgtgatgctgagggtctccagtggtggccggaactcttctgagacccgggtgttcctgtccccctaccctgactcggcgttcaggtacctgaccctgtattcagcacagctcagctcaccggtgtttgttcccacctggtgctagcatccgtgaaaggaatctgctgtgcacagcaagcagtttggagtttggccatgcaggattctcactgcaaaggaggaggagaagactgttcagaaagcggctggggaagcagtccccgctctcgggctgatgtctgggcagcatctgacagccaagcacactagctaaagctggcacagccgggggttccaagtggaacctcatcgggaaccctcccatcacagcacctgcctgaaagatcggggactctcctggggcttgggactgaagccaggaggcaaagccatcaagttcccagccaggggtttcagggccattgcccaggccttccaagcatcacaggatggaggggacagcagtgtgggcccagttgtgaggtctgagactatgaaagatgcagaggcaaagaagtgatgtgccccaaacccagaacccctgtagcgctgaggccagaacagcgccagtgggtgtagtgcagcccccggacaccaaacacaggataccaggaccgagccaagtgcaggaagggtgtgagttgcagctgtttcccagcctcctcctctaagggggttgggtcattatgtaagtgagcatcgggatggagcaggagcccaggcccacctgctttggacactctcccatcggggctgcaagctggcacccacccaggaagcagtgctgggactgaccctctgcccatagccctatatgtcacctggaaggccctgggcagatcgaactgcttccatcatggatggtaggggcaagggggctgggcagttactatggtcctgtttgtgggctgggtggtttgggaaggcttcctggaggaggaagcaaatctgctgtcctcagagatcagaaagactgctttgaaggtcattccctggactggaattcagggtttcaagattagagccatgaaaataaggctgagtggataagagtgggccatgccatggtgagccccaaggtcatacagcactgcccagggagccccacaggccccgactactgactgttatttgaggctctggatatgtactaaaagtgaagaaatgccaggtacaaggctacaacaattggggcacaatttaaatcattaatcattaaatttaacaaactaaatacttctattccaaaaatataatgtactatatacctctgctactcatgagataattacagaatttattttaaaatagtctttcaatatgtgccaaagctatcaggtgaacatcttttgatcctgtcaggaaggtccaggcctatgtggatgatgtccccaggaggtctggggctggagggacctctctttgcccatgtccgtctgcacccccatcaccccactgtgcacccacacagatgcaccctttcacacacacacacagcctgggcccagtgccaggcgaggacgctgtgtggcctctcccaccatggctcctcagccctgtgctgggagtcgagtgcttaggccttggtctgagacgtgggccgtcaggtgcagagtataggatgtttgcatgggagacaccaggtaccacacacaccccagagtatctaccgacctggccttttaaaccctccctaagtcccacaggaaataaatctgttaaatcccaaaccacccccgagatattatgaaaaaccataaaagtgcactctggaaagtgctgggtcagcaaagagactagagggcttgacagaaggcagccatggaatgcaggcccaagggaggtgggcgccgggctgtgggcatgggatgtgtgaactgcccatgacccacaaccctgcacagggaagaggcggggccgaggcagtggagacatctttctttgtgagcatctgaggctgtgtgggaatcacaaaggtggacggccacggggaaagtttgggaggggatgggtttgcagctggtagaagcaagccctgaggcaaggcagcgaagagggatcacgtggtggcaactgctctagtgtggagagctgggccagagcccaggcttggaaacagagggaccttgaccaggcccagctctgccctcaccgctgtgtgactcggaaaagctacacagcctctctgaactctgtagggtggcagtgtccttgcctcactggatctcacagtgttagagcagatcacgtgagtgtcgagcttggcacagtgttggccactccatatgtgccatcatatgtgctgtgacattgctattgaagtcccttaataaagatccaaagtagggtgatttaaacatgcctaacatgaattaatgtgaccaaagaaccctcacattattttcctaagatctcaagccaatttatatatttcagattcgtccacatctcctgggtcagctttaaagacaccttcgtcaactggaatgacgaactctctcttcaagctatgtgtgaggactgcagtgaaataccgaatctgtcttattcctgggatctctttttagtcaatgcaacagaaaagaataggatagaaggtaaaaaggattaatagctttattttgttttctgagggaaaaactcagggttattgtgagattgctaaaatgttgcaaaatacatttggtatgacccagtgtgtctgatctgcctggtgaacggtccgtcgtgcttccccagcccctcttgcctctacagtccgtgtgaacacttgtgaggcaccagcagaagaggtgacacactcaagggctgcttctgacctcagtgtgatatggaaggctgcgcccaacacctgtgtaggcagttttattgagctaaagccacagttcagaaggacctgcgatgtgacacactgcccagagggctgtgtccgtcaccacctcgcctgtcttttgggccagctgcacagtgaggaatgagcagaggaaccagggcggaaggttccaatccttgctcccacactaccagctggtggctttaagcaattctaagatttaattttctttggtgaaagatgaggatcctactatttcacagagtggtatcagggctaagtaaaatgtgttgcagcgtgctgggcactggtgtcaggacactgggtgctgcaggacacgaaggtttgaaccaggagcgagactgatttctcacgtggcactatttgtgatcagagaggtggctctgaatggcaaacagaggagctttatttctgagctggagagccagctcctacaacagagctggtgccaagcccccgctgaccttcacatttcttgaagatcccctccatgaggccattcaaagcttccacaagtagagctttgggtacagctggcctcagcggccacagatacatgaagacatagagggtgattgtgcccttcttggcaagagaggcattccaaattcttttaggtaaatttaacttttctgaatcagagcccatgctgaatagattagaggaacttgcagtggaaacacatacagtggttagactttcagcaaagtaaatcatggcccctagatatgtctcaaagaattgggctctcccatggttgcaagtaaaagcttgctttattgagaggccatttatatgctcatggtatttttttctttgctattcatcctttatcataaattctaacagcagttttgaaaactgttatactagatacttgctgtattattcccttcttgcactgctataaaggaatacctgaggctgggtaatttataaagaaaagtggtttattttggcttatggttctgcagactgtacaggaagcatggtgctagcatctgctctgatgaggcctcaggaaacttttactcatggtggagggcaaaagggagctgacatattacatggtgagagaaggagtgaggcggcagggcagttgccacgctcctttaaataaccagacttcccacgaactcagagcaagaactcactcattacagcgaggagggcactaagtcattggtgagggatccacccccatgatctaaacacctcccaccaggctccccctccaacactggggattatatttcaacatgagacttagaggggcaaaacatccaaaccatatcacttactggcgggtaggggagtgaggattaagagaaaccccatacatcccaagttttttctagaatacccatgaataagtcatgcctgggagtgcataggattcagcagatccctcccccccgacttggaagagcaaacgtcaggtgcaatcgctgtgaatcctgccttctacttccatacatgtgcttcttgctgttggccaacatgccaacacagaacacgccaacaccacactctctgccctgtatctcttaagtgtaggttttcaaattcacaacagatttgtttataatatagcatccttacatagtctgtagactttttaagcaaatattttatatttttgctgcaaaattctaacactgccaaacgtttgcttaagttcccttctgcagagtagtggggctgcttggctcgctgggactcggtgccatttcagagtcatcacagttaaacctgctgcccactgagcctggcactgcagatcctgatgcaacgaccacaccattctcacgggaaccttcacccgtgacccttggccaacctgccacttcagctccaaggggaacccccacagagcccatgactggagtctactggattcctcctgcgggggactctgcagtcctgggggaggctccagaggaaggttcactagacctagagccagggccacagagcaagggatccctgatgactggccgctctgagagaagtcagcccacccacagccctgaccctcacctctctggtaagtgccactgttcctgcatgtcatccctcttgtctaggcaccaaagttacctttggaagcagtgaatctggtgggtaaggtgtgagatcacatcaacatgggcctttaaatcagaaagcgccaggttcacacccaccacttgctggttgtgcaatagtcatcgagtttcggattcctcatctctgaactgggaaaatgacaaacccatggcaggttctgaggctgcagtgaggtcccgtgtgtgcagtgtctgtgctacagtagttgtttactccacaccggcttcctaatccttctcccctgccctgggatcaattgcttcactttatcattgggtttcagggggatggaaaccattctggtacttaaaaaatggagagaaaaggtaataatgagaaaagctctgacctggcatctgtctctctgtcactgtcctcagctgcttactgattttgctgcttactcttgggctatggtggtctcatgctctgcatgctcttgtcaattcagctgtgctccaggcctcccagacttggctggctggctggagggaccgctgtgagctcctctgcctctgggaaaggagggctgaggggacaggaggcgacatttgcagcagggcattcttgtgtccatttctctccttctaaaagaaaagagtgagacattttctctaaaagaacagtaaaagactcgcttgaagagaggataggatgctgggtgtggtggcagagacccatatgtgagccttggtctcaacttacttgctgggttattcttagaaaccacacacctattggagctccctctcctcctcctggggccccggggcaatgaaacctgccttgcccagctgtcatgagtgagggaagacaccaccactgagggtattttgtaatccacagagcaatgtatggagtctagaaatacaccaaggacaatgtgacccatcaggggagctgctgttaatttcaggggattctgtgattttaaaggaaacattatgattttgtcctttcttatagattttgaagcctattacagtgacattcaagaagcaataccatcgggaggaagacagccaggtgactgtgcttctatgcctgctgcctctctccactcagctctcctccacagcctttctgcaatctggatttcccacctgttcccttacacagccactgagagctccacagaatcacagggaaaagttgaactcttacatggcacggtctgaaccaaacctttatttctagctcccctctttctgcccttctctcaccctatgctccaaaatcccaacagtagccccaggcccaaggatgagcatcccagctcttccatgccttggtcatggagtgtcgtctgccaaaaatgccttcctccacgtccttcctaagttatctgctcagcgagcctcctccttcaggtctggctccatttctctctgggaagtcttcctcaggcttgtcttgtaaggaccaccactccccccgccttccccccaacccccaaaacacacacacacacaccagctcagtatttattccctcctctgggaagcaggtggcacctggcacttagtggctctttctgtgtctgtgtcttctgctctgagctcttccaggaaagcttccatggccagcttatgctatgttcccagatggatcacggtccctggcacattggcactcagtaaacacattgtagaatgaattgatgatcagcgaatgacttattcatctatcgaatgaacagatgtttgatcagcgagtgactgatttatctgtctagtgaagagatggatgtctagtgaatgatttatctgtcaaatgagtaggtaaatgacttatttgatgaatgaatcgataaatggctgatgagtgaatgatttatctatcgagggaataatggatgatgaatgaatgatttattcctctgatttgaggcagtgtttccttcaacagtcctcctcagctgcttccaactgcacggcttctccagcccttcccatgttccttcctgtgtgtcgtgctcttcttggatgagatggtcagtcaggtgcagccacagaggagagaaaaacaaagaaaatactcccaggtcctagagacaagaggcatggcaggccacacaaggccacatggggaagctgcagggaggtcaggagacagcagacaggagcaaggggagcccttaagccaaggttttttttgggttttccacggcaaagaaaggcaaggctaaggcagggctggatgaatagtttagaatcagttagtttaatttcagcagatcctaggcctaagggtggtctctagttgcccaggatgatttgttgggggtggttctggattggtcagtttgcaaatcaaagacacattgcaggctgggccttttgtaatctctaagagttggctagccccagccccaagagaagcactgtctccttagccagaacgcttttgtttcattttgttcttcagtatatcaaaacatcatcatacagaacatttaaaagtctttacagtacacacgcagatctgttgtagaggctcacattcgtactcacagtaggtgcttaatcaatacaactgaatgaagaaagatctgcctttgtattgcatttataaaattattcctccttacaacatttgtgttttattactatatcttgcttcagtgaccttggtttcaagtcttaaaggagcctccttagcctaagtgaagtgcagcgactccttcttgcctagaccatgcaggagcccttcctttgccctcgctgcttctcttcttgctgcctgcagtcatctcatcacatgacaggcagaggactcttcaccacaaaccaggctgttgttactctcctgacaggtccctccagtggcttcctagggcactcaggacaaaagcccgtggctgtgcacccagcatgatgtgaccctggcaatgcctccagccacatttttcctcctcctgccctccctccctccctcccaccctccaaccactagggcagatcattcccacagcattttggttttactcaacctggaaactccttccttcagatgcttgaagggctccttctagtcttagtcttcagagaggacctccctgacctccatctcagaaggacttcctttccacaccactctctcttcctctgcataccccgcttttctttccttcattacctgagtttatattatttatttatgtgttttctcatttattttttggactgcctcactattaactccagatagcaaggacaccattgatctggttcacgctgtgtctcctatttctagagtagtacctggacttagtagaccttaataaatcttgcagaaggaaggaaggaagataggaagggagggagggagggagggagggaagatgcctttggaccgctaattacatgttaacaaagtacatgtcttgaatatgtttggctgctgaagacattatattagataggcggtatccagcaatagtacaaatagttattaatatcagcattgaatcactaatgctttaagatcatcatgactttttttctttaacatctattggcttggtttatcttcctagctaaggacaccagctttccaggatcaggacctagcttgagtgccgaggagagccctggagatggggataacctggtggacccctccctgtctgcaggcagagccgagcctgtcctcatgattgactggcccaaggccctgctgggtcgagcagttttccaaggctattcatcctcaggtatgaatgtcctctttgtaccctccaatttgcagtgtttctgaagcttttagatatcagccctcaatttcttctgaacttttcgttttactagataagtatttagaattgtggtaccttttctacttgtgcttgttcttctatggactatggcctgagactcttctaacaaaagtaaagttagcgtctgttgctaccaggagatccatgtgtgtagaccaaagcggaagaggggtgctgccaagtgctgcacgttctgtgctcccagacaccttggtgcgcaccttttctgtgacagccttttgtagggtggtcagggatttacatgaattggtcaaaatgaagctgctcctgaagagcgattgaatttctaatggaatttcccagcccagacatggtgcttttgctcaatttgttgtatttccccctttcgtgttaatacatgtgattgtgccatccttacagacctcttggggaggatctggatttcacactatttttagataattttcccttcaccctttccttgaagcattttgagaagtactattgtaagattgtaattttagaaactgtccatgtttagatcatcaatcttgtatttccgatctctccttttttcagggtaagtagtgagaggtcagcctctctctgctaaggaagtaatccagtcaccacggtcagcagttacacccaggttaaaaattgtccataaccagtattctgcagacttaaaaatagcttcaaaattccttaatcatactttatagtatgatttataaaattgccaaattaaacatgaacataattataaacatataaaataagatcctaacagaattctcttgttgcttgggacattagtgtcatttctgagccagggatggatggaccatcctcagtaatgcttctgttgggcaggacaggctgtttatagaaggcagtaaccagcaacctttccaagcaggagtggcatgtttcactagtatctatgttaatttcacccctgggggaagagtggaactcatttccaaggactctgtgtgacctctgtccttgagaccactgactgtcatttccatgcagccatgtcttttctgcaggtattacagaacagacagtgacaatcaagccatactctctgagcagtggagagacgtacgtcctgcaagtgtctgtgggtatgttacattgtcagttgcatttatcagaggatgaggagtcctgctgcgtctctgtgagtttactcttcctaaggaatggggtgcaggtctacatcagcgtaaaggctaagcagttgcctttttaaaaaattacatatatatagggctgggcacagtggctcacgcttgtaatcccagcactttgggaggccgaggcaggcagatcacgaggtcaggagatcgagaccatcctggctaacacggtgaaaccccatctctactaaaaaatacaaaaaatttgccgggcatggtggcgggtgcctgtaatcccagctattcgagaggccgaggcaggagaatggcgtgaacccaggaggtggagcttgcagtgagccaagatcgcgccactgaactccagcctgggcgacagagcaagactgtctcaaaaaaaaaaaaaaaaatatatatatatatatatatgtatatatatatatatatcttatttatgctagacaactgcacaagttgattcctttcctgcaaatctgtccgtaatctctctctctctctctctctctatttaaaccctagaaaggtgttattgcttgttttgtgccactgatgttcattgaaattcacccacaggcctcgccttacccttgctctgcattccttcttgcgtttccatgcctatctcaatctgagatcatcgttttgcagaacttctagacattttcccccatttctagaggttttcattccatatgacaagcacagtgggcttaatttttttttttattttttatttttttgttgagacggagtccctctgttgcccaggctagagtgcagtggcccgatcttggctcaccgcaagctctgcctcccaggttcacgccattctcctgcctcagcctcccgaatagctgggactacagctgcctgccaccacgcccagctaattttttgtatttttagtagagatggggtttcaccatgttagccaggatggtctcgatctcctgaccttgtgatctgcccgtctcagcctcccaaagtgctgggattacaggcgtgagccaccgtgcctggcctttttttttttttttttttgagacaaagtcttgctctgttgcccaggctggagtgcagaggcacggtctcagctcactgcaacctccacctcccaggttcaagtgattctcctgcctcagcctcccgagtaactgggattacagctgcctgccaccacgcccggctaattttttgtatttttagtagagtgggggtttcaccatgttggccaggctggtctcgaactcatgacctcaagtgagcgatccacctgccttggcctccacaagtgctgagattgcagtcataagccaccgcacccagccaacaatttttatctacagataggtttggttcaacatccacagttttgcattaattaaaacctatcaggaatttgcaaacttgcattctctgtgaactctattgtcatacaagtgggaaacccgaggttcactttctcctgagaactggctgggctgggctcaatgagatccctgagggtcatcttgattctcacagtttctataaacatctgcctgccccttccacgtttagcatttaacaactagccctgggtccctgctttggatacaagacgggcagcgtttgcttttgtttcaacaaataccttttgcctttggctgtacctctttcttttgcctctgaaatttgcccaagtgacaagtctaaagacagttctcttagctgggccatattccttaatggtgcaggagacacatgagagtctctccatggcccaccagcctggtcagtgtccttggctggctgccaggtggtgcactcaggctccaggtctcctgtcagccttctctcccgcagccttgcacaccctcgctgactgctgccctcccttcccgtgctcttcagataacaccaggccccctcgtgactctaagtctttccctgtggttattttggctggaatgcccattcttttccccacatcccttcctaagcccagtataagactgataccccaagactcctcactcaaatgtgtcttcttttgtggagattcccctggtcagccaggcaggattcatcatccttttctcctgggttttacttttgttatgagatctgtcttccatggttaatgtgactgttaaataagataatacaggaacagtgtctagcagggcacctggtgtgtagcagaggctcaatagatggtacctgctgttacgatgaggatgatgatcatcaagattttaaaccatttgacatgtaaatttcatttctataatccatctcaagacaaatacattaaacatttaaaaactatatgtatgagaataatcattatggggtgatcaataataacagaaaatggaaaataagcaaaatgtttaatcattggggataataattgtgcgtattagggtatatctgttccatgtaatcttatgctgctatttacaacaatgattttggatgctctatgtcaacatggaaaatagttatgatattaatatagttaataaaacaaaatataaaattgtattggtgctatacattcaacgaagctgtacgtacgtgtgtatgtggctaaggttttgagagaatccaggagaatggagaaagtttgctctgctgggtaatgggtctgttagcatcatctctccctcaggcttcggtttctgtctgggtggttgccatgtgactcccaggtagggagacacttctgtctccccagggcctaggatagtacctgccccacccagtgagtgtttgttatattaatgaacatataggcagtggttctcaaaccccagaacttcagaatcccctaagggtatgtgaaaactatcactgagtctcagtttctgagtcagcaggtctagggtggggctccagaatcttcatttctgacaaattcccaggttagtccgatgctgctggtctggggaccctactttgagaacccctgctataaggtttatctataaaaacttattcctatgctgctgtaattctccatcatgggtgaaaccgctgcttcatctttctctttagcttcgaagcatggcttactgggtaaagctcagctgtacttgacagtcaacccggctcctcgggacatggcctgtcaggtgcagccccaccatggtctggaagcacacaccgtcttcagtgtcttctgcatgtctggaaaaccggtacgtggacaaccccatgtctgtcctgagagacccccgacagtggcatctggcagtcacagcagtcacgggtgctgtaggaatggacagcaatgtccttcccacctgtgaaggatttcagcctgccgttgaatgttggaaagttggttaggcatgaatgggcttccccacacactaatgagaggagtgcaaagtggccccctggttgagaaggttcagaatttcacaaagagacaagggcctgctcaccaggagtcgtctgccctgcagcctggttagaacaggggcctccgttaatgctgcccccaagaaaaaggcaggcacgtgacccaaagtgaggagaggagcctggccctttccctccccaggcacatttctaacacggacttaccctcaccctttctctgggccatggagaagaccattgtgattttgttgctcagggtcttgtgagggtgaaatgagaggatggatttaaaaagatgaatgcaaaccagcctggccaacatggtgaaaccccatctctactaaaaatacaaaaattagctgggtgtggtggtaggtgcctgtaatcccagctacttgggaggctgaggcaggagaattgcttgaacccaggaggcggaggttgcagtgagccgagatcgcgccattgcacagcagcctgggagacagtgtgagacttatctcaaaaaaaaatttaaaaaaagatgaatgcctcaggtgatgggcaggcaggacaggagcctgtgatattgtgaccctggcactgccctctccatcctctcagccaggacactgacctccctgcccttctgcctgaccccttctgtaggaagccccacccttgtcctccagaggtcccagaccatggccttcccttgaggcaccccgacccctccctcctgctcctcctgctgtgtgatgcccagcagtgtggaagctgaggggcagctggggcccttcaccctgagggggctgtgacagtctgatttgtgactgtggggaggttccaggacaaggagaggacacagacactggtggggaatctcagtgttgttcgaggagccctttgggcttggtgaatggagagccctgcagggcccagggctctgggcagctgggagtgctgcttacctgtcacttaccctcttcctggctgtaaagaatgtccttggtacaatgaaggctcagctgtgtgtgtatgtattgtgatatcattcacagtgtgttcatttatactatttttgctcccttggactggatcataggacttccattatgaatttagttaccagataggaaacacctccaaacacactttgtaccatgggagagacacccagtattattttgtgttgccagctggtgagcacttggacaattacaaaggtaagctatggtgccagttggagtcactagctgtgccaacctacagttctaaaccttttttcctggttttcaaaaactaaactgtgtctagaaaataaaatcaccttgatcagtttaatgcttttcagtttaggtttattatctaccttttagtgcagaaagaacattagtaatatcaataaattaaatcagttttttatatcttaaattttaactgaaatacactgtaaatgataaaatgccagagaatgttttttcatatataaattaaatatttaaaatcaggacatttcttacttactaatgaaatatgtcatatctggtgaatcttgcatttattatagatgaaaccaaatcaaggtatccccctaaggaacaaaatgtggggtaaatgaatgtgagttagcatgttagtaacataacctcaaaacaaaatgaatcccacagtgtttacaactttctgctctgaccctgttcctgaggttgtggttacttctaaaccagtcccttggaactggcttcaactgagcataagagacatgcagccatttaggaaggtatcttgacatgtgcaaacccaggctggttaaataaaaatcttgggggttggtgactttttaagtttctgttttattttttaaatgcctggaagattctgatgtgcagggaaggttgagagtcactgatctagaagtttctttaatttggactggtaagattattagagcctgaagtctgaactagttcattcacttgatttatttaagtttcacctctcctttaagccaagctgaagttccttcttcttcatgaaactttgcctgtcaccttcagttagaaacacttgtaccttcttctagatacaaatcaattatattgagcaaaacttctgagcagggcattttgagatcttcataatcatgctctgctttgtatcacagtgactttgtactccgtttgatcttgagttttcttgaagtcaagctgcgtacggggttatgtgagacttaggctgggcaaatgttccaatagaaggaccttgggccagggcctcagctctgtgttggaagtaaagatttcttaacataaatttacagaccaaatttcaggtcacagtcccagagcagtgtcagggttagtgatgttactcaaatcattcacaaccacaatttgtttgtaattgtcactatcagtacagccaattcctatgaatacctgaactcaagatttgtaagggggcgaacataagcaaaataaatacaatatagtaaatacttaatacataccttttcttgtcccatcttttgcatgagtgagtgtggcgcagactcagcttgtcaaaataagtggagtcttgcctaaaaactgctcctttgggattttctatatccgtgcataggaccaaccttatctgttaagggtatttgttaaaattgctgcctccagagcccacctagtatccactgactcaggattgtggggagaagatggagcacggaatttgcttgtagacgagatgcctggcgcttgggctgcaagtgtccatagaccacatcttgagaagtgtcaacctccaaaattaagtccccaatccttggcactgagtttcaggttgaaaatgttgttataaagatacatagggcacacctgggcgtcgatctttctatgtggttcctatgacggtgcctgtggcccttagcatctggccatcacctgcactctgagcctgatctgcaggtcccctcaccacagccctgcacccctgttacatgaaggaattcctgggtcccccaaataggtcttatgtcttttaaaaagtcccctctgtcagaattcttcaccttttttctaggcctgttaaatttctatatatcatgtaggaactggtcaaactataaccccaagccttgacagtccattgccgagtttgtatttcactccctgggctccctgtggctcggagcctggcccctttgtcagcacttgtcacagttttagtcatccagaagatgctgtctgtgtgtgaagaagcatctctgtaacccacatgtccaagatgaccctcttctgacatgttccctcacagtcatggtttccactgaaatcacagatggcaaaggctccaaggtccagccgtgcactgtggtggtgactgtgctgccccgctaccatggaaatgactgtctgggcgaggacctgtgagtaacacaatgccacacagacatcctagccattatttgtatttcttccagagttggctctcccccaagttgttaacaagcgtcaaaaacatgtcaggaactcatcttcttaagatggagcaaataaaaaagtccgggtgctatcactgcaatcctgctaactcatatttgcatggcattcttgcaggtgcttcagagcctataaagctactttcttctccttcttttttttttttttttttttttgagacagagtctccgcctgtcacccaggctggagagtgcagtggcacaatctcggctcacttgcaacctccacctcccgggttcaagtgattctcctgcctcagcctcctgagtagctgggattacaggtgtgcgccaccaagcctgactaatttttgtatttttagtagagatggggtttcaccatgttggtcaggctggtctcgaactcctgacttcgtgatccacccgcctcggtctcccaaaatgctgggattacaggtgtgagccaccgcgcccagcctcactttcttcttttttaaaaacagtttttaaagatatcatttacattccacatgttcatccatttaaagtatgcaactccttggttttaataatttattgaattatacagccttcaccataagctagttttagacaatttttcatcatcccgtgaaaaccttgacttattagcagtcactccctttacccaccacccagcttcctcccaccggccccggacaaccacaaatctatttaatatctacaggtttgctgattctgaaaatttcatataaatgagataatataacatatgatcttaagtaactgtcttttcactgagcatgtgaatgtttttgagtttcatctatgtagcaaaatatattagtacttcattcttttttgttgctgaataatattttattgtatgaacatatcatattttatttattcattaattagttgatggatgtgtgggttgttttcactttttggctataatgaatcacactgctatgaacatttatgtgcaagtttttgtgtgagtgtgtggtttcattttccttgggtaggtaactaggaatggaaacagtgtcctatggtaactaccaaactattttccgtagtggctgcaccattttgtattcccactaacgaggtatgagagttctggtttcttgatatcctaaccaacactggttattgtctttttgttcacagctgttctagttagtatgaagtggtatcccattaaggtttggacttgcgtttctctaataattgatgaggttgagcatcttttcatatgctttgtatatcttccttgaagaaatgtctgcttagtactttacccatttttatgtaggttatctgtatttttataatggataacctaattaaaacgtttgtttcttgattctcaattctattccattagtctgaatgtctcttctcataccagtactatgctgccttgattattatagtttagtagtaaattttgaaactgaaaaacctgagcccactaactttgttctttttagaaggttgggtctttcaggtctctcatatttccatatgagttttagaatcagcctgtcgatttctgcaaaaacaaagcagcacaggcatgggacaatggctttggtgccggccagcctctccagccttgctctggctggggcagactggggctccagactcctgctgcagggggtagaaaaacaaaacaaaacaaaagctaactgggattttcatagggatttgtcaagtctgtacatcagtttggggagtatcttgtatcctataaccctgctgaacatgtttgttagtattaatagttttttaccgaattccttgagattttctctatataagatcatgtcatctgtcactagagatagctttgcttctttctttctaatctggatgccttccatttctatttcttgcctaattctcttgactagaacctccattcaacgctgaacagaagtggcaagcgtggaaatcctggtcttcttctcagttttaaggaggaagcattcagtctttcaccacttcatattaatattagctagaggtcgttcacagacaaccgttatcagattgaggatgttctcttctattcctagtttgttgtgtgtgtatttcattataaaaacgtattggattttgttaaatgcttttcctaggtctatggagacaattatatgttttttgtcccttagtccattaatttgttacgttttggatgtttgtgtcctctctaaaattcctgttcaaactatccccagtgcaacagtagttaagaggtggtgtctgtaggaggtgattaggccataagggttctgctctcataaatgaaattagtcaccttataaaatggctggagggaactagataggccctctttggtcgttctgtcccttctgtcatgtgaggtcacagccttcttcccctctggaggaggcagcaacaggtgccaccttggaagcagagagcagcctcaccagacactgagcctattagtgtcttgatcttagacttcccagactccaaaactgtgaaaataaatttctgttctttatatattacccagtctcaggtattttattataatagcacaaactaagatacaagttatataaaattgattgattttcagatgttgaatcactcttacagtctgggaataaattccatttggtcatgatgtatacatctttttctgtgtgctggatttgatttctagtacttttctgaggatttttgtgtccatgttcataagaggtattggcctgtagttttctttcttttcctgtgttgtctttgtctggttttggtatcagaataatactggccccaatcaatttggaagtattcctttttttttttttttctttttttttttgagacaaggtttccatctgttgtctaggttggagtacagtggcatgatcatggctcactgcagccttgacctcctaggctcaagccatccttccacctccgcctcccaagtagctgggattataggcacatgccaccatgcctggctaatttcatcatgttgcccaggctggtctcgaactcctgggctcaagcaatcctcccaccttggcctcccaaagtgctgggataacaagtgtgtgccgccacacctagcttcctttgcattcaagtatttggaagattttgtgaaggatgggtagtgattcttctataaacatttaccagcaaagttatttggacctggcattttctttgtggaaattttgaaatgactgattcagtatctttactattcagatttctgtttcttcttgagtcagtttcagtagtttgtttctttctaggaattttccatttcatctacattctctattttttttggcatacagttttgtatggtgttctcctataatcctttttatttctatatggtcagtagagatatcaatttcattcctgattttagtaatttaagtcatctctttttccctctcttattttttgtctgtcagtctagctaaagatttgtcattttgttgatgttttcaaaaaaccagcttttggcttcattgatttttattgttgtggttgtttttctattctctatttcattcatttctacactaatttttattctttttttccccgccttgtacttgctctggtttactttgctcttgtttttttttgttgttgttgtttcttaaggtgaaaaattagattattgattcgtcatcttctttatagccatttatagctttaaattcccttcaagcactgatttagctgcatccaatgtgttttagaatgttggtgttttcatttattaatctcaaagcattttgtaattcttgttgcaatttcttctttgaaccattgattataatatttaggagtatgttttttacttttttacatatttgtaattttccaaatatcttttgtcattgatttctaattatttaattccatcatggtcagaggatatactctgtataatagcagtagtttaaaatttattgagttttgtttgtggcctactatatggtgtattctagaaaatgtcccatgtgcacttgaaaagaatatgtatctgattttgttggctaaatgttcaatggttatctgttaggtctaattgatttatattattgtttgagtcttatgtatccttgttgattttctgcctggtggttctatccattattgacagtattattattttgagttttctgtatcccttcagttctgtccattattgctcatgtatatggaacctgttgttaggtccctatatgtttacaattttttaaccttcctggtgaatttacctacattatcattaggaaatgtccctctttattgcaactatctgtttttgtctaatttcttttttgtctgatataaacataaccactctacatgccttgctgttactgtttgcatgtctctttccatccttttacttacaacctaattttatccttgaacctaaagtagtctccagtagacagcatatagttgaatcttggttttgtgtatagtcttacaatctctgccttttggttgaatcatgtaatctattcacatttaatattattattgatgtggttggatggatttatgtatgccattttgcttattttttgcatgtctcattattactttgctcctctatttcttctttactgcctccttttatgttaagtattttctagtatatcattttcactcctttaatgattattatgtatttttagatattttcttagttgttgcactaaggcttacaatatacaccttaacttactagaaactacttcaaatttatattaatttcagcaagatgtagaaaatttactcctctatagatccatttcctcttccctttttgtgttatgattgttatgtatgttacatctatcagtgttacaaacccaacagtccaatgttgtaattattgttttataaaattttctgtctttttattttttcttgagacagagtcttgctctgttgcccaggctggagtgcagtgccgtgatctcggctcactgcaacctccgcctcctgggttcaagcgattctactgcctcagcctctgaagtagctggtattacaggcatgtgccacgacgcctggctaattttgtatttttagtagagatgggatttctccatgttggtcaggctggtctcgaactcccgacctcaggtgatccgcctgcctcggcctcccaaagtgctgggattacaggcatgagccaccacgcctggccagttttctgtctttcaaagaaactggagaagagagcacaaatatatttttagaaattgcttttaatgtatgctaatcttatttagtatttttgtttgtcttcatatcttcctgtggctttaagttaccatctagtgtcatttctttattcttgtatagttttatttccacctcccttatttgtgttttttttgttgttgttttttgttttgttttgttttgccttgagacaaggtctcaccctgtcgcccaggctgcagtgcaatggcacaatcttggctcactgcaacctcagccccctggatccaagcaattctcctgcctcagcctcccaagtagctgggattacaggcacacaccgccacgcccagctaattttttgtatttttagtagagatggggtttcaccatgttggccaggctggtcttgaattcttgacctcaggtgatccacatgcctcagcctcccaaagtgctgggattacaggcatgagccaccacgcctagactttgtgttcttgttacattatatttctgtgtgttatgggcccaacagtacagctctgtagaaatgtctttatgcaatggctttttaaataagaagagagaaaaagataattcatgaacttaattgttcaacatttctctgagttgccattcattttcttcctacttttttcttcctgttatttataatctctattactctgtcttcaagtttctagattctttcttttctcaaatttacttttgaacatttcttttgttataattattatacatataacttcataatttccatttggttctctctgtaacttataaatttatagcttctatctgtttattgatagtctctatttgactaaacattgttctaacttcctttgatttttaaaaatatggtttcctttcattctttgaatcatgtttataatagctgtttcaaagtccttgctaattccaacatctgagtctcctcataggcagtttctattgcctgcttatttttctcatgtttgggtcacacttaatgtttctttggatgtctcataatttttcattgataactggacattttagataatatattgcagccactctgggtattggcctacctccttttcctggcttgttgtcgttgtttttgtttgtttggtcattggtttatatgtttattagtttggcaagacgaattctgtaaagtatatttcccctcgttgtgcagccagtgatgtttctgctcagatttatttgttctttttatctttaacttggcttcctagggtcttagtctccataaatcacttattggtcaagggtgaacttaagcatcgtgtatagagcccatgatgcattttctaatcaattagaacatgatttctaattaatttacttcttgcaatgacccactgcggtgtgtccagatgaaaatttctattttatacatttggaaactgaggatcatttttctcttaaacaatactcttgtgctcatacagcaaataaattgcagaacaagggctgaaactggcctttgacctcatgtataggcctcttttcacaatactgtgttatcttttccagtgcaagtaagtatgctgtttgtaaataagtaaataaatgcgcaattattgaaacccggagtcataaactccggccagctgtagcgtggtggtatctctgtctggctctggaatacattccttcatttgccatgatgcttctatattagtatctggtttcttgtgccttttttagttctgataaaaggagtttttgtaaaattttatattatgacttacagtgtctttttagagtttccgttgcacagaccaattctcctttgtatcattctctttctaccctgccctgtccaagaggtatttttgcaacaaatcccatcccactcttggtagtcagggtgaaaagttttgccgtgtgttggaacagtaatgataactcttgtgtttccttcaggtataattccagcctgaaaaacctttctaccctccagctgatggggagttacacagaaatcaggaactacatcactgtgatcaccagaatcctgagtcgtttgtctaaggaggacaaaactgcctcctgcaaccaatggtcacgaatacaggatgcattaatttcttcagtatgcagattggcttttgtagatcaggtatggctcagaggagggtgagtttagtgtctgtaaacctttatcaagtggcagggctcatgactggctggctcactagcaagtggtcatgcttatgaaacacaggcaagaaatgagaccaagagggccagccagctcagctcccatacatggctgtggtctctctattcagctcatatgtatcacaaatgaatgctgctggtttataaaagagagaatgaccaagtcaatcgttgttacagataattctgctgaagtttgtgtaagtaaaacttatgtgaaacagtctgattttatcttggagagttaagttcatgattttgtgcaacttctgaagaaattaccatgtattcaaatgtgactgtacttgctcacagcatttatgcaactgctatcttataactgtcaatagagaatattcacatctacaaagaatatatcttatttcattacaactttaagatacttcacttgatgtaatttttttctcattcttcctctttttaaaaatgttgcttagctctggctgggcgcagtggctcaagcctgtaatcccagcactttgggaggccaaggcaggcagatcacgaggtcaggagatcgtgaccatcctggctaacacagtgaaaccccgtctctgctaaaaatacaaaaaaaaaaaaaaaattagccaggtgtggtggcaggcgcgtgtagtcccagctactcgggaggctgaggcagtagaatggcatgaacccgggaggcagagcttgcagtgagctgagatcgcgccactgcactccagcctgggcgacaaagcgagactccgtctcaaaaaaataaaataaaataaaataaaataaaataataaataaattgttgcttagctctgcacccttatttcatcagccctcgtgtcagttccctgatggagtgtgctgaggatgtctagggggcacacaggagagatgctggattccaaggaaaaccagagacaacagtaatggtctctgtacagaaggtctggcctccaattggtcttttggccaaaaagcagggaatctgtactatttctacataggcaagctgtaactttaacccaaacaagctaatttccctctccttgcattttctttttgttttattgttgtttcttctggtcaggaagaaatgattggttctgttcttatgttgagggacctcgtgagcttctctaataaggtaagtgcaattttttcccagaaatattttcctattttatatagttttgagggacatgatcagttcttgaaaaatacactgtccagaatcatagtttgacacttagattagaaatgtgattttcccttaagaattcatctgaatagcaaagcccatctcagaaattttgaatatagaaatttggaatctaggccaggcacagtggctcacacctgtaatctcagcactttgggaggccgaggcgggcggatcccgaagtcaggagttcgagaccagcctgaccaacatggtgaaaccctgtctccactaaaaatataaaaattagccgggcatggtggcgcgcacctgtaatcccagctactcaggaggagtactctactgagacaggagaatcgcttgaagccaggaggcggaggttgcagtgagccgagatcgcgccactgcactccagcctgggcaacagagtgagactccatcaaaaaaacgaaaggaaaggaaaggaagggaagggaagggaggggaggggagggagggaggggaagggaagggaaggagagagggaggaaggaaggaaggaaggaaagaaagaaagaaagaaagaaagaaagaaagaaagaaagaaagaaagaaagaaagaaaagaaagaaaaagaaaaagaaggaagaaaggaagaaatttggaatcccaaagtagaaatggatgagaacacgtactatccatgctatgaataattttggcaaggggcttgttctttattggtaacacatggcattgggtttttccttcgtcacaccttcttttcttcttgagtctctggcacactttcctccccgtcagctgatgttccccctgcattgctgcttgagagatgagaagagcacgcatcattctctcatctacctccagtctgtgaatctaactatggccatgctctgtcaccacagaaggaatctccagcccctgcataggcttctccctttatttgtgtggagctctcctccaggctcctctcattgtccctcatctcaatctgagtgacgggtgccccagtgttggacaacgcctagcctgcatgggtgcaggcggcacagtcctgctcctgcccaccttgccttctccagagtttctcttttcattttccactctttgctgctgcttccacttctttcttctgaatgatcctgcacatgcttagaatctcacttattttaaaaaaaaatccctctagtgaaatcaaacctgcttccagcttccacctaacttttcatgttcctcttcacagcagagcatttaaaaagtgagttctgagcctgttatgggctatacttgctgcctcttgtttgtgtgtgtgtttttttaagagacaaggtctcactgtgtggctcagcctgcctcaaactcctggactcaagccatcctcccacctcggccttctgagtagctgggaccacagatgcacgtcaccacacctggcttctcgtgcattttagaccatcaaactttggcttccatctccatccacactgccgctgctcctgccaaagtcacagcagatctctatctggccaaatccactggacaccttctgctccccattctctccctgccggggaccttctgtggggctcaatctgctttgggggacacgctcttctctaggcttcacgacatgatttcttggttggccttgttgactgacccctgttggctcttcccatctacagttacgtggtcagtatctcagagctttgtcttgggcctcctagattctctgtccacacctcctccctgtgtgatctcatccactccttccactttacatccatctgatagggactctgcaacccacacctccaacccaaagctgactcaagctccccagacacgcacgtataactacacgctctcatttccacacgggccgaaactgcacagacccagcatggcagagtgggctcctcccccaaccccttccaaccccgtgttcctcctactttcttcagcccaggacagggcagcaccgtccatgcagaatcccatgttaaagcccaggtgtcaccggagtcctttcttcccctcatccattcacttataaagaagtcccatctgttcttcctcaaacacgtagctagaatcttcctacctctcctgcctctactgcgcttcacccaaatccaagcaaatgtcatttctcatccaggttggcagtttctctcactgtcctgtcctctctgcctcctctcaggccaccttagaaaacaggctacacacagcagtcaagtcattgtaaaagcctgagtcagtgagtgccactctcctgctcagcactccccgtggcttctccttgcgtgtggaatagaagctaaacatcttatgcacctgcagtgtctggctccttctttccttctgtcctcctttcctggcttttctcccgcttcctaaccatcctccaggggtactgccttgatccttttcccgctgtgccctccccttggcttttcaaatagctggcccttcattgactcagcacaaatgctacttactttcttagagacattgtcctagacccaccatctgaaggtaattattattatcctctcttcctgttatgggctatccccttcaatattttcacaacagcaactatctcatttatttctttaatgctgctcttcccccactggaatgtcgactccatgataccagggatcttcctcttcaccacagaaataccataggtgtaacgcatggcaggcgctcaagagagatgggcaatggatacaggaacgggggctggatggccctgtcctcctaccatccctcctgcctgagtctcccctcctcatctcaggctgctccactccaacaacctccagtctaggtgggagggcatcatcattcacctctcttctgatgatctgtctttataagcaacacacctggtcatgccatctgtttgttcagagtacttgatggctttctagtagtttgaggacacaatccaattgctcttttttttttcagacagagtctcactctgtcgcccaagctggagtgtagtggcacaatcttggctcactgaaacctctgccttccgggttcaagtgattctcctgtctcagcgtccctagtagctgggattacaggtgcacgccaccatacctggccaatttttgtatttttaatagagacagggtttcaccttgttggtcaggctggtctcgaactcctgacctcaggtgatccacctgcctcagcctcccaaagtgctgggattacagatgtgagccaccacgcctggcccaattgttttttttttttttttttttttttttgagacagagtcttgctctgtcgcccaggctggagtgtagtggggcaagcttggctcactgcaagctctgtctcccaggttcacgccattctcctgcctcagcctccccagcagctgagactacaggcgcacaccaccatgcccggctaatttttgtgtttttagtagagacgggatttcactgtgttagccaggatggtctcgatctcctgaccttgtgatccgcccgccttggcctcccaaagtgctgggattacaggcgtgagccaccgtacccagtcccaattgttctttgtatcatacgaggacttcacccatttccacttgactctctgcacctcattgtgcacacaacccaacgtaggcatcttccctgtgtaggcattcgggatgccccttatgtccttgaaatggtatgttttcccataactggagcaggttacttcttcccctggaaaaatattactttctcctcaagggtagattcaaatgccaccttctccgtgaaatcttcacaaaggtctgaaggcagagttcattttgttcgagacaaatttgtacgtgactttgtttttagcacttcaacacctttgatttgtaatttctttttgtgcatctgtcttccaactttagactactcagcctcttaagatacaaactgtattagttaaaataatgttagctgctgtaacagataaccctgaaatcccagaagctgaatacaacagatattttttcttcattcacacacattccgtagcaggtgttcagtgggtgtctccctcgtggtgactcagggactctggccccgtccatcttgtgccccaatacctccactctgtggcttcctaagtcaggggaatagcacatggagaaggtatgctgcctgtcggtcatgtggcgctgcaggtgcacacctcgctgcactcaccttcccctggtgagcatcacatgggctcacctggactcgagggacctgggaaatggaattacttcccatcgatgaccctacatgaggctccagagcatgaatctggtagagatcaaatcattcctgccattgtccctcttgtgcatctctgaaccccagggtctgccacagttcttagttcagagtgggaaataaaaatgaacatgattgtcctcttaaagtgaccattctgatatttttggtcaaaaaagtgggcattgtgaaagtgggcataatatattctttaaagcacttgtttaattttaaagattattctttcatttaagtcctaatatccatggtaagctacctcatgtaaagggccttcaatagtagtttaaacgcatttccaaattagtttaatcttattgtggtggaagaactagattttaaaaggtatatctaagccattagatatcattgtggttaaataagcctggccaatagaaaacagaatctcagtttcatttcatggacacacatttatttagcaattgctaggagctgctaaggtacaaagaagaaaaagattagtctgtgtcttttaagcattgatgaatgaagttgcaaacagatacatttcaataaatatgcttagtcctacgatcagaagaatgacaaaattctgcataaacacaagcagtgatgcagctgactttgtctcgtagacatttgaggttggttttaaaagatacgtagtaaagactcgtagttttgttagatgtgatcatggcattgtgggcatatttttagaaagaatcctcatctatcagcactacacactaaagtgttcatggataaaaataatacctgagatttgctttttgcttctaaatatttttttaaagttaagtagagaatagaagaaaaaatattccagtgaataattgttaaagttgggtgatagacgtattatactaccatactattctttctactttgtgtaggtttgaaaggggactacattaacagttcagaaaaataggctgggtgtggtggctcacacctgtactcccagcactttgggaagccgaggcgggtggatcatgaggtctggagttcaagatcagcctggccaagatggtgaaaccccgtttctactaaaaatacaaaaaaatattagctgggcatggtggtgggtgcctgtgatcccagctactcgggaggctgaggcagagaattgcttaaacccaggaggcggaggatgcagtgagccaagattgtgccactgcactccagcctgggcgatagagtcaaactccatctcaaaaaaaaaaaaaaaaatgtatgtctttagtcccagcacttgggaggctgaggtgggagaatcatgtaagcccaggagttcaagtctgcagggagctatgcttgtgccactgcactccagcctgggtgacagagtgagaccccatctctaaacaaaaagagagagagaaagaaaaaaaaaggaaaagaaacagagagagagaaaagcaggattggattctgccagtccaaatgagggtaaaggtactgcaggtagaggaatctggagggcatcaagaaaaagcctcgattctttgggtacaataagagattcagcatggcttgagaatagaatgcacataggtaatggggagggagaaggctgtgggaggaggtgggggccaatttgtgaagggatttgcaaagtggtcgttggggtttaaaacaaataacatcttaaagcatagagaccatttgttttcctttggtcaagaggccgaatatcaaaaagcagcttgctacttaggaagctggccaatagtcacctagagaccaaacctggacttaaatccagttctcttagcccgtagttcagtcattttaattccttataataatgaaaaaggcaagaatatatgcatcatatgccatgaggcactttatttacatcttttctgttcatgcagctaagctttatgagtgcggttctcatcctcaaatacacccgggcactccttgctcaaggccaggcattttatttacatcttttctgttcatgcagctaggctttatgagtgcggttctcatcctcaagtacacccgggcactccttgctcaaggccagttctcggggccatttgtgattgacaaaggagtgaggcttgagctcatcggtctcatatccagagtctgggaagtctctgagcaagaaaactcgaaggaggaagtctatcgacatgaagaaggaattacagtcatctcagatttattgttggtaagtcacactttttctccatccataaaaatactgtttccatatcccaggatgttaacctgtatttgtaattgcttctcaaaaccaaaaacagaatcagtttctgaagtactgtgttcattcttctgggtggcattttggtatttggagactttcattttgaattttaagtatttcatggtaatattataatgtttccagtgaaaccttgcttctattttatcctttttttgttttggtagattttcatttgggatatttgggatgtttgactcagaaacattatttctcaggataccttctgtttttttgaggaattatgtgaagtaatgcaaatgatttattgcatgcagcaattttaaaagtagccctgctgatacataacttcttaaaaaggccaaagtttatttcatttatttctgctctggtaactttggaaattgtctccgagacttttttatttttactttatgaaatggccagtgctttcaagaagcagtaagtgaataggcttctggcgttcctcttctaccaatttagcatccctctccagtcctgctggcttatttaacggatggctactgtaacatttgggaaattagcaagtaaatagtctatctgaacctactaataatcatcatcattactcacaagtgtttaagaacatttgttgcctacttacccagcgctgagccctaagacctgcgctcttgcttcctgccatccaatctaacttgagatgggctttttaactacttttcccctctctcctagtctggattcaagacagtttgtgcatttgtgttataaacatcccactccctatgctctatgtttcagggttgtctctctttgaaccatgttagcactgggcagatggagttccggacccttcttcattacaaccttcagagctctgtccagagcctgggatctgtccaggtgcatttacctggtgaccttgctgggcacagtcctgctggggcggagacacagagcccatgctacattagccagctcatactcttcaagaagaacccatatccagggagccaagctcctgggcaggtacaagctgacagatgacctgccacttctaatgaccatttcaaatttgcagtaattgggcttaaatgacaaaaagagaaactaggttggcatatttgcacctgttttttgcatgtttgcaccctctcagtgccaagagggatcacttagaacacgttgctgactctactcctcttagaagattagcttctccagaaaactcctggcaaaactagatgtcacttgtatctgggacactgggcccattcactgtttccttgaggccttctaatccattgtcagagaacagaaggctctagggggttgcagcatgtgatgcagtgattatgcaagcattctggccaatcgtgtctttagaacgatgaagatatgggtctaacatcaaatgcggagtatacctgaatgacgcttaagaaggggctgctgaggacatggcagtgcttaccccccatcctccctgctcaccagagaggcactgctgggctgaacctgcagggtggcccctggctccctgagaggtcaggaggaacaggggaccacagtgaaagggggatgtgaggatggggaagtcagggaggattgtcccagccacttggcagttttgtagacattcactcggaagctttgtgaatgaccccagggtcaccatgagtgagtttggaagggcagagagcaaggattctctatttctgtagcccccgaccccagtctggctcaagtacgtggctcatttggtgacccatcaaatgtctgatggatgtatggacaaattaggtacatcttattttggtcaaaaaatgctcatcttttacagcatttgcttttttaaatggaaatggaaatggctaatcagcataggaaaataattcaaactaacaatcaataaaaaacacaaattaaaatgatttttttaccttacaaaagtgcaattacttaaaaacacttactgcttgtggagatgcagtgagtaaaccagggtgctcggcagtgtgacattttggaaagcactttgtcaactaggcatccagcaacaacctggcctacactgttacacttgtaagaatctacactaggaaaatgagaaaagatttgttcagaacaagatgtcttgtcgtatttatttgctcaaaacaatattattataactcaaatagaaatgtacctaaatgttcagcatagggatagagttcatatatagctaattgttattatgtcaatcagggaattttagtaatttgggaagactgcaaaaatatagacaactgaggccgggcacagtgggtcacgcctgtaatcccagcagtttgggaggccgaggcgagtggatcacctaaggtcaggagttccagaccaacctgaccaacatggtgaaacacccgtctctactaaaaatacaaaaattagccgagtgtggtggcacgtgcctgtagtcccagctactcgggaggctgaggcaggagaatcgcttgaacctgggaggcagaggttgcagtgagctgagatcacaccactgcactccagcctgggcgacagagcaagactctgtgtcaaaaaaatatatagatatacatatagacaactaaattgtctgccaaatatgtactctattacatagcaaaatttgatactcaacatcctgaaatatgatttctatgagcaatgggactatagaatagctattcttcactcttgcatatacttttctttttttttttttttttttttttttgagacggagtctcgctctgtcgcccaggctggagtgcagtggcgggatctcggctcactgcaagctccgcctcccgggttcacgccattctcctgcctcagcctcccaagtagctgggactacaggcgcccgccactacgcccggctaattttttgtatttttagtagagacggggtttcaccgttatagccgggatggtctcgatctcctgacctcgtgatccgcccgcctcggcctcccaaagtgctgggattacaggcgtgagccaccgcgcccggccccactcttgcatatacttttctataccttcctgattatctacaatgagcagatatttcttttgcattagcttttaaaataaaaaatacttcaaaatactttagaaattattaattttaataagaatgatgcaaatgaagcataatattcactccaatcctgccatcctgactagtaaaactggtttatttttgtatgctagcttctaatatcaggcatataattttatgtaagtgtaatagcagcaccacgatactttggtttgctgcttttctcacttaagtccattgcttgctgtcatttgctctgagatggtctttgttccccaagattggtggagttgtgggcctcaacctctatacctgctccagcagaagacccatcaacaggcaatggctaaggaaacccgtgatggtcgagtttggggaggaggatggcctggtaaggagagcctttctcagtatctctacttcatttaggctgtgctggctgatttttaatgtgtttattttaccaaaggcaaattttgcttaacttgttttctttgtgatgacaggataataggagaaataaaacgacatttgtattacttcgggataaagtgaatctccatcagttcactgagctttccgaaaacccccaggaatctctacagatagaaattgaattttccaaacctgttacaagggcatttcccgtcatgttgctagtaaggtgtgttgatggtgacagctacaatgagattggagtaagacatattgtccttaagaatgttttgtgacaaaaaatcagtgaattaaattgtgtttttaaagcaataatgaggctcattgtttaaagaaattgttatctattctgctgtttggatgctaagcttcctgactttggtttttgagtttgaattcctgcctgttaacattattagagtgagaagcattataattattagtgataatgcatacagtctcatttagaaatctaattctttcagtataggtctgagcaagatttttttttatttttccaaaaggagaaaatgtgtttaaatttatatatctaaggaaacttcataaaataattatttttctcaggaatgttgagttcatgagatttgtataggccccagttaataaataaattacctgggaaggtaattgactattgggaaggtaagtgactattgaaaagattctttgaaattctacagcaaatgtgctaatggaaaccaccagtctgcagagttcgttggaggtctggatgggcagggccttgatcaccttccttctcggagtccccgtgtgtttagtctatgtggcaaagatgctcactgttctactgctcctggttggttaggtgggcatctcaactagattaaagggttctcgtgagcaaggctgtatcttacacaggcgctgtccacacagcccttagcacgcagtttaatctctgcttattggcctgactctcattctgccaaatgagctaagcattcgatgtctaaaagtggctgtctgcttagagtttggattttaatttaattctttaagtcacatgcagaaaaggtaaatcagttctgaggaatttctgagtctaactactaagactactacttagtctagttttgtgcttgctatcttttatctgcaaacaggttacggtaaagagttaacacaaacatgcaaacatacgtgtgggtgctgcagtgcccctccctaaccacgtgtagccagtgctgtttgtcttattcctacagactgtgctggccattcttgtacttgtttgctactgaagtgtttgtttggtttttggtgttttttttttttttttttggtttgtttgtttgtttgtttttgagacagagtttcattcttgttgcccaggttggagtgcaatggtgtgatctccgctcactgcaacctctgcctcccgggttcaagtgattctcctgcctcagcctcccgagtagttgggattacaagtgcgcatcaccacgcccagctgattttgtatttttaagtagagatggggtttcaccatgttggtcaggctggtctcaaactcccaacctcaggtggtccgcccatctcggcctcccaaagtgctgggattacaggtgtgagccaccgtgcctggccaaagtgtttgtttttaatgagatgcagggtgaaagtgttatgtaggagtttttactaagagaccaggtggtgttgtggaattaagcacattgaccctttttagtcccaggctacctccttgcagtgacaaggatgttttgcacaaattgagtaaactcttgatagaaatttgactaaaacctttgagagagaagaaaaaaatgagaaatccctattttgtttttatctcctagattctctgagaaacctactccctctgattttcttgtgaagcagatctacttctgggatgagtcaattgtgcagatttatatacctgctgcttctcagaaaggtcagtgaacagggcgccttattttccctttctgtttacatgattaaaacatcccctataacctttgtatgtatagtggtgtttttctttattcatgacaaaaacatcagaatcctttctctgcttgcttataaacaaactgctccactatagatcccacacatggaaactgccccatgatgagcgccatccttgtgatgcagtggctggtgctgctcactgccctacccatctcttcccaggtggtctctggcgcctcctcctgatccttagggctctgcttgtgctcaggctaagtctttgcctgaagcaccctcctgccttgcttccctcaaactaacctctgctgagcttccctgacctcagagttgacccaggacttctgagacgtctctgtgtctcacgtatcaatagggcacaggaccccctctgaagcagtgtgggggcagagtgtgaagtttggggctcaccccttctccgtggtctgcccctggtggcttaggattctgagcctcagtaaccccttccccaaaaaagcaagaaactggagctcagtgggctgaagtggcacccacaggcaactcaccagacacgcgccttacactgacttccacaggccctggccctggagaggagctggcttctgactgtcagtgagtgcgccagacccattgtctctacatgtttactgggatatagttattttcttctgagaaccagtatttgtttcttttaaaaatgaatcaaactgtattgctcatcaaattcaaattctcaatggtattttttaatgttgcatttcatgtgttctttttcacagtttttattgtaatttcaagctgatagaaaattagaaaaatacgcacaacatatacccatatccttttccttgagattcaccatttgttgatttctgccacatttgccttatctgcatgtgtacaggtgtgcacatgtgggtgggggatgtttttgagggagaggacaagccgttagagagaaagttgcaggccccatgacataccacccctgaatacttaaacatctcatgaaaacaagggcattccctacaaaactcagtacattatcataaggaaaagaaatcaacattaattcaagaatatctattctgttatccacatttaaatttttaaaatccccccaaatgccttctatagctctttatattttttaatcagaagtaggtcaaagttcatgaatgcattttgttgctgtgtttttatatagtccctttaaaaatctacaacaccctcccaatttttgcctttttttcagacttttttttatgagcttaggttagttattttctgcatgttgtacattcaggaaattgcctgactgtttcctcatgattaaattcagttcacagatgattggcagcatattccataggcgatggtgctaagtttggtaatttgcttggggaaagaacctccaatctctccattttcccctttgtgagatgatacttttgagaccaccttagtatcttcttgccttacaaactgtcaccccatgattttaaggatccatgggtgatataggtacatagaaggctacaaaacggtgatttgctaattccaccatgaattagctggcattcttcagtaaagaagagcttcagtctctctctgtcttactcttgctctcttgtctctatggtgcatggtgtttcttaaaaattcaatgtgttaaaaaaaaaattcaatgtgtttagttcacctccattattttactttttgatgcacaaattattccagtgggagctcctccaagatgcttcctgaggttttcttgacatgacatcacaatcctcaagtgcttctttactttctgggacaccagcgtgtcctggcttatcctgtgtttggccagcccttccttggaaccggccatgtcctcaatgaggcttggctcattgatgggaaatgacattagaacacaagaactgcgcatcacatttgctcattgctattggggcgtcactgatttaacgtctgtgtgtgtgtgtgtatgtgtgtgtaaaatgagttaatcacaatgccttaattcaaatccaacacccagggttccttattactttctcccattgtgtgttcagatccccattctcctacagtgagaattccagttgccaaaatatgagaacttgagagccagtttccaaagagcaaaattcactttgctctatcctacagtatacaccaaatcgttttagaattaaagcacctgtacccctaacaatcacaaacctaccagataaagttcaatatttctttctagattttttgtttagttttgactttacattcttacatgatatattacagtaagagcacatagtcaaaagttagttgaattaattattttctctgtgggtttttgctatacgttttatatacagctaggttcacttttttgcatgtacttaatgctaagccttacttttatccttttttttttttttttttttgagacagagtcttgctcttgttgcccaggctggagtgcaatggtgtgatctcggctcactgcaacctctgcctcctgggttcaagcgattctcctgcctcagccttgtgggtagctgagattacaggcatgcaccaccagacccagctaatttttgtatttttagtagggacagggtttcaccatgttggtcaggctggccttgaactcctgacctcgggtcatccatcctccttggcgtcccaaagtgctgggattacaggcgtgagccacggcgcccgtccccattttttaacattaatttatgttttgaatttgtgagacatttttattgttcagatgtctaaagcacatttaaagatgtatgtattcagagctaaatctttcaacagccttattcttataccttgttatcacctagtccttataggtaattgttttcatttgtttcctttattttattttatttcagtagtttttggggaacaggtggtttttggttacatgaataagttccttagtggtgatttgtgagattttggtgcacccatcacccgagcagtataccctgcaccctatgtgtagtcttttatctctcaccccctcatccttacccctaagtccccaaagtcctattatgtcattcttatgccttttcatcctgatagcttatctcccacttataagtgagaacataaaatatttggttttccattcctgagttacttcacttagaataatggtctccaactccatccaggttgctgcaaatgccattattttgttccttcttatggctgagtagtattccatggtgcatacataccatattttctttatccactcgtaggttgatgggcatttaggttggttctgttgtactagtttacattcccacaggcagtgtaaaagtattcccttttcaccacatacacaaccaaaatctattattttttgacttttaaaaattatggccatttttgcaggagtaagatggtatctcattgtggttttaatttgcatttccctattacttagtggtgttgagtattttttagccatttacatatcttcttttgagaattgtctgttcaggtccttgcccactttttgatggggttatttgttttttcttgcgatttgtttgagttccttatgaattctggataccagtcctttgtcagatgcatagtttgcaaattttttctcctactctgttgcttgtctgcttactctgctgattatttcttttgctttgaaggagctttttggtttaactaggtcctatctatttatttttgttttcattgcatttgcttttgggtcttggtcatgaattatttgcctaagccaatgtctagaagagtttttctgatgttatcttttagaatttttacagcttcaagtcttagatttaagtctttgatccagctcgagttgattttttacataaaatgagagatgaggatccagttttattcttctacacgtggctagccaattatcccagcaccatttgttgaatagggtgtcctttcctcactttatgtttttgtttgctttgtcaaaaatcaattggctttaggtatttggccttatttttgggttctgcattctgttccattggtctacatgcctatttctatgccagtagcatgctgtgttggtaactatagcctcgttgtatagtttgaagtctggtaatgtgatgcctccagatttgttccttttgcttagtattgctttggctatgtgattccatatgaattttaggattgttttgtctagttctgtgaagaacaatgattataattttttttttcttttgagactggagtttcactcttgttgcccaggctggagtccaatggcacgatcttggctcaccacaaccttcacctcctgggttcaagtgattctcctgcctcagcctcctgagtagctgggattacaggcatgcgccaccacacccggctaattttgtatttttagtagagacagagtttctccatgttggtcaggctggtctcgaactcccgacctcaggtggtccacctcagcctcccaaagtgctgggattacaggcgtgagccactgcgcccagcctcgatgattataattttatgggaattgttttcctgatgtttctttttgggaaaataagcccatgcatacccacattatttccccttatttcttacactcatttgcattgtgcttttcttacttaaattacatatttagaaatcactccgtatgtatttattcatcgatatcttttttttttaactgctatgtgcttctccattgtatagatggaccgtagtttattcagccagtctcctatgtattcacatggaagacttgtgcatatactgtattacatgtagggggaggagtgtatcttcaagtttaattcctagataggctgttcctgggtcggatggtaaatgcctatgtggttttggtaagtattgtcacgtttacctccagcagtgtctgaagctgcctgttttcccacgtctttgccaaaaggatgtattttcaagctattgagttttgccagtcttataattgagaaatgttcattttaatatgcattttatatgaattaagttgggtattttttcatatatttaaagccattatccactttttttctgtgaattgttcatatatgcccacttttgtattgagtttgttttttcttgatgtttaagagctctttatatgttagggctatttttaaaatagtaatttatccaccatttcttgtaagactcttagattttgaaccatcgttcaaaatttatttcttatgtccagattataaaagaagtcattcatgtgttcctcagtacttgtgcagtttgtttttgttttttctttcatatttagatatctgatttgctaatgtttattattattttttatagcatgaggtgcccatatttttacaaagggctaatgtctagttgtcccaacaccacttattaaaaagtcttgggcaatttttaaataagtagaatgttaaatacttctgcttctaaatataaaaagtaggctaaacataaaaaaaaaatgataggctaaaactccatgggtcattgtgctgtccttaccagaatgggtttagaccctgggtatactgaaatttcgcaggctggctgacaaactggcgaggagcaggaagtgggcttgaatggcagctaaagaaactgactcaaccctcttccatccccactaaggtcagggggtgtggcctgttcagggtgtcagggggcacttggaacatacgggatgctagaaacactgtttttcttcccaattctctaccattcctcaattcgtatctgcatccaggagctttgactgggtggatttaatccaaatttaaatgcttcggggacaggaaatggctagaatttgatgctgtctttcagttcttgctcatctgtagtccttgtccccacctatctgcctactctgtctgcgtttgaaatggagaatgcctttctgcaaacctcaggttgtactttttatttatgttttctctttttagatgccagtgtaggctatttatccttattggatgctgactatgacagaaaacctccaaacagatatttagctaaggcagtgaactatacagtacatttccagtggatccgatgcctgttttgggacaagagagagtggaaatctgaacgtttctctccacaaccagggacttctcctgaaaaagtgaactgcaggtatagacacatttgagaaagaatctgagatttttagtaaatgactgccttgtcttctgcatttggcccaacccctagagcctttcctgaaccttgtccataagaagctggagctctcttggtttgtacaactctccagcctgtgtcagttctctcatagccagttcgtgtgtcagccttggttctcccactctatgggctcccaaggagcaagggctgctttatagactgtcctcgtattcctccttcccgtaccgactgtcatggaggaggtgtttagtaagtgtctgttgaagacatgagtcggtggatgagtgatagatgaacctgtcagttttcttatcatagaagtgctgacatcctttgagtacgcagtttgtagtcaggcaggtgggaccctcagctctcaccatgcccccatgttgccctgagagtccctcatcttcagaggaccctccacagcctggtggtgaaggtgtgctttctgaggcaagaaaagtctctgcgcaaacatgaacagcctcctcaggaatttctgggcatatgagtcatgtcactaaattagaaattgtttgtcatctagctgacagactaacaattctataagaggctcagatcattcttttttgttgcccttaccttttcattaggataaacaattattagtcatatttagaagcagaaatagtcatttccttttaaaaaacaaataagccataagacattatattttgtgatttcctgctaggaggcaaatatatccagatcataccgtagcagtgcaattcatagccatttattgattttcttatgttacactcttaaatttttctaatgccattgctaggagcacatccaaacttactggtaatggcccaatattttgcttccatattaaattattgataaatgcattaatgcaatcattcattctccattacgtaactactctctgctaggcacttttttatgagccaagggtacaaaaatgaataacaggccaggcgtggtggctcatgcctgtaatctcagctctttgggaggctgagacaggtggatcacttgaggttaggagtttgagaccagcctggccaacatagcgaaaccccatctctactaaaaatacaaaattagatgggcacacacctgcaatcccagttacttgggaggctgaggcacaagaatcgcttgaacctgggaggcagaggttgcagtgagctgaaatcacgccactgcattccagcctgggcagcagaacaagactccatctcaaaaacaaacaaacaaaaaatttaaaataaatcaataacacctaggacctgctcacaagataatgagggtgagatagactttatttttaaaaaaggagacagtgtttacagtgattgtcagggtaggatatttgtaatgccaggaactggtgcttaggcagaggagttggccagagcttgaccagcagcacagctaggctgtgactgggacccgagagcctcaggctgcagccatgctgtggagggctgtcatgaagaccgccatatgctgtggagtcttgcatctcaggacagcctccatgggagccatgtgccccaacacgcagatgtgaagaactctggcacatcagaagtgtccctcatttctaacttaggtgtcaggtgaatcttttaaactgggtcttagtcataaagttatcattattgcactctttcttccttttctcattcctttaaccaacatgccattacactgtcaacagctgctctctccacacattctgtatcctcatccgcatttccctcctagctaccatcgcctcgcggcattcgctctcctaaggagaaagctgaaggccagttttgaagtgagtgacatttccaagctacagaggtaagttccatttcctacataaagacttcatagactttatttgttttactgttcactcaggatgcccacatataattccgggggtgcttgaaatccatgttacttactatcattgcatttttgaaatgtgcatattagtagataattatctttaaatattatatagttgaatatatacttatatatcttgtctctctatacttgaattcactgatgagagatttgtaaacacaagaaagtcaacatacttttcatacttttaagtttagttttagttcagtgtgaatttggtcaattattattgatagggttgatatctacagtgacaataatacctaaagagcctgtcctggtttatgtttattgtcacagcctaattattaatagctccctctttctctctctggagtatcccattttagataatagatttaaaatgtacactatttttatagccacttttatatgaaatggttatatttagactctgagatatgagtaaagtgaatgtaagctgatatggacaggaaccttccctgtcttattcatcagtgtcaccctacatttaatacaatgcttagagtaaatatttgctgaatgaatatctagggcagagtctgcattttctggggtgttgagtgttaaatttttttctccttatattcatatagtaagaaactctaccttactttattatttcatcaatcgtattactttatagactagttggtggaccagataattagtaaataagatatgaattgctaatgcaacagatgttgggtgcagaacaggtcactggccattcagtgatcagggctcagaagacagcagcctcaaccatggtgtctgcggcattgataccactggggctggggcaaaccatgggggaagcagccctggaagatgtccagagagaggcaacacctgaagttctacaggggctatctggccagaatccgaaaggtttcagagtattgtccaggtggaaggatgtgagcaccctgcagagctcgtggggcagagctctgaacaggctctatcttggtgggaaaaaagagggcaggtgagaaaccaagagcagagcccaatcctcagattaaatcaaagagcagaatgctaggggatggggcgggcaacatccccgtgtgacatagaccctggtgcccaccctctgagatcccatcacaaatctgtaagactccagttaggttagagtccctgcacagcagcttgatatgaatgtcattctacggaactgtgggcattcagtgatctcaccccagccagtgttggtgcctgggaacaggtaggtagaggctacaggtagggaacaagcagcaccatccacaggggcggtgggaggcacaggcagggtctccaaaacattgccaatgcctcctagccttgttctgctagcaggagagggagagagggaggaacataatggcacctgcatgtttcaagaattttgtatatttgtattgcttaatctttacaatagcagcgagactggcattcttagccatagttcacaatgaaagttcctcagacccagcatggcacagccacctagcacagaggctggtccattacaaggtttctttggttctggagtccatgcttgtggggtgctgctcactggaccacaggccagctccctgccttcaaagcccttctaactcagcttccagcaagtgtaaaaatgtatcagtgaagcccagcagggacttttgtgtgtaaggggctaggggtggcaatcagtcttttcctatatgtctattttcatgagcaattttctttatatctctccttttgtttatagccacccagaaaacttgcttcccagtatttttattatgggttctgtgattctttatggatttttggtcgctaaaagtagacaagtagatcatcatgaaaaaaagaaagctggttacatctttctgcaagaagcttccctgccgggccatcagctatatgcggtcgtcattgacactggcttccgagctccggccaggttgacctcaaaggtagctcgagcatctgggggtactctttgatggtgtctaagcagtgtcaacatcagaagtgaggatttggtgatttggctgccccgtctgtcacctgtcacagcagcctcatctcattgctgaggcaaagcttgcccgccctttccactgccctcccttggcctgcacatctgtcagggtgaagagcagaccccttcaccttctgcagctgctccaatcccttctccttctgtctccactgtggaaagcagcccggggagatatgttctgtctctgagtggatctttgagactctgagaatgagttgtactcttctgagcttggggctgaagacaacagtcccagagaagctggtggaggatgaagatggggtgggaagaaggatgcggtggaggaggaggaaatagtctagcactgggcccagtggagcaggggtgccgcggtgagctgtggaggtgaggtctgcaggggcagaaattgagcccggcagagccatgtgcaattcgaagtgcgtgtgacacaaatccctcagagagggagactccctctgcccttggaactcacgcttccatttcccgagggaaccatggttactttatggaagcaataggattggggtgtggatgagaaagagttagatgggaggatgaataagatggggtgccacagtgcagtaggatagatggggacacaacacatttttaaagcttatgtggtccttactcaccataagcccttcgtctaccaactgtatatttaaattgtctttcagataaacatacatgtatatattcacaagcaatgcatacacataggaatgttcttaacctaacaaaggaagatttagtggtgaagctttagatgatttctaagggatgtctgctgtcagcactgctatttatcattgtactagaaatcctggttaaaaacaataaagcaagaaataaaacaggaatataagtttccaaaagggagaaagagatggttcttcgtacaggatgaggttgtctacatagcaaatgaagaagcatcttcactctaatgattagcactaataacattaaagaaacttgctgaatttgtgattaagaaaaaatcatcaaaataatctctataaaacagcaataactatttataacatggagttgaaaacaagaacctctttgtcacagtaaaaaatggtggggtgcctagaagtgaattcatcaaaccccacatacaagaccatcatgaaggaactatccctgatatgcataagagatccaaataaagagctatgttcatggatgagaaagccgattttcctttgtcatttctcccaaattaatctataacattaataataatagtgtgaatgaaattctattaatataccccctttacaaatgaaaacctaaggcataatgaggttaaatccaattaaatctattcataattccaggacagtgttttgtggaacttggaaaactgatcctaaaattcaggtagaaaagaatacaagagaattacaagaccagtcatgccaactctcaagagaagaacaaggcaggggcctcccaactcgatatccaggcttattttgaaactgtagcacctgagatcgtgtcatgacctcgggagaggtactgaggagggatttctagggaagactagaggtcttacaaaccacaggaaagggtgcactgtttcaaaaaatattttggaacaatagctgcccttgtagaaaaaggtactattaaatctttacatcatacacacaaaaaatgaactccagaacattagagacagaaaggtgaaaacacaaagtttagaaactagtcaaagaaaatatacactttcgagtaaggaaggatttcagaaacagaaatatctttcttaaatgaaaatttgataagtgacattacatcagaattgttcatttctgtgtgacagaagataccagtgagaacgacaagcccagccagattgtcatgtgcctccccagggtgtgcccacaggtgcatgggtaccctactctgcgtccaggctcctctggcatctccctgccaaaccacagggaggaaaatggtgtgcccaccgtggtgttctcccgccctcatgagaaaacaaatgccctcccgaatcctagttgggatctggcttttctagatcaaataggtgaggaaatggccaattctaccaggctccacttcgaggctctcctctggctctccagggaagcctgggactggacgtgcccactcatcccctggctctaggctgtggcactccaccgtgcagatggttttgaggaagggtgggacgctgggagaaagtgcgaggaagccctgcccagcattgcatggtgtctgctgtgaaatagcctgagttcccacccctgttctttgttttgaggtgtacattgttttatgtggcgacaatggactgtcagaaaccaaggagctctcctgtccagagaagcccctgtttgaaaggaattccagacacacctttatcctgaggtattccaaaatatttcactgctagatttgggaaagagaggccaatcagaattggtgtaaccttatcacaaatacaaaacagtagaatacataacattggtctctaatagtgagcatcgatttatatacaaacaattttatgatgtatttttagtttattattctgagtagattaaacaataggtttatgcgaggcaaggaaggaaggagggtggggaaagaagacttactgattttacatactagtaaagttcataatcagtgttttctatgacactaaaccttctgaccttaattaggtttgtccccagtttgtgacacatggtgtcacaaagatggtggggttggagaaagagtgaatttaacaagataggatgcaagcacctggcgtcttagaaaatatgaaaggactgagctaaattattttttctcctggtaaatttcatgtatgatatttataggtttggagtattatgtcttcattaagagagaaaaggttaactttagactaatccacaccagagacaaatacatgaacgagatttgtgtaactttggtttgggaaagctggtggatattgaaggcctgagtgcagggtcactgtgctcggtgggatttcccatcctctggccgggttccagggggcttcacatgtcactctgcatgtcagtcacctttgacatgtcccatccaccctctgtgggccatcagtgccttgagggtgagcattggggctgatgggatgccaggaccacactgtcacccacccggctgagatgctgctgtgtgtgcctccagcgctcctgcccaactgggcctgctgaggaagatccgcctctggcacgacagccgtgggccttccccaggctggttcatcagccacgtgatggtgaaggagctgcacacgggacagggctggttcttccctgcccagtgctggctgtctgccggcaggcatgatggtcgcgtggagcgggagctcacctgtctgcaagggggactcggcttccggaaggtaggctccctccaggtggcctctcgtggcgcacctggctgaccggcagagcatggcacctgtctctgcttcgcttgccacagttgtgtctttgaactcttctaaagtgtattcctcttttcttagttaattaccacgatatcaaaatattaaatgatacattcattgagtggccatccaagcatggattaattacccttcacaattattaattattgtagtaatgcttctctgtaattgtaatagcattgctggaatttatggttgctggtggtctgtgatgtccagagccctgtaattaaagacttttcagtgccctatgtgtgtcccaaacaacctagataactatcaatagagtaattacagatgtggtatagatgtggtcaggtccaggatggcaggagatagccagagtgacagaataacagataacctcacaaactaaccatggaagtcgtgatttttgcatgtcctttccgtctttccctatatacaaacacatttcatacaattgtgatgataatgtcatgcattttgcactttctttctttttttttttttttttttttgagatggagtctcactctactgccaggctggagtgcagtggcacgatctcgactcactgcaacctctgcctcccgggttcaagtgattctcctgcctcagcctcccgagtagctgggactacaggcacacgccaccatgcccggctaatttttgtatttttagtagagatggggtttcaccatgttggccagattggtcttgatctcttgatcttgtgatcctcctgcctcggactcccaaagtgctgggattacaggcatgagccaacacacctagctgcattttgcactttcttattcaacattttagagtaggtctcttcatgaatttttaaaacatcatttcagggctatatagtggcccactgtgcatgaccatttgctgaagacctgttgggcatttataactttctttcatttattatggtaatgacaacattgtgggaactttcatgtgtgactctgtgtccctgatgagtacttcctgaagctgggtctcaaacagtggtaaaagcccagtgaactcagacagtccccagtgtcgccggaccttgccaggccactgggctttctttccaacccgccctgttgccacctgcgttgatgagaggcccaggctcaaggccttggcattttcaggcctgacatattgctaagctagtaagaaacatgatcacaaaggatttgaaacaagttttcaatcagccacagcatgtggaaattcttcaacatctaaaactgaaggtccattcaactggggcttcctcttagacgactgtttccatgtgagaatgactgtttggctgaggaaccatagttaacaacgggagacatacgttgcttatcctccagctgttgtgcttgagagctttttgtgagaaatgtaggcttattaatttagtcacgtatgagcacttgtgtgtgctgcgaattgagcgttgcttgttggctagtttatttacataaagaagatatattctcattctgttagtacgatttttctggcattcgcttctgtgctctgctcatattccataagagcagttctgtatatacttttgttttttctagaacaatattgagccccacgcattatttaaattgaattggaacttaaaatttagtgcaattcctaaacaacgtatctcccactgtgtgccagacactgtgggctactgaggacagaggtggaggtgactcagccccactctcagtgtactcaaagcccagttgaaattaactatgttgccagggaaagttctgagagtggaggggtttttgaaagtctcttaggaatatgaaggagaaccaaggagagactgatcagaagctctggagagaaggtctcctgaggctgggagtgaaggcatttgagacccatgcaggtgaagctcggagaagcatgtgccaaagctcaggaggtgccagaggaaggccaggtgagccagagtccagcgtgatagcagtgtggctgtagcaagggggctgccaagaaggctgaaggaggagcagcttcaagaggcttagaatgaggtactgttcacctgcacccacagcccacctagtacccagctaaccagccaggatagcagagccagagagtgtggggagtgcagtgctgtctacctgcaccacagcccacctggtacacagctaagcagctaggatggaagaaccagaaagctcgtggtctctgctcagaagatcactgcttaacagtactttgctttgctgacagaaatgctccatgtcagggaacacttctcctgctttccgtttcagcttttctattgcaagttcacagagtacctggaggatttccatgtctggctgtcggtgtacagcaggccctcctccagccgctacctgcacacgccgcgcctcaccgtgtccttctccctgctgtgcgtctacgcgtgtctcactgccctggttgctgctggagggcaagagcaggtgagagccatcgcttttccttatagcagcttccagatccgactacactgtggcccctttttgcctaagaaatcaacaaagctcacagttctccgagaaaagtttaaaccaggggaagcaagcctggctgcctggggaccagagaaggaacaggagggctctgcccggtgtggcactgggtggccctgcacagctctgactctgctggctcggtggacagctgctgtgtgggagctcgtgcccaggcccagcagcagaacttttccagagaggctggcagccggttgtctttgagaacactcttgaatttttttttaagttggcaattcatttagattttaaataaatcctctggacaaaagaacgtagaaccattctgatggccacattttccctcaagatgccagtttgcactggcaactctggtctgattgttcctcatgagatgtagtaaattacttccaaatcagtgtcagcagttaaaatggagaccctctctttcctgaggaaaaaacaacacagcaggacgtggactgaggcaaaactgacttgtttactacgacaacatcatggccattcatgcacccagcccaccgggttcaccgctgggtcgtagtgtggctgcagaatgtggtgacaaggtccgtttccgaggtgggggtcagcgacccatccatgggacagccgggcatagtggctcctttatgacaccaggtatcagagagatccaataacaattatggattggtgggattaaaaaaataacagcgcacagaatttgtaaaaagaggataaagaaatatcatcaagtagcaggaagggaacagctccgtccacctggaaatagaccagggcctgtggtgaggaaacctacggtcggcctcttctttgaagccgacatgttgtctgatgttggaccactaaccacttttctctgttcattggtaccttgtgggttgatgccttgctggattgtagccatgattccatccatggagcacatgcctggtagagagtgggtgctcggcaagcatttgttcaatccaaaacgatttgtataagaagaaacaaaatgatttcttgtgtttttttcactcctggggtagaagaagcctttgctggattccttctgcttgtatccatcatatcagttctatatatagttctatttttttcttagaacgaatattgaacatgaagcattatttaaattgaattgtggccaggcgcagtagctcacgcctgtaatcccagcactttgcggggctgaggtgggcagatcacctgaggtcaggagtttgagagcagcctggccaacatggtgaaaccatgtttctactaaaaatacaaaaattagctgggcgtggtggtgcatgcctgtaatcccagctacttggaaggctgaggcaggagaatcgcttgaacccgggaggcggaggtcgcagtgagccaagatcttgccactgcactccaggctgggcgacagagaaagactccatctcaatcaatcaatcaatcaattgaattgtaacttaaaattcatgattcatgaagagagcacttttattaaatataatgtatgtattcacattacatgtatttgtaattacacaatgactgcgttttaagcgggactcatattgagttgatgtaatggctgctgttgctttgttgcagccccacttggacgtcagccccacccttggatccttcagggtgggtctcctgtgtaccctcctggcttctccaggggcccagctcttgtccctgctcttcaggctcagcaaggtacctgcgacttgtcctcatggccctgttctcctgagcagccccttcattgctggggaacacgcttggcgaaccacctctttccttctgcaggaagccccggggtctgcccgagtggagccacacagcccacttagaggaggagcacagaccgaggcaccccatggtaaatgtacattaaaactctcagaaactctccgtggggctgagccttttgcaccaatctactaagtagaaattgtatcttctgttttcaatttgcattatgtttattatgagtaacattgagcatcatttaatgtgtgtaaaagtcattttattttctgtcatctgtccattttatttgcccacatttatatgaaccttataaaatccttttttttctgagggacatctaaatacttttcaccagctaagtaaagtaggtctttgtcagatggatagtgaatccattttctagttgctagtgccatttattttattaattaaacatttttctcaagctgccatgtttccttagggcagcctcaagtgggtgtgagggttgcccaagccaacatcaggactgaagcatcaacaaaagtcctcgttctagccttatcctctcagaaatactcattctggctgagtcaggaaggaagagtatttgctgaagaaagtagtgtccccgctaatccttaaacatatccctgtttaaatgtatcaccccaaagcatcgtacattggatttttatttttttgaatcaggtcctaattcctggggaaggataccagacgcacaggagccacgcaaggtaaatcaatcattatgcgcagcagctaatcttctagcatgaaatgcaaacaattagatttctctggcatcctcccttggctatggtctggccatggatgggtcaggctcaaggtgagacggacacaggaaaagatcaatgcaagacctgttgtgctggctgggggccgtcctccctagagggaggtcccgtttcccaggacacatgccatggcaacccggctctccaggtgggtcagaaagaaggggtctcagcagaggcctgaaacaggaaggaagtgaagcccagaagaattcagaaagccctgtgtgtctactcagtaaataccggcaggaccgtgggagagacactgtggagcagcaaggctcggggtgattgctcagtgagcttctccacctccttgtgaggagggtgctcagagaagctgccccagtgctgggagctccgttccaggtctcaaagaggcctgtgacacggggcagttggagggcagcttccaatggcacagctgcgttaccccattgctatagtgcttttcagatctgtgtgactgcccctttgcttacgtgggattctgctttgtgggacctgtgagggcacacatggtgccctgtttgccaggctctaactctctggcggcagctccaccactcctgttcctgagggtggtactctcgatccgctgctggaaacacagtgtgccccccataccccaaacaccatgccggagctctgcgccctccccacttggaggctttgttcaacccgttgctcttggctggattcccctctgtggcagggtcatgcctcccagagaaccaggtgcaatcaccctgactgtgtggagctgctgttaggccaccaacatttccccaggggcacccaccgtcccccaaggggtacaaaggagccggctcccaggctgcctgtgcttcctccctcagaagtctttagaggcctcagcaccacaccccgcccatgccaggcctgtcctctgagaaggcggcaagccacaccactgttgagcgtcacgtgtgaagccctgtctgtggagatattaaccttggcatgaccttgtcattctagcaacctgcatcagccattctctctgggagtggcagggcccaaaggaaggcggcaagtgacaatggcacagcttgtccagcccctaagctgcaggttcatggggctgaccacagcaggacttctctgatggggaaaagccactgctgccctccccacactcaaggtaactgtggcttgcaaccacagcccccttcctgccagtccagcagacctgcagccattgggagaggcagggcaagcagagtcacaattgggccaaatgtcactgaatactctagtctcatctaaaaaccaggcatgggcccacccaaaactgaggcgtccagctttcctccaaagtcttggtgctttctggcaggtacttaacgtaagtttggtcagatctttttaaaagccaataatacactcataacctttttaaagtattctggagtttgaagctttgcatgttttaatgctaatgacagtgaacgatagtcccagcttccaattatgctggaatctcagcaatgagctggtagaggcagggattaccctagaacaaccagggctgtgcccagggtgattgaatcctgctgcaatcctaggagggtggccaaatgatggcaaagaggagactgtggtgggcctggcctggcagggatgtgtggctttgggatcctagagccacatggtacatgagcagatggttttctcgaggctccagctcagcccaggtccttgtgtgctggattcaggtgcttgttcacagtgactggcaaggcctgtgcgtgcagctatgtttggttgggcccaggctgcacagcaccttacacacagtggggcacaaaaaagatcctttctgtgagtgaacaagcttcaggcaggtgagccttcagcgtaggcacaagtatcagcagtagatcagaagggaaactcatcccaaggaccgacgaccctcccagacaaactggacacgtggcctgggctggaagggagcactcaggagtgcaaggctgacactggcagaccagccaccgatgaggttgtggagaaggtgtggcttaggacaacgccactgtcccggccacagctcacattctttgatttatgttcagccagtgtccctcggtttgcctaataccagcttcccagcaagagcttcttagttgttgaaaggtgttgtactcgattgccctaggttgacatggcatcctgcctctaagagcagttgctagaaaacgagctaagacggctgcacccagaggtatgaagagctgtatggggcaaccttctggtcctgtatctggccctggggaaatcacacagcagagagggaaggttgaaaactgcaggggaccagtcacagccctgtcccttgtggtgtgtgggacttgatccaaatcagggcagaccctcagattccaggtcagcctgcttagttgtttggggtctgaaatggaaactgacctctctgcctctgatgttggggacccataggtccctatgcaggtcagaagaggagatccccaaaagccttctgagggcacagcaaggcaggagttgctgctcaccacccccatcctgaccccagacccttaggtgagcaccaatgtcccagctcagcagtcgggcaggagttcccctgttctcagcctgtgcgttctattcaggacctcaagggattggaggaggcctgtggctaggaaggccctctgcttcactcagtctgctgattcagatcttaatgccacctggaaacacccccaaccccgaacacactcaaaaatcacatttaaccaaatgcctgggcaccctacgacccagcctagttgacacctaagattcaccaccacactccgcgtggatggagatgccgaggtctcttaagctgccttgtctctgtcctactcttccgcagcacccagcagtggtttggagggactaatgccccagtggtcaagggcccttcagccttggtggagctctgcagtgtgggccatttgtgggaccgcttctttggcctgcagtttggggacaggatttctagcctacaggtgagctgtagagtttttcaaacatcctcaggtcctcagatggaaagtctcgcatttgtaaacaaatccctgcatttctgggaactcatcagatgcaggctccagatgtcactattgctattttctccctcatttctccctcccatctcctggggtaaataaaatcctatgcagatcccaaagggtggcttggcctggccagctctgccatggcagcaggcctggatggggtccagatattaaacaagaagctgcaggacgcccacccaaggaaggaaggaacccagctgcagagctcctgagaggagcaggttcccagccaggaactctggctagaatatactgttcatggtctcccatcatttgaaaaagcgtatgccttcgggacagggattatgatgcatgtgtcacagattctgatcctgtcactccggcacatggtacctctctggctcctgtacagcttggactcgccatcggagaccccagggtcactcagtgtggttcataaaccacaaagagtagcctcaaagccaaggccctttcttcccgtctctcccctctcctcaactgtagatgttgaatcactctgtgaggatgggcaggtacttagacctctcttgtgcctcagtttgctcatctgtaaaataggaacatcagagagcttaattcttagggcttggggaggagcagctgaaatatgaaagcagtcctgttagcatcatgcctgcccctgcggagcacccgccagcatccagctttgttgttgttgctgctattattattattataccccaacccattttcctcccccttcccctctctgtgctctgtttcatctgcctgttgggttttcctttctctttcccactaggcagcttcagggaggtcgatgtcctcttggcagacaagggttcccctccgatgagcagaaagacactgcccatgtccagcaccacccccacagcaggcttcctgccacggcgaggccataggccctctcaggcagtgtccctgtgcttaggcagcaatgactgctgggtggcctgctcccttagagggggctgaccactgcactttccctgggggcaggtttggccaggagcaatgtgtgcagtggctgcacctgctgtccctctccgtggtctgctgtattttcatcacccagccacttatggtaagaaacaccctccatggtagaagtgccttccatcagcaggggacctagatgggaaggggaaatagaggcttcattttggttgtgtatgacttttctttataccctgatttcagctgtggttggagagaaccaggagccaggctctgtgctaagctgcacatgggcctgttctttaatcctcataaaaatctttgaggagggtaccactttaacccacgttttttatttgaggaaattgaactcagagaatttaggtctcttgggcggggccatgcctggtgagtagttgggctgggaatccaaggcagtgactactggtgtctttaaaactgggagatggagtcctgttcatgattaggggacgggaggacagctctgtgtggaatgaacacagacatagggcggctctctgcgctgtcatgtttttccttccaggtatgcctcatggccttgggttttgcttggaaaagaagagctgacaaccacttttttactgagtctttatgtgaggctaccagggatctggactctgaattggcagaacgttcctggactcgcctccccttctcttcaagctgcagtattcctgactgtgcaggcgaggttgaaaaagtaaaaaaaattacctatgcagtgcaaattgagatttaaaaaactactttatattctatcatgcatatctgaatgtaggctttgaattcagattgggttgcatctttggagacccatgggatgtcttaatttcttatgcttctttgcacatacctgtatgatagatgaacacataggacttatttttttttaactccaatcctaaagaagttagagcatcaagaaaatgagcatattttaaaatactgaagcaagtaagaactctaattcttggccatgattttggagaacttttagtccatttgcccttcagtgaacccacagaaaatgtactcctccccatccttcctctctccctgccttcatccctttgtcccttcctccctccctttcttccttcttttattcagttttgcctgttgtatgtgtagcattctgttgggcagtgtgaatgatatgaaggaagagagaggtctgctggccaccgcaaagacattcacaggctcattgactaagcacctgaaatgcatgtgcaattctgtactcttgtaataaccacaagtcacttacgaccaaggacccaatcccagtgcattgagagtcagaccccggtctgggcctctcctcatctccaccctcctcctcgcaaaggatcctaataaactccatgtctgaggacctgtctgaggcctctcagccctgcctaaaaccaaggctgctgctgctgaagatgggtggtgcacacaggctatgtactagtcattatgctgttttacatctacactgtatttacatttatcggatcatttgttccttataacacctgatgaattaggcagcatccctgcaccccatttaaagatgaggtgaagcaattagacccaggctacactgcagtaaaggggagtctggggcccaaacctggcccaccttgccctttcctcctgcaccccccgccctgcagcaccttagctcttgagaagcaacgttgcccttgttccctcatacctgttggatctcagctttcctttctgcttggaaggctctccttcctcttctcccctcgtacagctgtgccctgctgtgctgccagtttgttcattttctttctatcatcccaacctcagaggtgaggctccttctgatgaattcagcctgatcctgagggccaggctggcatctccaaacctatgcatggctcattagcatcttagagttggggtgcccccctacacccaagcctccccacggatctctccgccacacgtgttcctttctcagaacagcacaacagctgaagggagtaacttaagccccaacactctgcatgtgcagctttatattgttcacattcctgctgtcaagttcctagaagcccagagtctctaggaggaaggactgtctctggttcctcagatgtccccagtgcctgatccagtgaatgtgtgttgaatgaatgaatacctacaatgagttcacttatctggctactgttatgccctgtcacgaacagagtatgaaagtaaaattgatttttgaaaaaagaaaagaaaggtcatttcttgctaagactatactttaaaatgattttttcataccttgaaagtctctaagagaaaatactgtgccagtgcccaagataattgctgctgtaatttgacagtagtagacatacccctcgtgtacagcagctctttgtaatagcccaactgcaatccctgccaaaaaaacttgcctgggacatgagcagatttttaaaaatgggtctacccccatctctgatcccttccccaacaacctggtctatgttatccatacaaagtacctctttgttcccaaatgccaggctgaaggcacagcacagcaatgacacattccttggcttggcaggagcaccaggggcctctctccttccacccaccagcccgcagctcacagcactcttgtccctgacaggtcttggctgcccgacaacaagctcgccacctgcgctgggcgcatccaccatccaaggcccagctgaggggcaccagacagaggatgaggagagagagtcgcacacgggctgccctgaggtgggtggcggcttctgtcgggagggcttgctccactccagctcccttctcggagggagtaccccactgccgctggtcctcctgggagattgttctcctggaggagtggggagtggaggtggggaccaccttgctgtccccagagccatccttatttatataacaacctgtgctgcccagcagatgggaggaattcagggaaacagaattgaagtcagaaaactcagttccacaatttgcccatgttgagaagttgattaagaaagcttcctcctctgggcctcagcttcatgaatccagcatggattcacacacacaattggatttcatcccaccccatacgtgtgcttagcacatggtctgggacttctgcttctccagctgggacacacaggaatgtggaagctgtaagataaatgcaacacctcttcttagggcatggatttagcccagtgacaggttatttaaaaataagtttaatattcagatatgcacagctgtgttatggttctcataaaatattttgaattcttttagataaaacacaaaccttaagaactatcatgctgtggcaaagctctccaacttctacctccaacacatttctctcagtggtaccatccccctcccatcatggtggtgctggatggcagccaccacaaggagccttctctaaatgctagctaaaatccctcttcaaattcggaacatgaattcggtctcctaccaatctttctcatgtagtttgtcaaggacttgggaatttctgatagttttttaaaaaatagcatgtcacagaagcacttccaaccatcttccttaaaaaacaatcccttcatacagtgtggcacaccattagcttccccttaaatattttcatatccctttccaaggagaagagctgcggttgtgttaggatgtcacatttaaaggagagtgggagaggaattccaggaagatggagcagtggccaagttttttaatcttatcaaacctcctcataaaaatagagtaattaagatagcaaaaacaaaacccatagaaaacatgcacaacaaaattaaatgagatggcccccaccacacacacctccaaaggcactcaggtggggaccaaccagagagtgcacccaccctatagcttagcagctacggaacatggtggcgggaaggatggggtacctgatgtatctgagaatagaactccaagctcctgtaggtgttgttcactgggagtgtggtgggcgcatcttggaggagtttgcagagtcaagttcacaggtgagtgcaaggtctggaggtctggagctgctgggccagctcagccctcagaactaaccaaacccagctctgccaggacgtagccctctggggtggggtggctgggggcgctgctgggggaagcatccaaaccaagcagaacaggcccagagaaagcatttaggaaacaggcaaaactagtaaagtattaggttataaaattaaaagacaaaaaccaatatcatatttatatacaagcaaaagtcagagatttaatacaagaccatattcaacaaagcaaataataaatacaacaaaatacacttaggcataatcttaagtataagtttctctaagatttcagtgaggaaaacttccctatgacttaaaatccagacacaaaaagggaaaataaaagtaaattggattacataaaacttgaagaagagaaagaaataactcctacgtaaaaagaaactatttgtaaaataaaatggcagtgacaaactaggaaaaaatacttgtaacaaagttttaatattcttttttttttttttttgagacagagtttcgctcttgttgcccaggctggaatgcagtggctcaatctcaactcactgcaacccccgcctctcaggtttaagcgattctcctgcctcagcctcccaagtagctgagattgcaggcatgtgccaccatgcccggctaattttttgtatttttagtagagacagggtttcaccatgtaggtcaggctggtcttgaactcctgacctcaagtgatccacccacctcaacctcccaaagtgctgggattataggcatgagccaccacacctggcctaaaggaccagcaactctttaaaacaaaaaaaaagtggactggaaaagtgaacagagagttcacagaataaaagaagttcaaatggccctttcacttacagtaagagaattgcaaattaaactgtgaaaatccaaaaatgtgaccacatactctgttagtgaggctatgtcaaatagagcatttcacacagtgctggtgtaaatgcaaaatggtacagccactatgggggaaatttgaagtctctacacaatgatagattcatttacgatttatccagcatccacactttttacaatcactcttacagacacagtaagtaaaacatgaacatacccacacacaaaccaatttatgtgggaccttttgtaatgagaatatcctagaaagaacccacacgtcttgctggagggacaggaacacagtgtagtagtgtccagctatgtagaagcatgaagactacccctccaggctcctagggagaggcctgcaggattcgctgcaggagggaagccaggtagaggaaagcgggtatgctgttctgcccactgcttaatgaaaggggacaagaatatgcgtgcctgtagatccgctcaccctaaataaaacaagggaaaggcaatccaggcacctttaggaaataataatagttacttatggggagagaaggaataagatttttttaaatctgtgttaaggttaaaaatttgaccatataaacctagtctctaaggacggaaaagaactaggggaaaaaactctaaagctgttttcaccaatcatattgttagtggagcgttagtatctttattttcattgttgatttattgtggggtaaaggaaatgaagaattctgttattttctaattctgtcattcctggtatcctttaaaagtggaattcttgatatgagagaaagaaggtacagatttgagttcaaggaagtcaaaactctgcagtcctgaatttgaattgaaagtataggtatggaatcatgtgggtttttaaaaatattttcctagatttttccagcaagaaaaggcctagaaacagcccagaagcaacacacacttttagcacctagatttggtccaccaaaaagaattagaagtaactgggattcctgatttgaagttggtgatggaaaatgtacaagatgaacctggaatgtttcttaggcaagggagcaattaataactgctagagtcattgtcagaggaccaagaagccagtttgaagaggctcacattggtcaaacatgggataatttgacatcaagattagaaactactgaattgaagttcatgaaatctatctaaagccatgagctggtaacaacacccacaatgtaattgatcaatgttggtggacactcagaaaccaactttataaaagccagtgaaagcctgcctttcctatacagaccatacccctgggaaaccacataacaggaggggggatatttctctttagagaggaattccagctaatgaatggggaccaggtaatagaattagagcctgaccatttttgcagttttaatgaagtaatgaatctgggcattgctcattaacagtggtcaatataaaagagagaaggagagagagagaaacatcagacattatgtgtttcctcgtgggaaaacaccatcatctatgaggcaacctacccaaaacagtccaatcttaatctgatgaagttattttgccaacttgtagtttacagtaagagtatgttgatatcaccctggaaagcaagacagaaatctatagtacaaataaccacttgctcaacaaataaatcgcaaagaagcaaaaataaataaagatgatacctatggactggaagagacacgaggaggaaagtaattaatgtaattcaccatattaatagactaaataagaaaaaccacatgctcgtctcaatagaggcagaaaaagcatttgataaaattcaacattaattcatccaaaaaaaagaacctctcagcaaactaggactagaagtaggaatagaaaagagttccctgagctaataaagggtatctatgaaaactcgacacctaacatcatacttaatagagagatatcgaatgttttttaagatatcaaacaaggcaaaaatgtcctctccgatcacacctattgaacatcacattggaagtcctagccaatgcaataggcaagagaaagaagttaaaaacgtattgatttgaaaggaagaaataaaaccatctaatggcaaatgacataaattttctttgcagaaaatcccaaataatttacaaaaaaaaaaagggttctggaactaataagtgaatttagcaagtttgcaagacacaagtcaatataaaaaagtaaattatattcctatataccagtaatgaacaattgaaatttaaaaaggaatactatttacaacagcaccaaataaatgaagtacatggatgtaagtctaagaaaacgtgtgcaggatctgtatgttgaaaaccacaaaacactgatgaaagaagtcaggaagatctgaataaatggagagatagactgtgtgcattgattggaggactcagtaatgttcagaagtctattctttctaatttgatctgtagtttcaatgcaataccacagctgtttttttttttttttttttttttttgagacggagtctcactttgtcacccaggctggagcgcaatggcgcgatctcggctcactgcaacctccgcctcccgagtttgagctgttctcctgcctcagcctcccgagtaactgggattacaggtgtctgccaccatgcctggctcttttttttttttgtatttttagtagagatggggtttcaccgtgttagccaggatagtctcgatctcctgacctcgtgatccgcctgccttggcctcccaaagtgctgggattacaggcgtgagctactgcgcccggcaaaataccacaagcttttttttacagatattgacaaactgattctaaaatttatatggaaagcaaaggaactagaatagcctaaacaattctgaaaacaatgagcaaagtcagaggacgcacactatctgaatttaagacatactatacagctgcagaaaccaaggcagcatgatatttggggacagatagacacgcaaatcaatggaacagaatagagaacacaggaatagacttacccaaatatgctcaactgattttttggcagagagagaaagatgatccaatggaaaaaggatgatcttttaaaaatggtgctgggggccgggcatggtgactcatgcctgtaatccaagcactttgggaggccaaggcaggtggatcacctgatatcaagagtttaagaccagcctgctcaacatggtgaaacctcatctctactaaaaatacaaaaaattagcatggcgtggtggtgggtgcctgtaatccctgctactcaggaggctgaggcaggagaatcgcttgaactggggacggggaggttgcaatgagctgagattgtgccactgcactccagtctaggtaacagagctagattgcctcaaaaaaaaaaaaagtgctgggaaaacttgatattgatatgcaaaataaataaataaataaaccccaacacacatctcacactattatacaaaaattttctcccagggatttaaaagccgagtttcatttaaaatcttctggcccggcatggtgactcacgcttgtaatcccagcactttgggaggctgaggcaggtggatcacctgaggtcaggagttctagaccagtctggccaatatggagaaaccccgtctccactaaatatacaaaagttagccgagcgtggtggcacgtgcctgtagtcccagctactcgggaggctgagacaggagaatcgcttgaacccaggaggcagaggttgcagtgagccaagattgtgccactgcactccagcctgggtgacagagtgagactccgtctcaaaaataataataataataataaatcttttgcaaattgaagcactcaggtacctacatacagggtctgtatggatgctaacttaaaaactcttcttacagagacatttccatggacatcctcatgctgcttctgcttttgtgtgtaatatatgggagattttcccaagatgaatactccctcaatcaagctatccggaaagaatttacaaggtaggaggtttgggtaactcttccagatctggggccattgcactattccatagcctgtgtgcaccttccccatgtttcacatcccacatatgaaatactggaaagattgtcaccatttccctggtagtaataaaacccccttccattcacagactttggacacgttcttagcatctcgtttggggtaaatagcaaaacaaggatatttgaaggaattttaagttctgtgccaaaacagggtcttgcagtttcttttttgctggagacctcagagttcttctatcaaagcctatggttgcagttcgtaataactgacactcaatttctaacagtttttttttttcctttttgagacagttttgctcttgtcacccaggctggagtgcaatggcgccatctcagctcactgcaatctccacctcccaggttcaagcgattctcctgcctcagcctcccaagtagctgggattacaggcatgtgccaccacgcttggctaatttttttgtatttttagcagagatggggtttcaccatgttcgtcaggctggtcttgaactcctgacctcaagtgatccacccgcctcggcctcccaaagtgctgggattacaggtgtgcgccactacgcccggccttcagtttctaacacctctcaagttcttgatcatttctcaagctgttcatttgcttcttcctccttctttctataagtagtagatgttgatcataggtaaatctagcagaactgaaaagtgtaaagcagaaaaatttccgtgataccaccaggcaaaggcaagcatgatagcattttgttgtgtcatatttcttttccatgtctcagtgcttctaaaattgggatgcatattgtcatcaacaggtgcatttaatgtagtcttcttttttttgagagttgttcttgaatccatggttaggctttattttcacctgccacaaacagtcagtctgatagtcctttcaaggcagtgtggctttgaattataaagtgcatgatatgaaataatattggttctttgctatgatttcaatgctggtaaatacaataattcagtgtgttccaggagttaccttatttactctggtgaatatttaaagacacatttatgcagcaactctatcagtgtgtttgttgcctttgactaagtaattcaatttgacgtaaatactttttggttggattttttggcagaagtgagtggctggaaagtcaatttaatcttatcaattatttcagaacatatttatctttatttttgtgagagagggttattcatacgcagcaagataatggctaatggatattgtcccctttgtcagtgttgtgacccactcgtaaggtaagacctggaagtcccagtgctatgagtctgggtgttctgtagctcagtaatccaagttgttttgtttttttttttctgctgagcattgtaatagtgaaattaagtggaattttctgcctcctcatttgtgaaaccagcagttatttccatccatgaccaacttttcagctctcctatccgtgcaagtgcacagcctgtgccagtaggtggtgctgtgtgcaaaacaaagtgataatttgggtcctcaatggaaatggaaatctaaacatgaaaaacctctggcttttgctagtttatttttcatctcacatttcacaagtcaacattatttgacatatttctcatatgaattgttgcttcttgatattcaaatcagaaatatcgcagctgagataatgtttgtgagatctctcaggtgcacatgagattgatgtgctcacattcacaactcctggatttacatagaccttatgtttcccatagggatgcaaaacctcactgcctctgggtgctctggccaccaggcagggatattcaagtatcctggttggtaatggaatgtttaaagtggaccctctccgtctcaccccctagcccccaatacctaatcctgaaacatcaacaacaacttagggtttggcatttactagcattccagatagagaagctaaataagcccaggagtggaaatggatgaaacagagttccgagactgggcccccaactcatgtttggttgccaggtgactctggcaagtgctcggacttagcatcttcatctataaagggagggaactggactactgagtagtcattgcgttcttggattttgccatatttaagttgtatttgaagtgtttctgaacttatgaaagacttcatgaagttccaaaaaaaaataataaaacaaaaaataaaccagcaaataaagcaccaatcaatgaagcaagcgttctatccaagtgccataaaagtaaaataacagctgattttatcttttgcattgtttagccagctttgtgggcttattttatataattgcggtaactaatacagacagggccagaatactcctggctcatttggttcactacctgcactttgggtgtgccaggagtgaggtgtgagatgtctgcagtctggccattgggccttttggctttgggttattttcagggctttttaacttagtttcttaatgttattccaatagggaagcaagtgtcaagaagtgataccatttccccgaaagtggtgcaaactcaacatggctataatgtctatactttattctttaaaaacacagaaaatggatcatattagttgctataaatgtacaatgtttgtcgtcaaatcatcttgcttcccacagcagatgctcaacactttcctctgttgaaaattcacctccagccatcctttgcctctttcctaccctcccgcccttttcactgcatctctgtgccccctggctcattcttcctttcctttggcgtgaatatttgcagagatgtatctgctcaccttatgcctcccatctctgtctccatctgtgttctcctttcctgatgcctctctgttgcttcattccaccctctgggtgctctggcaggcctccaatttgctctgcatttgatagtttgacaaaacttgtagagaagtccagagttaagaaccagcacccaataaaagacctgcaaagattaagttctaaagatgtataaaccaatgaagatcaaatacttgaaaggataagagatcatttcttcgtaagaaaaaagaaataaaaccagtcagataaattaattcactagacttttactcatacatgctatggaaattttttttttgagacagagccttgctctgttgcccaggctggagtgcagtgacgcgatctcggctcactgcagcctctgcctcccgggttcaaggaattctcctgcctcagccccccaagtagctgagactacaggcgcccatcaccatgtctggctaattttagtgtttttagtaaagacgggggtttagccatattggccaggctggtctcaaattcctggcctcaagtgatctactcacctcggccttccaaagtgctaggattataggcctgagccaccgtgcccagccatatggaaattttcgaacacatttatagtatatacagattattggttgaggctactgcatctctttattactctatacactagtgacatttatttgtctttgatttttttaatattgtccaattattgtcatgactatcaggtttttaaaaactttttctaaattatctgcaaaatctgctctgaatcaacagtggagtgtccgttctacaccttacctgtaaacatagtctttgtggtgtgctggaaacagttaataactggagaacaaaagcactgatttatagcatctgccagccaatttccgtggtgtaaatcctcccaccatggtttttttgtttgtttgtttgtttgttttagatgaagtctcactctgtcactgaggctggagtgcagtggcatgatctttactcactgcaacctctgcctcctgggttcaagcgattctcctgcttcctgagtagctgggattacaggcgcgtaccatcacgcccagctaattttttgtatttttagtagagacagggtctcatcattttggctaggctggtctcaaactcctgacctcagatgatatgcctgcctcagcctcccaaagttctgggattacaggcatgagccaccacgcccggaaccaccatggtctttcacaccaccaatgtgacatcactgaacatggagttgggaggagttgtgcaaaattggctctcacagtaagagtcggctccaggcctgctgtctacagcccaactttgctctcaagcctcgtttaccaaagccatggccatcatctgaatgattcatagtgtgttcattctttggagtagtctggatctggtgctggaccaggcattcaactgtgtgtacttgggtgactttctaacttcttctcaccttatgacaaaattccttttcctgagaactattttggtctcccctttttgtggagagaaacctggatgaaacagccacatcagagccatttctgtttgctgagggcatgttgatgagcaccccatcctttccattcttcagtgactcttcatgggaagctatgtatgagaaagttttttagagttaggtgagaggtactttgctttctcgtaggaacacttgattttatccttttgcctctggctgtagctcagagccaaatggacaccctgctgctgccatgcacagccttggcctgtgcatgtggctttatagcagtgtctgagcaaactaaaaatgataaatttcattcatttgatgttatttcagtgctcccttaaatcagttccttggtggaaaaatgaagcatatctataaacataatgaagaagttaattggaaagaaaacagactagtgtttgtgccaacactgcacttcatctatgtcttcacatctgccactcacaggcatcttgggaggccagtcacatgctgcgcccagtcggcagtcagtgcagagagaggactgggtcttggtctgtgtgtcccagagcctcccttgtttaccctagccccggcgctccctctgcaccagccctgtggccccgacaccttcccacccttcaggcttgcggaagccctcgccgtcccctctgcctttaataccctctctcagatgaccacgggctccaccctcaccttcaggtctttgctagacatcaccacctactgaagcttccatggctgcttgaacatctgcttaccccaccacttgcctgtctttcctgctttttttttttcctccttcatatttgtcacaacatagtatatgtttgcttatttgtcttatttgttgcctgtttccccataggagggcagagaattgattttctgtttcccagtgcctagaagagtgcctgacacctagtagttgcatagtaatgtttgttgagtgactgatggagtgagcaaatgaacaagtgcttcacccgccattctctcttatctcctgctactaaggagcaaagtgagttccagggtttcatgcttcacgctgcaagcagcttgagtttaattcctgcagagtacctgaaatctgaatgagagaaaaattggcaagaaaacatgcttttgttctcacgtttcattgttcttgttgatgcagaagcaactttttatttttgttcttgcattaagaaatgccagaaactgcttgggtggcctgagaaacatcgctgactggtgggactggagtctgaccacacttctggatggcctgtacccgggaggcaccccgtcagcccgtgtgccgggggctcaggtgagctttccgtctcctcttcataggagatcatctcagaaaagctatcttgcagtgggtgaaacagtcactaatgctgaactgcagcactgcataggttcttgaatgaccatgcaggtgtaaggccggtggctctccagtgggtcccagcagagcatcctgttcctttcctgccagaacccattggccccatcccattacaccctgctgagctgcacgggattctccagattcctgtgcttcccaggcctgagatagacacaagggctatggcagagcctcaggagccctcaggctgatggggtgggaggtcaggaaatggaagattctagttccgtgtgcaaaataccctgacaaggaaacacaagaaccaccccaaaacagaggaagtgcaaggaagcttccagaaagaggtgaggttgatcccaagttcggaagaaaaagttaatatgcattttgcataatcccattccttgctcagcttttattttcaacccctttcccatgtttaaaaatgaaatatcctgggcgcggtggctcacacctgtaatcccagcactttgggaagctgaggcaggtggatcacgaggtcaggagttcgagaccagcctggccaacatggggaaaccctgtctctactaaaaatacaaaagttagctgtgtgtggtggcgcgtgcctataatcccagctacttgcaaggctgaggcagaattgcttgaacctgagaggtggaggttgaagtgagccaagatcatgccactgcactccagactaaaaatacaaaaattagccgcgcgtggtggcacatgcctgtaatcctagctacttgggaggctgaggcaggagaattgcttgaacccggtgggtggagattgcagtgagctcaggtcacaccactgcactccagcctgggcaacagagctattctctgtctttaaatttaaaaaagagaaatatatttgtccatattccttgagcagtttatttataattttattttgttgtattctatatagtctcttgggttgatgacactggagaaactttcaaaaaagataaaagagagcattctcatgtgacgaaagttacgaacaccatttgaacgttaacccttttccaggacaagtctggggaggttgttgctgccttcttagaatgttggttgtatccctaaaatggtattggaaggaaaataaaactctgacctctatggtagcaggtggagttacccagagccccacgccttttgagcacgcttgatgaggaggtttgaagtccacagcacacccagtcctcatcatcttttttctcctttcagcctggagctcttggaggaaaatgctacctaataggcagttccgtaattaggcagctaaaagtttttcctaggcatttatgcaaggtaagatgttccttttccttttgcttccaagaataaatggaattagagaagtctaggcaacattggggcaggaccctggcagatcatttgaacttctctgtgagttcagtggtaattggaattgtcagtgccggggctggggagagggcgagcctcgcccttccttccttcccctttatgaacactttcccaaagcctctttcttccttgacgttctgctgcaggtttcttcaattcactctttggccttagagactggcattctaggcaaaactaggatttttaatcaaacaatctaaaaatagaatattcacatatctttttctaatggggagggtatgccctgagacaggcattttacctggcatctcatgatggggaagtcttcaagtggtctaagccttagaaccatacacagctcagatgccaaccttctgtgggtagaaccttgatcctgtagcttgagctagagtctgtagaccacgaaacaggctgcagaacgatcctatgaggagagaagggtgccatgttgcaggacagagcaggtgttcacatgtggccaggcctggagaccccggattgcagggtagccttgggaatagtatctgtgtcttctgactgctggtttgttctgcagcctcccaggccattttcagcactcatcgaagactctattcctacatgtagtcccgaagttggaggccctgagaacccctacctgatagacccagagaaccaaaacgtgaccctgaatggtcctgggggctgtgggacaagggaggactgtgtgctcagcctgggcagaacaaggtcagtgagattcgaagggccggggctcatcctgcctgccaccgccactccagctctggtgcctgctggacgcagcgcatctgcagcaggtgcagcctcctgacaggcctgcgaggtcagcgcaccactgccaggggctccagccagacttgtcattgttgtgaatgatagaagcatcacacaggctcaggcctccacgtgggagagcacagagcaaacgttctttcaaaaagtggttgctagaacatctgtagctcatggaatataaggagcatttgttgcatgctgaccttgtgccaagctgggtgtttactgtctcatttaatcctcacctagctctgtggaataggccctgtgctacttttcccatgtcctgagggtgaggggtggaggttcaagtgcgtaacaagcacgaccccatgttgcagctaggtctgaggtcaggccgcctgccccatccagccagtcacactgttgtccacagccacccgtggctccccaagcagcatgcacctcacactgggttggagctgtgctgacccagtggtaacacggatggtcttagagcaacggggaggtctagacagttacaataatgtgagcctttgagtaatactctttaaaaaggaaatgatttaattgttactaaatacgagttagtatttagtaactgccttctcccagcttgtttgttccaaacagtggggtctctagaaaaaaaaagaacaatgaatattctagagtccctggggagagagagtggacatctctgcctcacatgggttggggtgggaaatggaggcctccgttctccaggtccctcctgcctgagggtcccctgggctgctgcagggaagagggtggggcaaggagagaggacagagggctattgatgaggtctcttagatacagagggccatctgtcctgccccttgaagcccaggcactgtgtgtccttgcaaagtctagcatagggtgttcccagcatgggacctgcagctgggagcctcagtagacttctgtgcctttctccctgccctgccctaccccagtgtgtgctgttttacaggactgaagcccacacagccctgtcccgactcagggccagcatgtggattgaccgcagcaccagggctgtgtctgtgcacttcactctctataaccctccaacccaactcttcaccagcgtgtccctgagagtggagatcctccctacggggagtctcgtcccctcatccctggtggagtcattcagcatcttccgcagcgactcagccctgcagtaccacctcatgcttccccaggtgagctgacctgcctcttgggcctcctggaggtgcacaggaagatggggcttcacctgggctgggcttctccaccagacaggactagttccctacccattcacctgcccctccggtcacactctttgtcacatccccttcttgcagcaagcatcacactaagggttggggcatgagacgaagaagacccccagtggggaaaccaatcttcacatgtgtggcaagggcaaatatagagctgtcttgaggtaccaaattcatcacgggggaattgggcctgatgtttagatccccccagggatttagctcaggctgctgtaacagaatagcctacactgggtgctttaaaaagagacatttatggccaggcgcggtggcttatgcctgtaatctcagcactttgggaggccgaggtgggcggatcacaaggtcaggagttcaacaccggcctggccaacatggtgaaaacccatctctactgaaaaaatacaaaaattagccgggcatggtggcatgcacctgtaatcccaactacttgggaggctgaaggcgggagaatttcttgaacctgggaggcggaggttgcagtgagctgagattgcgccactgcactccagcctgggcaacagagcaagactccgtctaaaaaaaaaaaaaaaaaagaaggagacatttacttcccacactcccagaggctggaattccatgatcaagatcaagcctggtgaggttctggcgaggtctctagtcctgggagatggccgccttctcacggtgtgctcacagaacctcttctttgtgggtatacacagggaaagagagcaagagagagctgtctagagtctctttgtgtaaggacactaatcctataggaccagagccccagttaaccttgattacttccttaggagccccatccccacatatatccacactaggagttagggcttccacctgtgaattcaagggaacacaaatcttcagtccacagtacccagggtcttggtgagatggaatatgtccacatagcttcactgaacaatccaaaacaccagaagtcactctgagttattccttgggaactttcctgattttctgcctgtagttgacttttctgctatgaagaactaagtcctgctgactcttcaggtcaaggttactttgctttagcagtgaagagaggggagtcccaagaggttttagactctagggactgttcagtgacccggtaaaggctgagatttgtgtagagctcagctcgcgctggtgtgggcgcaatggagggtgggagcatgggccactggtcagggtctgcctgggggagacacataaagtacttaccttgggcatcaaatttaaggggcaccacaaatacttggtaatcaaggtgaacagtattctggtgcaatatttataaacatcagaattcatatcaaaaaatcatattggacaaaatatggaaattgtaagcaatggcaggatcagttttcctgatagtttctttgcctcaggctccaataaggctcagcacagcactgctgttaaacaccttgcagcacccaaaagtgaaccctgctttgattatgtgtgtagctccttacagcgggccaatgggacacaatgcacataactccaacagaggacagagaagatgcataaagccctgctgatgtgcttcagttccttgcaaatccataactaaatttgagtttgggttagtgattaaaggcatgaatcaacaggtaactcaccactggagagagaatcacatagagaactttaagaaagtgcttataagggagctttagaagactttacttggctgagaaaactagtatatatatgtatatatagttcatatgttatctatttcacatgtacacagaaactcactcttttgagcagtgccaaggaaggactggaggatcagcatggaggtcgggaggcctggtggccgtagatgcccatactccgtgctttccctgagtgcagagaccatcttgggttctaacccctggcatggagtttctgtgagtgcttgacttgtggagaggcaccaaacaccccaagtgcctactgaagagcaagtttaggattaaacctctgcagaacaggaaatgggcttgcatcctagctactcaaaggtgattggcaggggagctggtcacatgtttagaccttcaaaaaacaatttatcagcattcctattgatcttgtttgtttacattctctccaccagctggtcttcctggcactcagcctgatccacctctgtgttcaactctaccgtatgatggacaagggcgtcctcagctactggcgaaagccaaggaactggctggaggtagcctctcttgtgtcattttcttttgaaaaataacaataaactgtttatatcttgaaaaaataatttaaataagaaattgattatgcactagctactgccaacattattgcagttttctccctctgtagtgttaatctcaaaacagcatttgagatcaggtatcatttagtgttgttacagttaccgtcatgtaccacacgaatttcagccaaggtggtggtcccataagatcttatggtgctaagaaatttctgtcacctaatgacatcttgattctgaccttgtatgtaggcctaggctaaatatgtctgtttgtatcttagcttttaataaagaagtttaaaaataaaaaattaaaacaaaatttttaaaaatagaaaaaacttttggaattaggatataaggaaaatattttttgtacagctgtacagtgcatttgtgttttaagctgtgttatcatagagtcaaaaagtttaaaaaaattaaaagatttttaagtaaaagggttacagtaagctaaggttaatttattactgaagaaagaaaaacgtgtttacaaatttagtgtagcctaagtgtgcagcatttataaagtctacattagcgtacagtaatgctctagggcttcacattcactcaccactcactcagtgcctcacccagagccacttctggtcctgcaagtgccattcatcgtaagtgctgatacaggtggatcattttttaccttttgtactgtatttttactgtatcttttcgatgcttagatatagttagatacaccagcacttaccattgtgtatgattgcctcagtattcagtacaggaacacgctgcacagggttgtagcctgggaacaataggctgtctcatatagcctaggtgtgtgggactgtctatgtttgcataagtgcaccctataatgttcccccaaggacaaaatcacccagcgatgcatttctcagaaggcatccctgtagttaagtgactcatgactgtaacttacaaacgcgtgtcacatggggtgccaggtaagcccttcctcaggagccatctgagggcctttctcttggatgttccagctctccgtggttggagtgagcctcacctactatgcagtttccggccaccttgttactcttgctggagatgtcactaaccagtttcacagaggactttgccgagcatttatggacctcacccttatggcatcatggaatcaggtacacggtgtgctcagggccatgcagatagaggccatgcactgtgatgccatccaaaaggcagaggtcacacaaactctagaaggtgcgagacaacagatttgtttgatatcgagagatgatgctctgagctggcagatgggagtggccaggacagtgaagggcctgaagagcttgagacatgctttgaacactggggtatgtggattctgcgtggagcagaactcaagagcctggaattcccccagtgcctccaggggacgctaaggggcacaggaagcaggtgttgatgcagcatggaggaaggaggctagcgctgacttgcttagacacaccattttctctcttcattctggcgacagtcataaatgcaggcagtattagccactctgcaagtgaagacaccaaagctcacagagtatcaggtccctcaatagagagaagtctggtttcaaagtccctgtacctccttcccctaggcagcccttcctgcagggaatggttccccacagggatgggggctcctaccaggaggaccaggcaaatgtgcacagatgggcctggacgagccctggggagggggctgatgagatggggcaggatccccccacaacagcatgggacgctgccttcctgtggtggtggaagatgagcccacatactctgcctccttgccctgctgccctcagatctagcccctccctaacccccttgtcctccttttcccatctagagggtggtcagggccccagggccacccccagggctgggtgagtcctatagcaacctagagaacaagggccagttcccctccatcttcaggccccttctccccaggtccattcatctgccccacaacctccctctcaccccttggctcctgtccgctgtgtaaggagaaccaggcaggatgaggctcgtttcctctacacttctgcttcctccaccagtgccccagtccctgcctctttgttggagatcattttgttgcaagcaagagaaactccctaggctagaggaaagaaacaggttctaaaggagcccaagcagaagatttggcttttctcctgaagtgaaagaatacatgaatctgatgagacagaacactcgcacaagcaaggcaaagcaactgtcactcacagattggcagggacagcagaagcctgggctgcatggtgagccagtgcccccacctcaggaaagctgaccagggtggacagagtcccgtctgtgtgtgtcccgacagagtcccgtctgtgtgtgtcccgacagaatcctgtctgtgtgtgtcccgcttgcaccagttcagagagcctggaaagctgcctgccctgaagtttcataagctgggggaacataacatgctgtgctaaagtgttagagggcatcctcttcttggaggaacatgaccagagcccacgctcttccatgtagttcctccttatctccggatattgcattcctagcacattcaacagttattgtgagaactataagcaataaaaggggaagagctgggctggccaaggccaaccagggacctgttctgcaggcacttatcagcatctaatgaaatctgcattaagcaattatttggtttactgtcttcccccacaaggctggaaactgcagaatagagaatgtatctattttgttcactactgctcccctggtaccaatattagggcccgatgaggactggctgcttaatttattggcatctctctctgggacagacagcaggcttcctggtctaccttttatagtatagctctgctagtcaacccgcttcctactatttgagttctggcttacccatgtaactgtagtcttgcatggtcctgtgggctacaatgccgacatgcctgacactcccttgcctgtgcttaaaggcccacagatagcggccagctttctgtctctcagtgcacagcttacaagagcatctgattagtcactgattggccagcaggtgtgggcctcaggaatagggggcagagtgaatgtaggatgttcttttcacctgatgcggacaggggaggttttctagaagcatgactagggcaaacatgaatctggtctacatactgacctggtgacttgcagtaaatagcctcctcctgacttctgaccttgggaagtgagttcatccttatatcccttttccccactgatgtcctatctttctcattatgttccctgcccctgccagaaaaacttacctggggagagcccctcttccctggggatcctttctagggcagatgccaatttccaattcctcaattagcttctgagaagagctgacatgtattgaggttagctcctgccaggcactgcataaattctatataatcacgtgtatgttgagctatccaaccatctaatgaaacaggtactagtatgccacccatctagaccgaggctctgaaaggttaagcaactggctcaaggtcactcacattgatataggagctgcactggaattggcctctggtcttggggtcctgggtaactgcattcctaagcacagaactataatgcaatggaacggccctccaaggacatggtccacattgtcctgacccaggagtgctcaaggcaggaacctgtatctcacaccattcagctctgttgctgtgttgctgtgtgttcagggccagcttttcagaaatgtgcagtgtagaccatgtttgtcttctgaggtgccctcatgtacccgtctctgttctggcaccttggcctctgcccacactacggctttccctcctaattccacttctgtgggcacctgttgtgctgtttgtcaaattattctctgtagagacagttagaggaatttagctctaacttcaatgtaggctgcatcccaggtgcaggaagaacgagtcatcttcaagataaacacaaatgactttctaatgatggaatttaacacccaggattaaagaactatgatttgagtgtgtgaaaatgaaaatgcacaggctttagaatcagcagacctaaaactcactcccagctcctctttgaccatgtgccattgggcaagtttcttaactttcttcaagtcttaataaggtagaactatgatacataccttgggggttttgctaggatttgaatgtgtgtgtgtgtgtgtgtgtgtgtgtgtgtgtgtatttgtacaggcacattcaaacatatccttggaacagcttggcacctagcagatgttccataaatgaaagtcataataatggcaattactcagaaggctttatggcatccctcaatcagatggaggcaagaaagcggcccttccactctgtccacaggaggtttatagccgtgttgtccaatagtcaccactagccacacatggctattgagaacttcaaatgtggctagtccaaactgagatgtgctgtgagtgtaaaatactcactggacttcataaacttagtatgaaaattaaaaatgtgctgggcgtggtggctcacgcctataatcctagcattttgggaggccaaggctgacagattgcctgagttcagaagttcaagaccagcctgagcaacatggtgaaatgctgtctctattaaaatgcaaaaaaaataaaaataataataatagccactatggtggcatgtgcctgtagccccagctactcggtaggctgagacaggagaattgcttgaactcaccaggaggcggaggttgcagtgagccgagatcctgccactcaagcctgggtaacagattgagactctctctcaaaaaaaaaaaaaaaaaaaattaaaaatgtaaaatatctcaataatttttatgttggttacatattgacatgatgctattttttatgattttacatgtactattttaaacaaaatatattataaaacaaatttactctgtttaattatactttttaaaacatggctactagaaaattctacccatagcttgcattgcatttttcttggccggtgctggctaaagccccattcatcccccattcaaccatgtgcggccctgcctgctctgaagggaacccgaggggtgacagccactcacagcttctctaggttttggttgtcagaagtcattgttgactttgtcccaattactgaggaaataaaacaaacagaaaaccttgattcattgcccatatagattttaaaccatccagctgtcatttcttttctcttgggcttataattttggtgagagcatatgagatcatacacccaaaagtactttccccataagcccctggtagggaggggagaagggagcagccttcctagaggccttgtgaatgtggacgagtccataaggctgtttgcccctgggtctgccatgccccccagttgtactatgtttgtctgttcacactgtttatctgagccgtagactctagagatataaagtggagtgcctcccgtatttgcaaggattacgtttttaaaaacctacttggaaagtgttggtgccctattctgtacatgtatctgggggaaaggaaataagcatgcactaaatacttctttgagtcccctctgtggtgatgattttcttatagcccagtagactgaggcgcagacagggagaacagacgtggggtggacagagtcccatctgtgtgtgcctgctagacctgctccatcctggtgttcaaagaaatggccaggccagaattcagagcaggtcttctcaaaatgcgttacgatttgtatttacccctagttccaactcattctcctctgcagacatctgcacttgatgtccctcggagactcatgggtctatataacatcatcaaatccaatgaactctttatgcatgactgacagctgtgaatatgtctgcacctttcagtgactggcatggcacactgactgttatgttcttctgtctcagagggctcgatggctccggggaatcctcttattcctcttcacattaaaatgcgtctatcttcctggcattcaaaacacaatggcatcctgctcctccatgatgcgccactcactccccagcatctttgtagcaggggtaagaactctcccctttatcaggtgatttcccttgtaaaccattgatctgtgtactcgtcagcctttctcaagggaaaaacaaactgctctcaaggttaaacaccgtctagaattccagtcttctaatcccttacagtgtggttttagataactgatatcaatagttacatagtaagttatggtcatgacaacaataaccatgatttaggaaacacttgctctgtactataccttacaacagcatgttattattactaatataagtagttattatcacctactgagctttctctaagtgccaggaatggcactttgggcctctcatagattacttcgtttaactatcacaaccaagctatggacaggcacagttcttcttagaagattctcaggatttcctgtctcaaacaacagggcacagccaagtcttcatccagggctagccctgaagtctggtctggagggtgaagctccgaatcaacaggtacagagtacagcttggagccctgatgaagttcctggggtgctgttgattccgatctggtcccagcagagaaagagctttctccaacctgacaggccctagtacagcaaagaattgcaatcagggctgagggaaagtctaggccaagtgccctgagttaggaggctctggctgtcaggatccaagccacacaggacaccaagcacaggtctcctgctccagggaaggggttctgcaagccctattcaccttacactggaggaacatgctgagcaaaccagggcagagagaacgaacctgagagtcagagagagcagcatttgaacctggctgtcccacactccagctcactgttgcgagcaccagccatttgcccaacctctgcctccagaaaaagcattaacgacatttgccccgaaggttactactggcctttgagattatatgcatgtagaatttatggagtgattaaactagtcattattaagaccatttagcaacatgcaaaactgctttttttttttttttttttgagatagagtctcgctctgtcacccaggctggagggcagtggtgcaatctcggctcactgcaaagctccgcctcccgggttcatgccattcttctgcctcagcctcccgagtagctgggactacaggcacacaccaccatgtgtggctaattttttgtatttttagtagagacggtgtttcaccgtgttagccaggatggtctcgatctcctgacctcgtgatccgcccgcctcggcctcccaaagtgctgggattacaggcatgagccaccacgcccagccaaaaatgcttttatgtaaggaaaaaaaagcccagaatataaataatttgtgtccaaattaagtagcagaattctaactgtgcagcaagtatagatgcataggcatcaaggggagaccgggagaccacacagctcaatttgtccagttgtagactcatagattgtgctttctttcttctgagttccactgatgtctgatttcacttatggagtaagtaatactaaaacgagtcctagtgcatttgtagggaagtctttgggtacctgtccaggcttgtacatgaatccagcaagcacccacacagaatgcagcccatgactatagctgcagctaggtagggcctctctgtaggcccgtccacagtctacacacacagccccatgtggacctatgggacgaccgcctgatggtctgacatccaggctgaaaaaatacttgtcagcaccagggctggttggagcagatggagtgagaagcatgaacggagccagtgatacaacccctcagatcccaggccaagttcccagtctgttacgacaaccaggaccatgaaacttaacctgaaccaaatctacatcaaaattggaaagccttcctgatgcttcctaagtgatttattttactaagctctggccaggtgcgggggacataaagatcatgagggagctgccccctcatggcaaccatggcttcctaagggggccaaaggccaggggagcaggccgcttgtcaccataggcagaggaggcagctgaggagaggagagggcactggcaggaagagcccttgaaagggaggagggagaccagccacagtgtgggaggctggtggggtgggaggagggaggcctgggagatgggtgagagggtgacatacgccttttgggttcaaaaccagggatgacatgattgatccacactcccaaaactgcccctccaagtttgtctctattttcaacatttggaagttgagtcttccactcctaagaagaggtgacaaggtcagtgctctctggattttctttctgcagctggtgggggcactgatgctggccgccctctcccacctgcaccgatttctgctctctatgtgggttctaccacctggcaccttcacagacgccttccccgggctgctgtttcattttcccagaagaagccaaaaagactgcctccttggcctttccaagtctgaccagcgggccatggcttgttactttgggatccttttaatagtctctgccacactgtgttttggaatggtaagtaaacacatccccaactttcaagttatggtttgtaaaagtttcatttgctgttggggtgaaactctggtccatgtggacagggccaggcaacacaggccagatctcatggtaatgaatccctgccgtccagctcacctgccctgggaggtcaggtccgtcaaacacagttggtttgactctcccttactctagaatagtccagcacgagagcagccaccccagggtgccacttcctccaggaagcttccctggcccccctcactctgcactgaatcacatcatttcttactgtgaacttcatctgcaatctcacactgcctcaggggtatctgttgccttttctcagtctttccatcttatcagagttgcactcccatcagccacctccactggacgtgttctccaggctagcggctgaaggaggaatggctccctgtttcacgccctcctactgacctgccactggcaaatctagtcatgtcatacatggcttaaactccttcagtggaagaagagtctcccccatggtcttgtcctattgcctggacttggggtcaacagatttagcaaataaaactggaacccagttacagttaagtttcagtaaacaatggaaaagttttcagtattagtaagccccctgcagcagttcagacatatttatgttaaaagttatttgttgttgacctgaaattaaaatgttactgagtgtcttatattttacccctccctgccgaggctccgacctgctctgcccagccagacccaggattgctatgcccacatcacaagggtgggactcatcacttctatttccagaaggccctacaggtgttcctatggaaggctcagggttgggacccctgctctgtgcttgactaagcctataggcatgctgtccacacttactgaacatgccttccctcggatccctccactgtgactcgttcagcgttaagttctaagacagggtcaatgtggtgttccctctagaagctctcccagcaccgattctcccctggacccccaaaggctctgagcatgcctcctcattgcacccattgtcttgtgctattggtttttgtctgcttttgaactctagccacattcctagcaggcatattggtgtgcctgccttctagggtagtagttcctgacacattgtagagcccactgcaagttcagtaaatttaatattcaagctttgtaagtggataaaaattctctgcagtccttaaaagtctactggtattctagtttagtagctagagggaaactaaaagtgattgctcatgttcacaccttgacaacactcaggcccgagtcctttgcttttatcaatgatcctagctccctactcttgctcatccatgaatgcataaatccatcgatcacccatccacacacctactcaccaaactagttacctgtccacctatccacccacccatccatccatcaatccactcatttgttcattcatgcactcactcattcaacaaaaaactaaagaatgcccattatattcaggcaatggcgaaacaaagataataactgcttcctgcctcagggagctcacagtccataggggaagactggcatatacaaataattgtggcaatttttatattttgaatacagtttttaaattggatatgtgatttgtaaatctgtagcttctccttttattctcttaacagcatctctacagagcagaagttgtaaattttgataaaggccagtttttcaatgttttcttttatggattttgctgttggtgtcctggctcaaatgaattgccaaacccaaggtcacatattttctcctattattttcttctagaattttttttgtttctttgtttttggtttttttgttttttttttttgagacagagtctcactctgtcgcccaggctggagtgcagtggcgtgatctcagatcactgcaacctctgtctcccaggttcaagtgattctcctgcctcagtctcctgagtagctgggattacaggcgtgtgccaccacacccagctaattttgtatttttagtagagacagggtttcgtcatgttggtaaggctggtctcgaactcctgacctcgtgatcctcccgcctcagcctcccaaagtgctgggattacagacgtgagccactgcacgtggcctttcttctagaatttttatagttctatgttttacatttaggttaatcatctgttttaagctaattttaatgtaagatgtgaggtatggaacagagttcctgttttttataaatgaatatccaatttttccagcacaatttttttgaagaatatttactccattgaattggctttacaactttgtcaaaaagcaattgactgtatctgtgtggatctatatctgggttctctattctactccattgatctttcctttagccaatcccatgaggtctttttcactctgtggcaaatcttaaagtagcatggatgagtcctccagctttgttctgttttgactgtaggtgttctagctcttttgcctttcaatatgttttagaatcatcttgttactatctttttaaaaaatcatgttggtgttttgattgaacttgctgtggaattataaatcaaatttggggggaattggcatcctaataatattaagcttttttgatcctagaattctgtatttctctccatttatttagatactctttgatttttttcatcactgttttatagttctcagcatacagatcctacacaatgataggcaattttaaagcctaactagaagtgtcctcaaagagcaagaaacttagatcagagactcatttattcttcctagggagaccaggaaatcttcatacaacaggagagtgagccttgatgagcagttccactcatggtgatgactgctgagagcagcattttagacagggggcatgcagggagggccatgctggagttctgggtcaagtgggcattatgttgaaaaggatggttggagtcaggaatggagggccttgaatgtcgtgcttaggcacctggatgctatcttctgagacaggcaggcaatattgcattgaggtctctgggtggaagagtcaggtcttgctgtctgccatgggtgtgttgctggtaaatccaggaggcctcagacctacacaccaatggcctaccctttcaggctcctgagcatctttgcagagttctgaaattttgtgaggggttcgagggatttggggaccaatcaagaacaaacatatgaccacaagagatgataacacacacaagctttatctgggtaatgttttgaagtgtttccatgtgggggaactccctcatacttcatgctatgaaactgtccacaggtttacagcgtaggggccaagaaccatccaaaaaggaagaagagcaagggcgatctcaggggagaggggcagcagagagagagcttaccccttagacgatgctgcttagcagcatggaggggaggctctgggtcagaaagctcctgaagccagcagcagcttggggccttataacattatcagtgggtaacagctgtcccctgaggttttgcagggtgtgtaaagctgacaggctctaaatggctaaaatgtttgtttgggtgtttttttttttttttttgagacggagtcttgctctgtcgcccaggctggagtgcagtggcgcaatctctgctcactgcaagctccgcctcccggattcacgccattcttctgcctcagcctcccgagtagctgggactacaggtgcccaccaccacacccagctaattttttttttttttttttttgtaatttaggagagacagggtttcaccatgttagccaggatggtttcaatctcctgacctcatgatccgcctgccttggcctcccaaagtgctgggattacaggcatgagccactgcgcccagccctgtttgggttattttttaaacaattggatgtgtaaaaattcgagtttgttaccagtaggcttttgagctaacagcttacagcctgcagtgaagaaataaaccacctggaggcttatagagcacatgttgagggcacaacaacttgctgagcccaagaccctttctggtctcccaggcacaggcacaggcctctctcctgaggctcacccacagctcagaatggttcaccaggggacactgaaactgagacacagactttacatatgggcatgcacatcgcgttgataatctcagtctccaaagttagatactgaaaacaacctttataatacaatgaatttccattgctgagatcatcttactgccatttagttcaattcaggagaggtattttcctgattttgctttttttcaccaagaaatcactattttaccaaaagctcgtaaagtagcatcatcagatataatctccattgcatagtttatcacgttaacaaagctctttatttaggctgctaacatgaaatttgtctttatttttttctttttcctagctgagaggttttctcatgactttaccccaaaaaagaaaatcttttcaaagtaaatcttttgtgagacttaaagatgtcactgcttatatgtgggaaaaggtcctcacctttctgagactggaaacaccaaagttggaagaggctgagatggttgagaatcacgtaagctgtgagatcttggattactgagcatgatagcacacactcaagatgatggtttcattgcagaattttgctttcagttatcaaagcatgagtatgtttccatgccaaatctccttgcaaagccacaaaattagtctcaatcatagtggaactcatggaattttcccgtgcaattctaaaacactttacagattaccaagcacattctcctgccttaactcactatatccttatagtgacctgtacagttggaaagacagagtttatggtcttccccaggacacagacatgctgtattctgtcccctgagttagtcatttgcttttggtgcctgctatcaaacccaaacttctatccaaaacatagagccttaggtgcattacttgagttcagtcaccccagacatgcatgtaaacaaatcaaaccaggcgtttgcacactgaatactcactttcttcatggctgatatattagtttgttttcatactgctgataaagacatacccaaaactgggaacaaaaagaagtttaattggacttacatttccacatgacttgggaggcctcaggttcatggtgggaggtgaaaggcacttcttacatggtggtggcaagagaaaaatgatccagatgcaaaagtggaaacccattataaatgatcagatcttgtgagacttcttcactatcacaagaatagcatgagaaagaccagcccctatgattcaattacctcccactaggtccctcccacaacatgtgggaattctgggagatataattctagttgagatttgaatagggacacagccaaacaatatcattctgctcctggccccctccaaatctcatgtcctcacatttcaaaaccaattatgccttcccaaaagtcccccaaagtcttaactcattttagcattaacccaaaagtccacagtccaaagtgtcatctgagacaaggcaagtcccttccacctatgagcctgtaaaataaaaaataagttagttacttcctagatacaatgggggtacagggattgggtaaatacaactgttccaaatgggagaaattggccaaaaccaaggggttacaggccccataccagtccaaaatccaacaggtcaatcaaattttaaagctccaaaatgatctcctttgattccagggctcacatgtaggtgatgctgatgccagaggtgggttcccatggtcttgggcagctctgcccctgtagctttgcagggtacagcctccttcctggctgctttcatgggctggcattgagtgtctgtggcttttccaggtgcacagtgcaagttgtcagaggatccaccattctggagtctggaggatggtggccctcttctcacagctccactaggtcccttccacactgccctagcagttctccataagggccccgcccctgcagaaaacttttgcctgggtatccaggcatttccatacatcttctgaaatctaggctgaggttcctaaacctcaattcttgacttctgtgcacccataggctcaataccacatggaagctgccaaggcttgggggttccactctctgaagccccagcccaagttgtacaatggcccctttcggccatggctggagcaactgggacacagggcaccaagtctctaggctgcacacagcacggggaacctgggcccagtccactaaaccacttattcctccttggcatccaggcctatgatgggagaggctgctgtgaaggtctctgacatgacttggcgacattttccccatggccttggggattaacattaggctgcttgctacttatgcaaatttctgcagctggcttgaacttctccccagaaaatgagtttttcttttccactgcattgtcaggctgcaaatttctttaacttttatgttccatttcccatttaaaacggaatgcttttaacagcacccaagtcaccttttgaatgctttgctgcttagaaatttcttctgccagataccctaaaaatcatctctctcaagttctaagttccacaaatctctagggtggggcaaaatgctgccagtctcttgctaaaacataacaggagtcacctttgctccagttcccaacaagttccttatctccatctgagaccacctcagcctggactttatttttcatatcactatcagcatttttgtcagagtcattccacaagtctctaggaggttccaaactttcccacattttcctgtcttcttctgagccctccaaactgttccaacctctgcctgttatcaagttccaaagtcactttcacatttttgggtatcttttcagcaacaccccactctactggtaccaatttactgttttagttcattttcaagctgctgataaagatataactgaaactggggacaaaaagatatttaattggacttacagttccacatggctggggaggcctcagaatcatggcgagaggtgaaaggcacatcttacgtggcagtggcaagagaaaaatgagcaagatgcaaaagcggaaacacctgataagccatcagatctcatgagatcttattcactatcacaagaatagcacgggaaagaccagcccccatgattcaattacctccccccaggtccctcccacaacacaggaattctgggagatacaattcaagttgagatttgaatggggacacaaccaaaccatatcaggtgatatttaagcatcatccagtaaggttctgaaggcagtcatatgtaatcacggtactgtacattttgatagggctttattctctgtcatgtgcttccccatccattattgccttatttttttaatagtgctcaataaagatttattaatcgaagggatgaaagaatgaccttattttcccatagcagcatgatgcattactgcctttaaatccattcaatagttttttttatgtaggcattattaactgtagcatttacatgtatatctgtatacgtacattattattgaagcaactgagatatagagatgtaagagtaggcccagcacccaggtcttctaactgcaggcagagtcagtatgtttcctaacatagcccaatactgtctacagatgatacccctaaatgcttcacataatgaggaaagggggataatgagattcttgaatgcatttactaatctaattttcttcccttcagaattactacttggatgaatttgcaaatctgttagacgaacttctgatgaagattaatggtttgtccgacagcctacaactcccccttctggaaaaaacatccaacaacacaggggaggcaaggacagaagagagtcccttagtggacatttctagttaccaagctgctgaggtaagaccatgcaaaattatttatgtcaattttcttcatagcaatttaagttctaaaggagttttggaatagttgtttttccaaattataaggtccatttgcataaatattctttagatatcatactgctgataagatatgctctggccagaactaaagaaccacttaaaaatttaaagtccatgatgtgacttccagttgaaaatggtagcataagtatctgtctgccccttatttctgattacaactgaaatcaacaaggagactgagaaacagaaatggaaactcgatcttcccagaaacaaaaaaaaacccagaaatctatggcccagaatgtgaccagtaatctcaagaatggatgccaagaacagtaaaacttagaccaaaaggagaaaggatgctaccatttccaagagcacacagaattctccaagttagacagtgtatctggaggagccaacaaaggcccctggtttggacgaatagattatagagcactaaagagtttaaggaatctccctgagacctaatgccacagagttcctgggacataggactgaaggacaaaacgtgcaggaagccgtctttgtaggaagctgtttgttgatgtggctgcctaggggaggaactattggtggttcacagacctagagtcacactacttgcaaactatagaaaaatcaacaccaatagacacaccatgtgccaggtacacagtgaaaaagaaggatgagtgccatgccccaaagataaatagcttccagtggtaacttccctgagatccagagagatactctgctggcccagagctgtcatgttcacatgactgagtggcaatgaaggagctctctgaaggcagaggagaacatgaagtacctgctataagctctctgccccagcccttcccgggccctaattcacaacaacccagggaagaacaccgtttatgaaaagttgaacttccacatgtagagaggagtagaaataataaaagcaaataattattgcatctatgcaaatctgcttcaggaaaaagcagtatgtaaaaatgaccaaaagtgaagatgaagggtataactttgaaaacaattgccatcaacaggtaaaaattgtaaccgagatgttctccacacaaaggttaagttaatgaaaaaaaaaaaaaaatgtctctttgaaatgacagtttgaagccaagatgaaagaactccaagatgaaataaaaagacagtgaattaacagagttgaggaaagaaatggaaaagaaaaaaataaagcaaatagattcacagaaaagagaataaactatatggatgacatatttgggaaaattctgcaagagaaaaaaagttaaaattgattttaggaaaagtaatacacatggaaatcagaccaggaagaatgtgcgtaagacacggaaagggtatctataattagtgtctcccctaaaaaagcccagaaaatttgaacagaaaaaaatattttaaaatataattttaaaagactttactggaaaagagatatacacctatatatttaaaaaagaactgtgtcccagggaagaaatggattcacatctattaaaactagaacatgggtgggtgtagtggctcatgcctataatcccagcatctgggaggccaaggcaggaggatcacttgagcccaggagttcaagaccagcctgagcaatatagtgaagccctatctctccaaagaaaaaaacaaaacctgtggtcccagttactcaggaggctgagacggaaagattactggggtccaggaggtagaagctgcagtgaggggtgatccagcctaggtgacagagtgagaccacgtctcaaaaaaaaaaacagaaaacagaaaaaataaaaataaaaaataaaacacacactaataaagtcgctggacttaaaaaaagataatcctactgacacctagatacctcctacccctgaaaatcaagtcatctccaagtgagttaaaattatttaagttatggcccggtgcggtgactcacgcctgtaatcccagcactttgggaggccgaggtgggcggatcacgaggtcaggagatcaagaccatcctggctaacacagtgaaaccctgtctctactaaaaatacaaaaaaattagccgagtatggtggcgggcgcctgtagtcccagctactcgggaggctgaggcaggagaatagcgtgaacccaggaggtagagcttgcagtgagccgagattgtgccactgcacctccagcctgggtgacagaatgagactccatctcaaaaaaaaaaaaattatttatttagcaattattattattgttttaatcataaaaaactgtttaaatgtgcatatgaaaattgggcaaatgataggaaaaacataatttttaagaaaagaaaatataatgaccaattttgtaaaaaataaaataaaattgggtcaggcgcagtggctcacgcccgtaatcatagcacttcgggaggcctaggtgggcggatcacaaggtcaggagatcgagaccatcctggctaacacagtgaaactccgtctctactaaaaatacaaaaaaattagctgggcgtcatggcacgcggctgtagtcccagctactcgggaggctgaggcaagagaattgcttgaacctgggaggcagaggttgcggtgagccgagatcacaccactgcactccagcctgggcaacagagtgagactctgcctcaaaaataaataataaataaaataaaatagaggatttatacagaggagaaaaaatggatagtatttactatatttgtaacataaaaatgaaagaatttaattgaaaattttagaagaaagataattgtatgtatttatatttaaaccataaggtatatattgttatttttgaatgatgggattaaaacaaaggacaatatatactgctaattagtgcttagcagaaagcactgacagacgaaatcccatggtatataaagtggagcaacaacaaataaaagtaaactaagtgtgtgttcagctcaaataggaaaaattcacaacacacacaaatatacacacagacacacacactaagcaaaacagaaggaaagaagttgaaagaatgaaagtataatttaatgaaatcaacagcaaaatgaagtaatccaagagatgaatctttttacgaacaattaaattgacaaattattggctaatgtatctaaatatgatgaacaaagtgagtacaattcatatacaaaataaaaatgagaaacagaaaataacctttaggaaattaaataaattataaaattttggaaggagagaacagttatcattgtttattatgcaacaaactgacttgagtagagacagaaatctgaaacagtatttgaagttctatccctccaaaagcaccagtcccagatggtttcacagagaaaatacaccaaactattaagaagcatgtaagtccagaacgaccttcaaactgtgccacagcagagacagaagaaaagcttccgaatgtgtttttatgaaacaagcaatttattgatctaaaaactggacaaaaatattccaaattaaaaataaaactacatgtcagtcttattgatttttgataccaaaaatctaaataaaacattaacaaatagaatccagcagcagattaagaaaattatatcccatgatcatatgagtattaaatcaggatacaaatgttttaatattaaaaatttattaataggccaagcacggtggcttacacctgaaatcccagcacttcgggaggccaaggtgggcggatcatgaggtcaggagatcgagaccatcctggctcacacggtgaaaacccatctctactaaaaatacaaaacaaattagccgggtgtggtggcgggcacctgtattcccagctacttggaaggctgaggcaggagaatggcttgaacctgggaggcggagattgctgtgagccgagattgcaccactgcactccagcctaggcaacagaaagaaactccatctcaaaaaaaaaattaaaattaaaattaaaaaaaaaaaatatatatatatatataactgggctgggtgtggtggctcacacctgtaatcccagcactttgggaggccaaggcaggtggatcacttgaggccaggagtttgagaccagcctggccaacaaaaattaacccggcatggtgcacacctgtaatccccactactcaggaggctgaggcacgagaatctcttgaacctggaaggtggaggttgcagtgagcagagatcgcaccactgcatttccagcctgggcaatagaataaataaaataaaaatatatgaataaaataaaaataaatgaaataataaataaaaaaagaatatattaataaccttcaccaaacagggaggaagctatcattttattttttccatggctgcatttgataaaattcaacattcattcctaagtattaaaacatattcttaataaaaatgaaatcgatatttttaaaaaaaataggaatatagctcaagttaaatgtcagtattatatttaataatacaacatcagagcctttactactaaggttaaggacaaaaagattgtcagttcaaaagtcctacaacaggccggacacagtggctcccgcctacaatacaagcactttaggagtccgaggctagaggatcacttgagcccaggagttcgcgaccagtctgggcaacatgatgagatcttgtctgtacaaaaaatacaaaattagccaggtgtggtggcacacacctctagtcccagctacttggaaggctgaggtgggaggatcacttgagctcaggaggtcaaggctgcagtgagccatgattatgccactgcactccagcctgggaaacagagtgaaaacctgtctcaaaaagcaaatgaaaacaaagtcccaccacagcattttaaaggcgtatggctcatctctttcctttaaacccgcttaatttgtttatatattttatagctcatataactagcaagaactttaaatttataatatggttgagcagtcctttatatacacaacacacactattgtgagtccttatacagttacaacacatagtaatctatactaatttcctatggctgagaaaagaatttccctcaaatgatggtggaggcttgtaggtgctgtctttgcccttatgacttacttttcttgtgtatgagtgggacgttttcagcaacaatgcaatcataactttggtttcattccacaggaaaacacaacgctttctggactatcactttatgaggtatttatcaaaagtatgtttggcaaaaagttaatgctgccaagggtgggtctctctcacctggctcccaggtgggtttctgcctgcagaactcaagtttctgcaacatgagtttagctggcctccctgggaaagaaccaggaatgtcattggtcttggaataggccaagcaagctggactttacagaacagacccttttttgtgtgaggggatctgaggaaacaattcgtttgaatttcctaacttcaaggcatttatttgtttcttcatcttaaccattaataattaagatttgtatctttataaactagaaggattggatgcctggagctatcaataaccacctacaaatcatattgttctttgtatttttaaagtgactcatggcaacaaaatgcggtgagttgccagcccccaccttctcccccttgccagctcggcccccttaacggttcttggcactctgtggcctctcagctatgtagccttggaccccgaagagacctcccagccgggggctgctgctgattgggcagaaggacctccgagctcttgccctgctccttgctcgggcctcttctctactgcgatgactcaccactttgcaggagctggctaggccactagtcagtggatgcaatttagagatgtcagaagggtttttcctccacatattttcctcttgatttgcttttgtgaataccattgcgtaaggcaggaacatccagaggggagcgcctgacctcagggcacagagtctctcctagaggatttttgcctttatttttttcagtgtaattccttagcacctacctgccaggaggaaggtgagatggtttttataactgtggaaaatctgcattccctttcacatttggggtccccaacacaatctgtgaagactggcgtgccacagtccacagccactcttttcagcaaggtttgtgctctgaactctgctggtcagtgttacttaggagcaggaagccatcaagagggtgaattttctctcagcttcttcctttaacttgccagtttgtaaaataatgagaagatttagaatacttagcttttcccaatgcgtttacgtagcccccgtcacaggtgactgtcaaagaaatttactgagttccctcaaatctagaagtttttgtagttatagttaggttctgtaaacttactgaatcttcattgactttggtattttctaacagatgatgcaatgtatctgaacactaagtttgaatccttgaggaagaaacaggctagaaggggctttttaaaatgaaatattggccaggcatggtgcctcacacctgtaattccagaactttgggaggccgaggcaggtggatcacttgaggtaaggagttcgagaccagcttggtcaacgtagtgaaaccccgtgcctcctaaaaatacaaaaattagccggctgtggtgatgggcgcctataatcccagctactcaggaggctgaggcaggagaattgcttgaacccgggaggcagaggttgcagtgagccgagattgcaccactgcactccagcctgggcgacagagtgagactctgtctcaaaaaaaaaaaaaaagaaagaaatatcaactcggcctgaacatgcagaaagtatgatgccctagagatgccccaactcctgctgataaacatggaggtcaggcaggtctgagggttgagcaactgtggagtgattcagttttaactactggctgggtgactgtaggaaagcgacttaacttcttggtgtctttacatcctactctgtaaaaggaggacagtagtagagcctctcccatgagaccactgagagaggtaaaggagttaaaggagttcgtgtctgcatgctgtaagtgctgtctatagctttaatagagactattaacactttcacgtttcatgcattcctcaagtatttttgtgccaggcacaattctagaggctggggatccaaagatgaacaacattgacttgaaagtgaactatgtccactcagaaaacattatattcctggaacttggaaagtacaaatctcaaaattatggacaaaaacctgagcaacttttgtatccacttggacctatgttatgatgtgtttcttcatgtgaagccgagaggggtcggtaaggatgcaaacatcaagttcaaatgaggtatgctcaggaagaatgcaccccatagttcccagacttcattcagcatgttaaggaccagtatattcctagacttaactaaaaatgatcattctcacctgctctcacatcctggttctgcccttgctagctgagttctcatgactttctctccaccactgtggcttccacagagaccagcactcagtaaatatttagtgaactggttattgagcaaaaagaagtggtgggtgatgtatatggatagaaaagggcaactaataaagcaagcatgggaaaatgctaataggtggctctggaaagggtagctgagtacttctgaattactcttgtaactttcttattaagtttaaaattatttccaagtgaaacgcttttaaaaagaagctattgtgggttgggcgcagtggctcatgtctgtaatcccagcactttgggaggctgagatgggcggatcacctgaggtaaggagttcgagaccagcctggccaacatggtgaaaccccgtttctactaaaaatacaaaaaattagcgggcataatggtgggcgcctgtaatcccagctacttgggaggctgaggcaggagaattgcttgagcctgggagatggaggttgcagtgagccgagatagcaccattgcactctagcttgggcaacaagagtgaaactccgtctcaaaaaaaaaagaagctattgtattactcaagtaaagagatgacaaaatgatagggtcatagttgtgagatatgatttgttttaatggttcttattttttctaagcttttctatgtttctaagtatgtcttggaatttttcccatgatggacatcacaagaaaagctaattaaatttaaaagaactagatatggcttacaaatacttaatatattggaagtgggaataacttaaaacctaaagagaaatgttgaagcagacagccttctgaaatgaattctctctgctttcatggattatactaagtcttcccgggatgacttcacaagcaggaatgtttttgtggctgctgattcattccttcctggcagacatagctccaatgaagttgaaatattattgttaatcccttttatttagatgtgtgctagaatggcactcgaggcactaaggatataaaccagggcttctgtatgactgtgaacacataatttatttacttgggccaaattgtctcctagcagggttcaagaaagttgaattctcaaggactaaaatacactgtcggctggcttctttttgaggtttctatttcaattggagtcttgcaaactacaattatttcccaaaagaatatgtaaaatactgcattagtttgctagggctgccatgacaaagtgccacaaacagaaatttattctcttgtagtctggaggccagaagtccaaggtcagggtgtcagcagggccacgctccctctgaaggccctggtgaaggatctgttccaggcatctctccagcttcccttagctccttggcttgtggcagtgtagttctcttttttacagggcattctccctgggtgtccaaattttctctttttataacacaatcatattggattaggaccgaccctaattaccttatcttagcttgatcatcagcaaaataaggtcacatccaccagtgccttttttgttctggaggaagaacaattcaacccaaaacaaatacatttaagcaaatgtaaatatttgaagaaagtattatagttttccattaattctagctttttgaaaaatttagtttcactaatctgacaaaactaaaacaaaatactcaaaaaattagcaaactcttcttttttactctgtgtagatcttaatttataaatgcttttataagaatgatgtttgtatgttagtacatgttgattatcattaaaattataaaacaagtagattatctgagtatttgactgtggaaaagatcaagtaataacaaaagatgattttttttgctattttaaataatacttttaaatagaaatgccattgagtcttccctaaaataccatatagctatcaatgtatactcccaatggctttctaagttacagaacgcaggaatgtaggagagcctctgaggtcaggagctcctgttgcctcctcctcaggtaagtgactcattctcaagggataaaatcacgtaagaatccccaaagacatacctcatccatgtcaccagcacaacacctttagtaaagatcgaatccatttccccagcggtttgggagtgagtgtctatctttggtaaaatctagtacagcagttcccactggttttgcactcttaactatgtcttgaataatttattactcaacatatagttgaaaggcttgacaattaattgattttaagtaggaccaaggagaagaaaaattagagcagattcaagggtttccctattcaaagccatgttcactcaaccactatcccagtagacttttcttgaggggaagacagagggtccaagttacagctagcacacatgggtgtaccaatgtcatcattcactacaccagtgtggagatttattctatctgatcttcagaattcaagtaaatatagaatgaggttatacaaatctctgggactgtagggaggaactcttttctcatggtgaccttcttcctggcttctcttgctagtttataatcaatttaagtattactgaaatactagcccttgtccttgaaaaagtagagaccttaggaaagttttctgctgcagttgtcctgagttgaataattttccagagatttgtgcttgccagggcctccttgcagtctctactttcataagttactgtggtttttttttgaccaacatccttgtcctgttgccaggcaggagtaaggaaatgtaattattaaagtttagaaatatgcactgacctttgaaggacctacaacaccctgcaccctgcagaagttgagcatcttttttcaaaatctgcaggtgacattatttataactctcatagacagctggtttattggatggtgggtcagagtggagaggggaggaactggatgccttgcacagaaggtggttatactatactatgcagccacagcaatcaacaccatgtggtcctgacagaggggaagagacaaagatccttggaacagaatagatcccaggaatagagatcccagaatggactcacacaaatatgccaaactcatcttgacaaaggtgctgaagcaattcattgaaggaagaatagcatttttgacaatgttaccgatgcaattgaacatccaaaagcaaaagaaaacaaaaagaacttgtacctatacctcataccatatacaaaaataattcaaaatggatcatgaacaatgttttatgcaaaacatgaaactgtcaaatttgcaggagaaaaaaacaggagaaaatcagaaattggaactttaaaaattgaaaatttttgttctggcttggtgtggtggctcacacctgtaatcccagcactttgggaggctgaggcgggcggatcactacgtcaggaaatcgagaccatcctggctaacacagtgaaaccccgtctctactaaaaatacaaaaaaattagctgggcatggtggcaggctcctgtagtcccagctacttgggaggctgaggcaggagaatggcatgaacccaggaggcggagcttgcagtgagccaagatcacgccactgcactccagcctgggcaacagagtgagactctgtctcaaaaaaaaaaaaaaaaacaaaacaaaacaaaaaaaaaaaccttttgttctgcaaatgactttattgagaggatggaaggacaatccacagactggagggaaatatttgcagaccgcatgttcaacaaagaactagtatctacaatatataaagaagcctcagaattcaacagtaaaaatgtaaataatctaattagaaaatggaccaaaataatgaacagacatttcactgaagaagatgtacagatggcaaacacatgaaaagatgtgactatcactagccgttagggaactggaaattaagaccataatgatatatcactacataccttagaaagactaaaataaaaaatagtgacaacaccaaatgctgggaagaatgcaaagaccacatcactcatacattactgatgggaatgtaaaatggtacagcaactatgggaaatagtttggcagtttcttataaaatgaaacatgaaaacttatcgcccagaaattatctggatcatagatcccaaagaagtgaagacttaggtttacataaaaacctgcacatgaatgttcacagcagctttatttgtgacacctctgaactggaaatagctttcactgagtgaatggttaaacaaactgtggtcccttcatatcatggaatgctactaagcaataaagacaaaaagactattgatccacacagccacctgggtgaatctccagagaattatgctgagtgagtgcaaaaagccaaactcaaaaggttacatactatatgattctatttatataactttttttttttgaggtggagtcttctgtcgccgagactggagtgcagtggtacaatctcggctcactacaacctccacctcccgggttcacgtgattctcatgcttcagcctcccaagtagctgggcctacaggtgcacaccaccacgcctggctaatttttgtatttttagtagagacgggttttcaccatgttggccaggctggtctcaaactcctgacctcaagtcatccacccacctcagcctcctaaaatgctgggattacaggcatgagccacagcgccaggccaatataacattcttaaaatgacaagattatagacaagggaagcagttcgtggttgccaggagtcagggatgaaaagacggtgaggaaggaaggaagaaggcttaggtgcatctataaaaggacagcagaagggatcttggtgatggaatgttctttacgttaattgtatcaatgtcaatatcctggctgggatattgttttgtaattttgcaagatgtgaccattgaggaaaacctggtaaaaggtacataggagtgttctgtattatgtcttacaactgtgtgtgaatctacagttatctcaaagtaaaaaaaaaataattaaaaaataacgaggttgttatagcatacaaaattacaataagttgaaaatggtattaacttaaaaaccagtgcaaatattaattatttttcctagcaaacaagagaatagtctagtcacaaatgtgcataacaagtgctctttctgggcacctcctttctcccacccagcccatggtttatcctttccccaagtgtcttttatagatgaaagctccaaagcatgaaggcatctgagcttctgcagtatttggacatcccgaattgctcagatttctacctaatgagattttggcctcatctgtgggccccgcaccatatgttcgcactttctgctggaccaaaacccaaataggggtggagggaagagcctgtgtcatcttttagactctgtaaaggtggagccattctcagacgctaaaaaaatctgagttatttgggacaagagtaatatgtttgtatcagtaaccaaatatctccgtagagaatatcagcaagaagtgtgggtggaagagtaattagagaatctgaccaagacacagagatacaggagctgagcctgagttatggcctactcccactggtggtatcattgagttggctgacaacttgctcctcaaaacacaccatgtttcagcataatttaaccacaaaagtctcacgagcattttgaacagcatcgtatcccagacagaaattgacaaaggaaactgagtctgccagtggctgcaaaaagctgtccacacacaccaccttgataatttgatctctgctctcaggtgatggggcctgcttgattaaaaacatgcagccatctgacctattggcaagacatctgccatcagcagtgtctgatttcttccacttttggatccacatttgctgcttagcctaaaaaataagtggaaatgtctgtggcactgggcagggcacagtggtatgtttttggcatttttcagagcagataaattacttgagtgaagggtaggaaagaatatgttttcaaagacttgagattctctccataggacaagaacttctagtttagttactaatataacaacctgttagctgaatatcattttttaaaaacgatatgatcgccagtgtctgttctatgggcacaattctttccagaataaaaagttctgccttgcatttgaagtaagtcctgttcaagaacagcactgcctttgaggtcagtgggaagtcagtgtccaagcctgttcctcagcatgctgggtcagagaagacattcatgtgctaaaggccagtcctgaaattcaaattcttatgagactaagaaactcatacaaagatgaggatgacttttaaaatcataagtctcctatatatcagtaatacatagtctcatttcaattgcccttatctctatactagacttaagcacactggaagttggtaaatcataggtcaaagacctttacagcagatcaaatacaggtgcattattgtttgtaagggaaaatgttttcttcatcttcacctgtttgagggctataatacctccttgatgagccaccaggtctgtattatctcctccatgtgactcactggcgtttctttattctaatcatgagtgacttcaactgctattattcttttgttcttttgttcccttctgatgttgagccataacctgctctgtaaactccaccaaatggaaggtctttgccccggagtcaaaattaatcatttaaccacttctccacacgataatctctcacacatgtgaggaagtgttgtgttcttcctcctgccttggcagccctggtggtcttccttccccagcctaagccccatcagcccccaccaccaccgtcctcccatgatgtggctttgagtcacctcatctgctggttggctccttgtgattctcctctggccttgtttgtacttcttgtgtctcctcttaatgataaacaatagtccaggagtaccatgattaggaaaaatttgtgctatgctaaatgttgatggctaccagcatccatctctgtctgtccctcactgcccaagctttgtccaggccccagctactgcccaggcactgacgccacctcccctgcagctcctcacagcccctatagagagcaatgtgtcctgcttctgaacttgctcctgaaggcatcaggcatgtgccttttcatgctcttttttctttcccaagtgtgagtgatacctggagcaagattagaagccttgtgctgaagatgacagagctgcctttctaggatgagaactgtgccaacttccccctgcttatgtgaaaaataaacctggatcctgttttgctctgaggaatctgggggctctttgttatagcagcagcatggcttttacctaactaatttctcacacttcacacttgccttagaaactatacttacactaatgcagcccccaattatattattatttataacctttgacaatagttttgactgtaaatgatgtaaaacatgaccctaattgactgaaactgcaaggaaatgtgttatctacaaaaccagaagttgagaggtagggcagatgccatctctgcattctgctgtgtgctggctttgcctcaggatggaggacaccctgcttggttgcaggatatctgctacaggtccagggatcacatccaaagatgaaatgtccatggaaggaggagaccatctccttcggtcttatcattagatatgaggaaactttttcaggaagtccccaagaatattttccctcaaactcattcctaaattgatcatggtgaaatggaattatcatgattaatttagactaatcatttgggatagtcagaatttaagtgtcagccgggtgtggtggctcgcgcctgtaatcccagcactttgggagtctgaagtggacggatcacttgaggctgggatttccaggccggcctggccaacatggcaaaaccccatctctactaaaaatacaaaaattagttgaatgtggtggcgcatgcttgtaatcccagctactcaggaagctgaggcgggagaattgattgaacctgggaggcggatgttgcagtgacccaagattgcaccactacactccagcctgtgtgacagagcaagactccttctcaaaaaaaataaataaataaataaaaataaaaaagaatttaagtgtcaaccagtaggatctttggaggtctcaacacctccctacccatccttaaattttattgcggagcaatgtctttgctcctgtacctttctctccataatggtgctatttattgcgtggtcataaatacagttcattattattcctgttagacttcctatgtttatcacagcattccaggttgaattggattctggtaacacttatgttcaacctacctcccagcttcaaaactgaatcctataatatttaccaaatacctactacattctcagcactggggtatgaagaaaaaaattcctcagccatctcacaatccagtaaaagcaaatgagcaaacaggtgtggagatgcgctaggcttggggccatgctgagtcagctgctggagcaaatcagggtgcatcagagctggagctgagagacctggaggagaattcctcaagggagaagcagccagtgacaatgggggaccctgggttttgtttttttgttactgttcttgtaatgtctttatctcatattagtatcaggataacgctgtcctcctagaataaatttggaaatattctctctgcttcagttttccggatgggtttgactagaattggaactatttctttcttaaatgtttgatagaattcaccagagatgccatctagaattgaagttttttattagaaactttttaactatgaattcaatttttaaagaagtataggactatacagcttatctatttctttttgagataactttggtaatgtgtatcattaaggaatttttctatttcatctcagctgtgaaatgtataggaataagttgttcataatatttccattttatcctttatctgtaaaaagtgtagtgttgtcacctctctcattcctgatattggcaatttgtgtctttgttgttgttgttattcaaagacaacatatttgtgtctttgatatgttgttatcatcctggctagaggcttgtcaatttaattgatcttctcaaggaactagcttttggtttcattcgttttctctattttttttttttttctgttatctacagcactggtttctgctttgatctttagtatttatttattatttacttttttctgtttactttgagtttaagttgtttttctttttatagtctttcacataagagctaaggtcatttaagacctttcttcttttaatataggcatttagtgctacagatttctctcggagtattgcgttagcattcatccctgaatgaaaatgatatgttttcatttttattgagataaaaatactttctaatttcccttttgatttattctttgattcatgggtgatttggaagtatattatttagtttgtatgtattttgagattttcctgatgtccttatgtagctgatttctaattttattctgctgtggtcagagaacatcctgtgtcttgaatcgtttgaatgttattgaagcttgttttaatggcccaaaatatgatctaacttggcagatgtttcatttgaactttaaaatatttgtattctgctgttgttgagcaaagtgttctgtaaatgtcaccttggtcaagttagctgatggtggtgttcaggtctgatcagcacttgctgcctttctgcctatttgttctgtcaatcactgagagaggggtgttgtttcagtatgtttttcattttttctttttagccagcagacatcaaggacttctgaggagcctggtaccttgcataggcactatggaccctgttttgcttaacccacccaacagccaattttagcagacatcctagttttgcaggtgagaagagctgaggtacgaagaagttttgttaatttttccagttcacgtaacaagtaaatgggaaaccaggatgaaaatcaaggtttatctgtcatcagactgttactcataatcaccattcggagagttcagatgtgggacaagattctaactccagccttctcccaaatggttaatttgccagttgccctagagttacatattgtcttatttgtttgttttactgaatctgtctgagtattaaaagccttgtatcttgtgaaatttctttcaggtctcataaaagcgatgaaagagaccaggataacattctaatatttaaataagatttttgaagtaaaatccttattttgtaaatttaacaattgaatcttgctagattaataacgcatctttcctgatttactaattcaatataaaatggttattcaaactgaacttcgaagttatctgggcggctgttttggaatccatttaaaaacctacgtgctcagatcagaatttgctaaggagattattaagtttggagtgcatgctatatttttggattctaaatagtttcaatatgcctggtttggcatgcatatcagtgacagtgggtagaagtggatggatgggatggaggtgcctccagtgtcatggaaacacaccgtgctgtggcctccccgaaggcctggggctgcacactgggaaaggacaggggtagggggtctggcaagcagacctgggaaagatttttagtgtaatcattcgttatgtagaaactgagcaaggggcatggccatcttaatccacaattaactcatgggcaaaatgggagtataatggaacctgcctcaaagagtttgtgtaaagcatgtagcacagtgcctgatgacatatggcatctctgtgtcattgatttgaccgaagctaatacgaattctctgtgtgcgtttatgtatttgagaatgtacaggtctcctcagggagtagattgtatgattggcaggctttgcctcatttccacattgatggacagtgagagcgcatccagactggagacctctgcatgagccagggctgccaggtggttgggtggtttggagaagactcttcccttccccagtgaagtaataaggcatcacaacatacatcttcatccagttgtatcttgtttcattccatcagctatgctttgacagactcttttcatggattttttcattccaaatactttcatggagcactcaccatgttcaagagctttgaaaaatacaaagaaagcaagacccatgccccttttacaggcagctgttttaggaggggaagcagtaagtccagcagtgagttctgtatagggaggtagaacgaatcccaacagaggtgacactggcgggctgctgcctttcccatagcacacagaacgcaggttagcagggttaagcatgcccgaggagcttcaagagtggctcttctcacatgctctgggtggtctggatgaggaggtgatgtatcatggagatcagacagtcttaaaatgaggctgcgttacagaatgagccactgtgaaaacctttgggataactttcacttctgcataccttaggcccacaatggtgatggtaatgaacatggtgacagcatcacatataggaggttacctgagcaaggcaccctgctagactgcagtatcaagttaccacaaacttagtgtttaaaacactaatgtgtcatcttacagttctggaggccagaagtctgaaggagtctcactgaacaaaaatcaagctgccatgagggcaatgttccttctgaaagctctagggcagagtccatttctttgcattttctggcctccagaggccacctgcaattcttggctcatggccccttcctccatcttcaaggccagcagtggtaggttgagtccttctcacatcccatcactctgacaccaactcttgcctcctgcctccactaataaggacccttgtgtttacattgggcctgctggataatctaggataatctctcatcttaaggtggctgacgaacagccttaattccatctgcagccttatcccctttgttatgtaggaaacgtaagtaccaagggtcaggctgtggaggtctgggaggagcgattgacctgcctcccacagaagcctccctcttttacaagagctcttcggggcacagcttttactaaccccacttcacaggaaacagaggctagagagggcaagtggctgctgtggaaagggaaatgccgttatgtgccagtgcatcttctaagggctactgcttcagctcattcactcttcaccactctgttattatcatccatttcacagatgagtaaactgaggtccaagggtggttaagcaccttgcccaaggtcacacagggagtaagtcactggctaactctccaacgcacagtccatgtgtgtccttactgaggcaagtggacctgggagaaggttctgtaggggaacattattagggaaccaacccaagggggaaggcgtgaaaggaactgtcacaccaaatctggagaaatgaggatgttattgtatcaattgctgcatttgcccccattggtcacgttgatttctagcaatgtttgggaatgactggtcaccctggccattttagaacttcggaatgtcacacatttttagcaagtaaagttgcatagaggtggtagaggggctgaatgcatgtttttatacagtttggggctcacattgggctcagagaaactaagctaatatgcaacttcacaaaataaacacaattaacattttcccataggcgtgagaggagttcatgagattgtttgtattaaagtgatttgttaactgtgaaattctgcaccgacaaccactttgttttttcaccacacatccaggtcctagcagctccttgctataagagcctgcttagaggggagtggcctggcctcgaaccagtgacagctaaattccttctgaaatctatccattccgtgcctgctctgaacgtgcttctcccatgggcatttctccacttctttgataaactattatttcctcaaaacagtctttcattccatcccattgtgtaaaatatgtaattaaattctattcttgctgaccttagctgtgtgacccaccagggcacagccagctgatgccactgggctcccttcatccagttttaacctgcgccctgagagttttcatcctttagacctgggatcctgtttccacaccacagggagaagaatgagaaaagcagggacattttctaggaatctggttgtatagtcacatatgagacaagtggaaaaattgcttaaggctttatttttgtttttataaaaatactttcattgtgaataggagtgagttctgtttttctatttccctttctacctggcctctctccattgaaaacctaaatcaagacagtgtataaagaaggatgtccagactacacagtagttaataaaaagtcatggaaagaaaaacaaatgaccccaggaggaaaattaatcactgaagttaagctgctgatggccaagatgaagaaaagactgcggcagacacagcccttgctgttagagagctctctagtggaaaacacacactggctgccatcacaccattgggcatgcacccctaggcgccgcccaggctgcttggaacactgcagtgaatgaacaaatgtggatttcggagctcacagtccagcattaattttgaaaaggagtttctcacatgacaccttgtagaaagaactctgaacaaaatttcaggaaactgatgttatctggaagtcattctcttaccacaatgtgaccaattagatatacaaaaggtaaaaagataatttgaaaacagtcatgtcactgaaaatttaaaataactctgaaaaaactcatgaattacagagaaaaatcacaatgcaaactaaagtatatgatgcatctcaatcagtatttagaaggaaaattatattttaaatatgtttatttaaaaccaggaaagtttaaaaataaataacttaaaatgcaactcaagaacttagaggaagataaatcaaacaaacataaagaacatagaaatatggccagcatggcgctcaggcttgtaatcccagcactttgggaggctgaggtgggtggatcacctgaggtcaggggttcgagaccagcctggccaacatggtgaaaccctgtctctactaaaaatacaaaaattaactggtgtagtggtgcatgcctgtagtcccagctactcaggaggctgaggcaggagaatcacttgaacctgggcagtgaaggctgcaatgagccgagatcacgccactgcactctagcctgggcaacagagcgagactcgatctcaaacaacaaaacgccatagaaatataaaacttaaacatataagcacaaaaatgaaaaacaatgaaacagtagagaaactcaacaaagtcaaaagatgattttttgaaagaatgctaaagcagatagatttctagcagagttgatttagaaataatgagaaaaataacaaaaaaagcataaaacagcaaattcagacatcataaagattaaaaaattagtaagataatcctatgaacaactttatttcaatacatttgaaaacctaaatgacattttctagaaaatataaacaatttgagaaggaaaataggaaatgtaaaccatagacattaaatatatagaattagaaatctaatggtactcaaaattcctagagcatttttacaagcaaattttaccagacattcaaaaaacagatctctttatctcgtacaaattctcccagagaattaaaaaaagaggtaaactttagcaacttgttctatgaaactagtataatctggtttttttaaaaacttaagaacatcatacaaaaatgaaaatgatagacccctcttactaataaacataatctcaaatatcttaaaatacaaatcaaattcagcagtgtataaaactaacatgtgatgacaagtggggttttatcctgaagatggaaatatggcttaacgtcagaaaatatgttaatgtaatccaccacattaaagattaaaggaagaaaagtacttggccgggcgcaatgggttacgcctgtagttccagcactttgggaggctgaggcgggtggatcacctgaggtctggagtttgagaccagtttggccaacatggtgaaactccatctctactaaaaatacaaatattagctgggcttggtggcccacaactgtagtctcagctacttgggaggctgaggcaggaggattgcttgaacccaggaggtggaggttgcagtgagccaagattgcaccactgcactccagcctgggagacagagcgagactccatctcaataaataaataaataagtacttcataaaattcaacattatttcataataaaacctgtgcaaggaaaccaaggtggctatcctccaaaatcattagcagacatcatactgaatggtacaatcttggaagcattcctaggaaaacagaggacaggacatggatgtctgctatttccgcatgtatcctgtaggttgaaaaccaatgtaataaaaaaaaatgcaatcaaccagtaagataaagccaatggaataaggtgcagaaaggataagaagagaagacgaagaaaccaaacaaacagtcctcagttgcagacgacatacttgcctaccttcctccccaaatcaagacagtcaactaagaaagcatcttagaagatcgacataaaaaatgagtactattcctatacaccaacaattagaaaatgcaaaaggaaaagatcttattcactgtgggggaacaacaacaaaaagaaaattatgagtgtacctagtaaatctaggaaaacatgtacatatctttcatttaaaaaaaaaacccaatgtttactgaaaaactttaaacctgaatagaaagacgtcccatatttatggatggtgttcatgtcaaatgaatgtataaattcaatgcatttccaatcaaaattccaatgcaggtctatgtgaaacttggtacattgatcataaaattcaaatgggaaaagaaagggccaagaatagctaagataatttttataatgatagcaaaatggaaagacttagatctcaactcagtgcaactattaccaaaaaagattttatccttcccaatggaaaattttgctttttcattcattcattcattcattcatccatttatttgtcatgttttaaaactctactgtgtcccaggctctattcttggctttgagaatagatcaaacaacaaaaccaacaaaatgcctaccctcagggtgcttacattctagcacatgggtcaagtaataaaaagaacacgctacaatcgtggacagtggtgaatgttatgaagaaaaattaagtgaattagggagggctctattttaaatagggctctgttcttctttaaagggaaggcccctcttgataatgtgatgtttgaacagaaaccttgaatgaggttcaagcaagctgtacagctctctgggggaagagaaatagcaggaagaagaaacagcaaatgcaaaggcctgaactgggaacacagtcattgtgcgaggaatcacaagtgtttctggaacacagcaagagagagagaaagcgcagtagaaaatgaggtgcaaactgcaaccagcaaccaggatataggaggtcttatagacacagtaagactgcaaatgttattctgaatgtgagcagggaagagcacgatcaaatgtatttttaaagacataacttggcctggcgaggtggctcacgcttgtaatcccagtactttgggaggcctaggcgggtggatcacctgaggtcagaagttcgaaaccagcctgaccaagatgaagaaatcctgtctttactaaaactacaaaaattagccggtcgtggtagtgcatgcctgtaatcccagctactcgggaggctgaggcaggagaatcacttgaacccaggaggtggaggttgcagtaagatgagattgtgccattgcacaccagcgtggacaacaaaagtgaaactccttctcaaaaaaaagagaaaagaaaaaagacataactctgttgctgtgtagacaaaaaactgtaggggagcaagagatgaaggggtaaactaattaggaggccatagagtagtccaggcaaaaggtggcagtggtttggccctgagtggcagtgttggaggggatgatgaatgggctggcttcagaaagtctgttttaaggtagagctgtcaggatttgctaatggactggatgtcaggcacaagagagtctggatagccccaaggttttcagcctgagcaactggcaaggtgatatatgatacgacggaatgaatattttacatgtccgcagggaaggaaggagcatccaccgaaagttgatgagacaactggttgtccacatgtaaaaataaattagattcatacctcaccctgcataagaggttaagttccccatgtattgatgacctaaatgaaaaatgcaaaactttcatatttttttctttttcttttttgtctttcttttctttttttttttttttttttttttttgagacggagttttactcttgttgcctagactggagtgcagtggcactatcttggctcactgcaaccagcacttcctgggttcgagcaattctgcctcagcctccggagtagttgggattacagatgcccgccaccatgcccactaattttgtatttttagtagagacggggtttcaccatattggtcaggctggcctcaaactcctgacctcaggtgatccacctgcttcggcctcccacagtgctgggattacaggagtgagccaccgcacctggcgtaagttttatattttaaaaagaaaaataaggcactttgggaggctgaggcaggtagatcatgaggtcaggagattgagaccaccctggccaacatggtgaaaccccatctctactaaaaatacaaaattagccaggtagggtgtcgtgtgcctgtggtcccagctactcaggaggctgaggcaggagagtcacttcaacctgggaggcagaggctgcagtgagccgagatcacgccactgcactccagcctgggcaacagagcgagactctgtctcaaaataaataaataaataaataaataaataaataaataaataaataaagaataataattatggccttatttataagtaggacagggtttcttaaacaagatgcaaaagcaaaatcaaaataattaaaaataaataaactttattatttaaagcttataaaatgttctctgaaacaaaaacccaaaaacaaattgagaagacaagccacacagtgaaaggagatattattaatgcatataaatgacaaagaattagtacacaggatataccaaaaacaccaaaaaaatcaatttgaaaaggacacacctacaagaaaaggcaaaatatatgaaaaggccaaggaccgaagaggaaattgaacgatcagtccaacaaatgacaattgctcaaactcatcagtaatcaaggacacacataatgaatagcctgcatcatcgtttgatacttatcagcttagcacaaatgaaagtgtctgacaacgcaagagttagtcaggaaaagaagacgcaagaaaattcctatatgcgactgggaattgtcagttcctgaaatcactgagggaaataatttggcaagaagcaaatctgcttcgtggatgtacggtgcaaggagacaaattgcagtgttgtttatacatgtgtaagagctaacacttggaaacttttggaagaaacagtcctccacaggcttcctgttctcctacaggtcttactgggtgcaccaagactataaagccttgactcttctttactggatccatttttcggggtcgtagttgcagggaggaacctcaaaggagagggcttgcctgctgcctgctataggtccacatggtgcccagctcagtggtcctctactgtgacttgacccaatgcatgtgcgggagtcatagggtctctgcatcaccccgtgggcatcagggcttgaggcaccagtgcaaatacactgacactggccattgctttagctgtgacaaataaatgaagtcttctgtctctgattcagaaatcttaagtcttctgccagcatccatgaaactggggcagcagcctcacttgtgaatctgtaagtagtgagtgaaatgtcagcctcttcacagttcttgacagaagccacccaaatatccattatcatcatcatgattaaattgtatgattcatgtgaaatggagacagagcagggatccctttgaggggcctgccactcttcccaaccaagcatggaaataaagaaaaatcttgagttcctttgagggaaattccgggcacctagctagccctgaggagtaagtgagcaacctgataagcaaggaggtaacaatagctgaagacaatagccgaggaagttagagccaccaaatgtttggttccccatagaaactaaagacaacatcttaatatatatccctgagttgttttcaaaaaacctggactcccaccaaatggaaaatgacatctgctggcacatagaccttagataacagaggaactggggactgaactctgactgccattttttgttctgaatttcttcctgagtggcctggaggaagtcatgcctacaggtcggagctcagcattcctttctgtggacccctaggctttagacaaagtttcactcccttaaccaattcgcaaatcagaaaatctttgaatctacccatgacctgtgcctcgccccacacttcaagatatcccaccttttttggccaaaccaatgtaagacctccatgtattgatttatgactttgcatgtaacttctgccttcccacctttaaaaacccttacactcaagccattcgggagtttaggtcctaggcgagagctatccggttctccttgcttggtgccctgttataaatgcctcacttttttcactgcaaatcccactgtcagtgtttggctttgctgtgccaggatgggtggacccaagttcggtttggtaacaataaaatgcaatacactagttaaatggatgtagctacatctgttggcattatcaaattgcaaaaacataatgttcagtgaaaaaagcttgttagagactgatgtaatcaacaaaagttcaatactttgctatatatagtttatggagccattcatctgtagcattaatgtagcgtcattctggggatgaaaaacatcagtttaaggacagggtgggaagcatggagaggcttccatgatccttgtgtgtgttgtttcttaaggaaaaagagctgatgaaaatctgccaaaatgttacagttttgtgtgtgagaatataggcgttcattatgttgtttttatgcttttctggatatttgcagtcaaccataatttcagaatatcagtgatggtggcgcttcccattttgtaccatcaatctgtctaagattcacagaattacctcacatttccctttaaatatgaatcttcgttctcacagttggaggcttaatgtttccaaaggtataaatgtggttttttgtttttgtttttttgagacggagtctcgctctgtcaccaggctaaaatgcagtggcgcgatctcaactgactgactctgaactcggggttcaagagattctcctgcctcagcctcccaagtagctgggactacagtcatgcgccaccatgcccagctaatttttttatttttagtagagacggggtttcgccatgttggccaggatggtctagatctcttgacctcatgatcctcctgcctcagcctcccaaagtgctgggattacaggcgtgagccaccatgcccggacaaatatgtgtttttgtaggtggaaacttctctcaaattaaaacatcctctataccagaaacctggggaaaaaacatcattagttggcctgacaggaaatcaggcagttttgttttttttaaacaaaaaaaaaaaacattaaagtcctaatgtggaggcagagaaaaacccatgctgctcactgtctgtggcctgatgcctccatctctttctgcgggacctttgtcccaggtctccctctcctgacctagatgaatgaatgaaatgaactaatgtgtacacagactctgtgtacatatggctttgatttgggagaaaagatgaatcactctgagctggtaatctgatctttgcccttctgctagtaaacagttgaaagataactcaatacattctccgtctgccttttaaaaccagaatagcaaataaaggccctagaggggcctggtttggatgggggaagccatttatcaccttcagggaaaagagaatgtaaataggtccacatttattctccggtcctcccgtggccacgacagccttagaaatactcaccttgtttcagttagcaggccaagggtcagcggtcaacagagctgctccagcaagctctgtgtggtgcctcaaacaggccacacaaagagatgctgtttaaaatcggaattcctttcaccctgagtaagtttccaaagcaaaggggtcacccggtgagtgttggtgcagtcctcactgtttgtcctgcctcttgctacagaggacatctggcaaaagcagatcagaaaatgaaagaagtctgtcccagttctgccctccccaggtggtagaatttctcatgcgattgttgcttggggtgtgtcactctgtacttgagtaggtggagggtgaacagactgatcagctggctatgagatgagagcaggatgatgatcattcactgggatgtgtctggccaactgggaagagtcaggtagctcaaggcctggagattctcatcagggagagcacaatggggccaggcctatagctgaggtccaggcacagaggctgggctatgagaaccagtgtcctcagtgactgcgacaatgacatgtcctctgtcaccacctgctaccgtgaggccccagccccggctgacctgtagactcagatctgggcctgagagggaggcttgacttcagcccctctcatgaacagaatccacagcaccagggctgagagtggtggcagggcccaggaacagtgatatccagtagaataagtgtgacccaccccagccccccacaaaccagagggagtgctgagcacctccgcccagcctcaggcagctgacttcactaaaggaggccaaaaggaaagaaaaatgtgacaagtgtgttttgatggctgatgcgcaggctcccagagaaccttcagaaatcaggtgggagttggaaagatttttgaattgtcctcctgcaatagcatgttgaagaaaaactagctaaatatactttatgtgtaattccatgtccatatgcatgatttcttaggtggcaaccaaaggcaaggagttcctgtgcaaatggtattgccaatattaaggttctcaatacagtatatattttgttgtattcatttgctagggctgccagaacaaagttccacaaattggttgccttaaacaacaaaaatgcattgtctcacaatttctggaggacagaagtctaagatcaaggtgttggcagtgttgttccttctaaaggctgaaggagaatctgttgcaggcctctctccttggcttgaggacaaccatcttctctctgtgtctcttcccatcatcttccctccaggcatgtctgggtccaaatttcccctttttattattttttatgtatttattaattttttttttgagatggagtttcactcttgttgcccagcctggagtgcaatggcgcaatctcggctcactgcaacctctgcctcccgggttcaagcgattctgctgccttagcctcccaagtagctgggattacaggtgcctgccaccatgcccagctatttttttttcttgtatttttagtagagatagggtttctccatgttggccagactggtcttgaactcctgacctcaggtgatccacccacctcggcctcccaaagtgctgggattacaggcatgagccaccatgcccagccaaatctcctcttctttataaggacaccggtcatattggatgagtcatattggattacatgcccactctactctagtataacctcattttaatttgatcacattttcaaaaaccctgtttccaaatgcagttgcattctgaggtactaggggttaggacttggacatagacattttgggggacacaattcaacccttatttgccaaatcactttttagaatgattaaggcaattaatgatcttcttaaagtgaagaaacaacccacagaatgggagaaaatatttgcaaactacccatctgacaaggaattaataaccagaatatataaggagctcaaacaactcaacaggaaaacatctagtaatccaatcagaaatcaaaatctagtaatccaaataaaaaatcagaaatgaatagatatttctcaaaagaagacttacaaatggcaaacaggcatatgaaaaggtggtcatcgtcactgatcatcagagaaatgcaaatcaaaactacaatgagatatctcaccccagttaaaatggcttttatccaaaagacaggcaataacaaatgctggtgaggatgtggagaaaagggaacactagtatattgttagtgggaatgtaaattagtacaaccactatggagaacagttgggaggttcctcaaaaaactaaaaatagaactagcatatgatccagcaatcccagtgctgggtctatacccaaaaggaaggaaatcagtatattgaagagatatctgcactcccatgtttgttgcagcactgttcacaatagctaagacttagaagcaaatttacagtccatcaacagatgaacagataaagaaaatgtggtacatatacacaatggagtactattcagccataaaaagaatgagatcctgtcatttgcaacaacatggatggaacgaaactggaggacattatgttaagtgaaataagccaggcacagaaagacaaacatcacatgttctcacttatttgtgggatctaaaaatcgaaaccattgaaatcatggacatagagaataggaaggatgattaccagaggctgaaaaggatagtagaggactggggagataaggtgggaatggttcatgggtaccaaaaaaaaaaatagaagaatgaataatacctactatttgatagcacgacagggagactatagtcaataataatttaagtgtacattttaaaataattaaaagtataattggattgtttataccacaaagaataaatgcttgagggtatggataccccattcttcatgatgtgcctatttcacattgcatgcctgtattaaaacatcccacgtaccccataaatatatacccctactgtgtacccacaaaaattaaaaataaaaaattttttaatcttgtcaacagtgtattaggacattgtgttgttgcaatttccttagcatcaagttccgtctttaaaaaaaaaaaaaaaaagcttactgataggtttttagagcctggtaattcattcttttttgttttttgtttttgctccgttgcccagcctggagtgcagtggcacaatctgggctcactgcaacctccgccccctgggttcaagcaattcttctgcctcagcctcccaagtagctgggattttaggtgccagccaccacacccggctaatttttgtatttttagtagagatgaggttttgccatgttggccaggctggtctcaaactcctgacctcaggggatccacccgcttcagcctcccaaagtgctgggattacaggcatgagccactgtgcccggtcggtaattcattcttaagtaaactggccatatatgaattggccatttgagttctttcacaaaatataagactatttccccccttacagtagctattgttgaataagatgccaagaaggacagccagcaatagagaatcagtgcacagatgcactggcaggattaccgggtacatctccacctcactaacaccttctagaggtcaccatgagcgtggtgggaagcaatttagaatcagaagcacaggggttcaaatcccagctctgggactttctaaatgtgctctttttccaactttttgaagcctgtattatcttatacgaaaaatcttatcctcttcacccaacttttcaaggattaaaaaatcctcacatggcatattgctgcaccacactctgtggtgcattatggatgtccagtaaggtgcatggaccctaaagctgctctgaggaccagattctccccatggagtaaacaggccacaggttgttaagggaaccagatgctcgtgaacaacagaccattcatatggattagcgagtttctgcaaggaagaagagggcttgatcatctcattatttgtttcatgtgtcagaattgaatcacagtggagcattcattgacctaaaattaaattacttgtcatattttttattcaaccatttcctcctttccttggtaaatataattttttctcattctaatgaagctccttggaaacatcaaatcactgctttattttaatcagagtaattaaccagtgatggatgaggcacaggtagcacgtggatttggtgggggaatcttcagtaagcaaagggtggtgccagggtggctttacattggtccctggaagagtggtgaagttgtgcccacaccccgaaatgtgtaagatcagctgtgacccctggtggagcaagaaagcaaggctgtgaaaaatataaattgtcttatcattttcttagaaacaaaagacaactctaactcaataattaccttctgtgtatctattctcttagaagtcaaggaaaaccctatctatagaatttatctcatcatcagtttatcctcataaaatagattctttcaaatcagccccacttccaattttgaaatggatcttacccctattcagataaagtctgagttcattgtgcaccttcacctttctgtatgtaggtcttggtcacaccaatggacgcgccaggcccaggctgtgggtgcttcctgggctctctgtctgtcacttctcctgagccctagaggaacactgcacccagctgcagcttttcatatacccctgcacccccagggcacggcccagagggaaacttgactctttggctgcttcagtgtatctggcctaagaccagagctcctgctttggcgatcagtcatctacacaccaaggtccctgagatcttgccatttttctagagtactccccagagagcaggactcagaggcccaacctcaggagacacttctgtctatgcctgtctctctctgttctgtctctctttctatttctgtgtctgtcttcctctgtctgtctctgtccctcctgtctttgtctctctgtctctctatctctgtctctgtctctctgtctctgtctctcacacactcctcacatctgtcacttccttccataacccatggggtacagaggaatatatttttctttttccctcacaatcctccccacaggtagtaaagattgtgtgtgtgtgtttctgtttttctcatgccttcttaattacttgactgatttgctttgggaaatcaaagccagctgggctcaggagttttgttgttgattgtttactgttttgctttgccactgtcatgtcctttctcgggtgcagtagagatctagctattgctggaatgaagaaaagggaaaggggagagggagaaggggaaaaatagcagggagcaaaaagaatttgaccaatttctgagaaaagtgtaaaaatactgtcttcccacaccatgaaatgcctgcattccaaaagcagctttgtgggtgagagtgatggtgattcggtcccgtggccggcagggcagccagcgaagggctgggccatcctgcaggaacaagatgttctgatgcagtgtgggcgagcgtgcctgactgtggggaggagccgccgcgcctgcaaacaggagtgccatgagacacttagtggaaaaagcatttctgatgacagtctccattcctgggcactttcagatgttttataaaattttccaatgtttatttcaactgccaagtatatgatgttttcttcattttacagcagaggaaactaaggtatcaaaagactaagtaacttcccccaaagtgtgcccctaactcttgagtttcctatgacagtgactggcccaagcatccatccaacatctcaagccagaggcccagttcatcctggacttcccgtccttggccactttctcccctgacatccaatcagtgaagcaacccctgttgccggccacccaccatttgcttcacctgcttcaaccaccttgttttctgcctgggtttttacagtggcatatccaggtggtttcctgcccagtcaactctccaaccaggctctaaaaatattgtggccaggtgcggtggctcacaccagtaatctcagcactttgggaggccgaggagagtggatcatttgaggtcaggagttcgagaccagcctggccaacatggcaaagccagtctctactaaaaatacaaaaaaattagccgggcatggtgactcaggcctgtaatctcagctacctgggggactgaggcaggaaaattgcttgaatgcggagccaagatttcaccattgcactccagcctgggtgacacagcgagactctgtctcaaaaaaaaaatacattttatatatatatatatttgggcttctcttttgtctaatggggacacccactgtaggttttactttcaaagaagtcccattcacctccattctcaggaagaatcgtgatgattttctctctagacagtttgttatagcattaggcacacgtctgaaattcccattttcttaccatcagactgaagcatgtttttcagaaatctaaaataatttaaagtttatgaagccaggaggttttgatctagatatatgcccttagcaaccaaaaatattttttcttttaaaagtaatctattttattttacctgaaacttggaagacacacacagtctgatccatttaattctttaatgagaattaaaatgtcagtccatcagtctgtttcaactttccacatggtcattccaaaactatggcaagtatctttttgttatgtattttctgagccacaatctgggacagagactgaagctggcgggcagggcatggtgtgggcgaattacagcgtggagctccagggtcacatctggggtcctccactggctctgaacggtgctgtctgaactcttgagacaccctgaaccccagaggcagcaagctcccaggaggaacaaaggttaaagtatataacaggaggcaggacatttgccttcgtttttggaaatattttttaaaataagaaataagggccaggcgcggtggctcatgcctgtaatcccagcactttgggaggctgaggcgggcggatcatgaggtcaggagatcgcgaccatcctagctaacacggtgaatccccggctctactaaaaatacaaaaaattagccaggcatggtggcgggcacttgtagtcccagctactggggaggctgaggcaagagcatggtgtgaacccgggaggcagagcttgcagtgagctgagatcgcgccactgcactccagcctgggaaacagcaagactccgtctcaaaaaataataataataataaataaataaataaataaataaataaataaaataagaactaaggagctctcattgagcagaaagtgttggctgtttcctgactcttctgatgtcacttctgctccatcctcacctgctctgccctttgccctcgtaagctacggctcccccatctccacctcattcatcaggcacttcgggcgtcctgagcagggcatcatgctggttgtttggcatcattttctccttcttcagctccactaggtagatactgttcactcttcccacatgaggttcaccatcttgcccatggccatggacagcaagcgctagagctgggatgggaagccagggtctgtacacgtccttttctaagccatgctgctttaaggacctgatcccgctggagctcctgaacgctcagactttcagcacatcaagaactgggatacatcttcactatgagatatttaataccttaatctccctatgggaaaatgaaagttctgagaagatgggctgccttcaagttgaacaaattcaggcttgcaatcagaggcctgattttaatccctattttgccagtttttcgcactttggataaatctggtactccccaccataccctggaaatcagatactagtatatcattcataggaatcaaccgaaatcattcttacaacaagcagtctttactgtctatttcctggtaagtaagcactgaggtagggactgagtttagggtctgttcttcgacataactcttgccctgatgggtcctatgtcttgtgaggtaggtacttggaaaacaaatgtcaaaaatataccattaaaattgtgctgagatatgcaaaactcctggcacatagttgatttctccataaatgatctccttactggcttacaatttgactgtttaaaaacagaatcatgggccaggtgaggtggctaatgcctataatcccagcactttgggaggccgaggtgggaggatcacttgaggccaggagttcaagaccaatctggtcaatgtggcaaaaccccgtctctactaaaaaatacaaaaagtagctgggcgtagtggcgagtacctgtaatcccagctactggggaggctgaggcaggagaatcgcatgaacccaggaggtggaggttttggtgagctgagatcatgctgctgcactccagcctgggtgacagagtgagactctgtctcaaaaacaaaaacaaaatcgtgaaaaacagaaatatagagaagattgttctagattaaagagacatgactttaaaaggcaatgtaagatccttgactggattttgtattttaaaaatctataagaaggccgggcacagtggctcacgcctgtaatcccagcactttgggaggctgaggtgggaggattacctaaggtcaggagtttgagaccagcatggccaacatggtgaaactccttctctactaaaaatacaaaaattagccgagtgtggtggcacatgcctataatcccagctactcagaaggctgaggcacaagaattgcttgaatctgggaggcagaggttgcagtgagctaagactgccactgcactccagcctag

SEQ ID NO: 5665 - DNA, 374399 bp, Homo sapiens
  LOC392027 gene - 52510933 - 52845331 of chr7; NCBI Entrez Gene ID: 392027; Build 35; sequence includes 20,000 bases upstream of initiation codon and 20,000 bases downstream of termination codon of the gene
attcattcaacaagagatgattaacatcctagtcatgaggaaaatgcaaatcaaacccacagtgagatactacttcatacttattattaatagcatggctacataaaaacaaaacaaaatgaaaaagagaataataagtactggctatgacgtcaaagaatcagaaccctggtatattactggttagaatataaaatagtgcatccactgtgaaatacagtttatcagtctcttgaaaagttaaagatagaattaccatatgatgcagtaattccactgtatgtatatactcaaagtactgaaagtaagttcatgctcaccactaccatggacctgttgtttctctactggatttctcagaaccaccaaccaagctccactcatggctgctgcctgccctgagcctcacacacccaggcacctagagctcatctcattcttgttggaggtaaaggagggcttaaagcccattttattttgttcagtcactgagagaaagcagtctttgatcctagagttaacaaccttccaatttcccctcaggactgagtgacttctggagaaaatattcagttctaaaactggcaaaattttgggccaatcaggattaattggtcaccatattttggtccccaaaagaaatacagctcttaagtttaaaatttgttgctattgtttatcatttggttctcaatcacaccattcttttgcctagggaacagtcccttgtcagaaatgtatcttgaggagagatgagtttaaaaagtcagccacacatgatacctgactctgtcatggatttcttacctctgagcccttgaccttgttcttttcatttgtggcaaagttaactttagtttcagggggtatacatgcttgtttgttatgtgggtattatatgtacaatggtgggagttgggtttctagtgtacccatcacccaagtattagacagtgtgcccaataggtaatttttctactctcactcctatccctccctccccatttttggagtccccagaatattttctctttatctttgataaaggtgacaaaaataaacaatggagaaaaaacaccctattcactagatggtgctgggaaaactggccagccatatgcagaagaattaatctggacccatgtctcttaccatatgcaaaaattaacccaagatggattaacgacctaaaaataagacctgaaactataaaattcctagacaaaacccaaggaaaaactcttctggacattggcctggaccttgttcttgagtctgactcaactcttattggaagttaccaagtacagccatcctggtacactgtggtgcaaaaccataaggctctctacttaacaagggaacaacatgtagttaggcagattcattgttgcttcagagccataatgcctgaactgaagtcttagccctgctttactttcaaccagtaaacactggtaattactggagaaattaccaaatggttaatttctccatttggtaatgaaatgaccaccacagttctatattttattcatcatatagcattattcaaagtagaaattgagagagtgctgggtaaaggcccttgtaggacactagcatatcaggaaaacacaaaaccttttctctagtcctggtttatctctttggccaggactccgtctttcccagcggcttactagcaaaaaggaccaagatcacatgactgattttaaccactgtttctcaacctacatcttattactccccaagaagcctttgtagatattttttccaattacctccactatgaaatgttcatgtcattgttcatcatatacttgtttttgtactatatatatctgtgttttataaataaaaattgtaagatttttttttcttcccaagaatctattaccatctccttgggtttgatctcatcctgttatgacctcatagtttagatcaatcatgattcatgctctgcacctgggtacattgtgaaaagagtaagttaacaaaatagcgaggaagaagaggcccttggcttacatctatcagtgtttgccacaggccacctttggggtcactacttaaattcagtatttattcactagtcactaacaaacattattgactatttatatcaagttttaaacagaaggtggagatacagtggaaaaccaaacaatttaagacattgtactctactgaacagtttgatagggcgtattctaaaatgtttcagaaccaaaatgtggccatattatgtataatggtttgggtgatgtaatataagatttctctcctactttctttgtatatattacacatcaagtagtaggacagaaagtgagtttgagggcagacctttgttaaaacagaattacaaaaatctaactcctgtacatcatcatcatcatcatcatcatcattattattattaaggcaaatcattaaatcttgtacagacctaaagagtcattatcatcatttgagttttgagagttcataatcttccttgcacattattcagttagtcatttgataattttagagaatttataaatcaagaagtactggtctcatcactgaataaaagttgctgtgaacaccagaaataggaacatgtgactgataagaatagtttttagtttagcatttgtttttgacctttaactctataaaacttcaataatgttatttatttgtctcctgcaacttacttagaaatgcgtgacattttagaagaatcactaaaaatacctttccaaatgctcacctatataatcacttttacataataaaatgtaacatattgaattattgtttgccttacagaattttataatatatggtctgttttgcttatattgtgttaaaatgaactcagtcattgtaacagtcaattcatctatcaacaaccattaccaagcctaccatttacaaggtttgcacattgaaagacagcatggctcaggattacttgctaattgtgtggcagggtcagtttgtgaaacagaaattaagaaaaaggggagacatcagtgtaggctatggattcttaaaaaaggctgagatggaaagtcaaaatccaggccatatcttcctggaataaatcatttgaaatgagaagaaacactttttagacatggtgaaaaagaaaaacaaaaacaaaaacgaagactgagatttctgtgtgtgtttgggatgggagatttgtgagggcatgtccacctggagaccattcagacaggaatgcttttcgcatggcacttctgttctgccacaaaagtgctaccaaaggcaaagaggttaaaaatcctgcccaaacaggttttccctctgtcttcatggaggcaagaatggattggagtaagccaatgagcagtgacctggtactgagtgcccagcggagttcatttaccgcctgcacctcacctggttctgcttcaagaaagcctggacatgcccacaagcaagctttgtccggtaggggatcaaacctttcttccaaacctactgcacctcttcatgtgtccttttctccttatcaagtaaagtaggcttgaggtcctttgaaccttcaaatgcatatgaatattaaggacaattggattcctgcattactcatgcttctgccacttacccaccgaacagtacaagtgtgtgagatgctcagggtctgtctggaactcctgttttccccctctctgcctagaggactagaatattcagttgtatattttaagagatttgctttatcttgaatctgcaggcattcatcaccatatgcagcagcttgaaaaataattatattcaaaagacatggagcattccacatcacactgccaagcagagattagaagggaaacctacaggcttattggaatatctggattttgagacactaaaggccagatatcagacatttccctacactatttacattatatatgtgtgtgtgtgtgtatatatgtatataacctaatttaaattataattatattattctaattatagtttaataatatgtaattaaactacatataacttaatttaaatttaatactaaaaataaagaaaaaatataaaaatggcttacacacatgctaagaatctgttctgttcacttttgtaaatatttcctccttcaacttaactctgtaccccttcccatactgcacaactcaccttcctggtagataattgtccgaaatctctgtcccatgcgtgtgggattgggaggaggctgtgattttctcccatgcccccactgcccagtgctgctgtaggtttgttgtcctccttctaagtaatatcctggtaaaatattctgagcaatattgaaactaagtgaaaatcactgaagacttacatttttttccagtctgagatagccgtatgataatatcttactgctaagtgagtagatatcaaaatgaaaaaaaatcattaaaatctgacagttaaaaaagattgagtattcatcacgaccaaaaccttcattttatctatgagaaatctgaggcacagagcactgtatgattaggtctacaagaacctgatagtcagtcatgattagagcacaatacacacttagttgtttttctctaactaatatctatggtttctgtataagctagacatatttaatcaatgaggaagacattatatttaatttaaaagaaagagctagaaagaaagagagtgggacaaagtgagaaagccaaacagttacttgttgaaggatggttttttggttttatattactggcagtagaatgcagaagagaaactcaggaaagaaaggcatgtatatcagatttcatttgaaaaatcagccatatcatgaaaatagaaaaggttaaacagttattgagcattggatgaatgctgggtcatgtatatgttagtgttcatttcagtttcattaacatattgttactatttaacacatttaaaatgcattgtatagctgtaaacatattggaaagaattacgctaagtgattttttcaacatcaaataattatccactagcaggtctctttgactctgaagttcttgttcttcctactacactctgctatctctaaaaggaatttcaaatcttggatgaattcctcactgcaactttcaatttcactttgtaaagtttactattgttgttgttattgttgctactgttttacaaatactgttttacctaaaacttcacgcatttgtcattatgtaacttttaagatattgcatgtgaccttggaattttattggtgtctagaagaaagggattaggagcaggttctgtggccttgcctgttgcctcatacctcaggatttgtctcttggcctaatctttttggcaaaggtagctcacaaagctatgaggatttttcttatcctagggctaagatgaaagagaatacaaccaaggacctcgcacctcactgttgagtctatttacttaggaatgaataactgagatgcagctgcatgagggaatggaaacccatcgctcaccttaaggggagtgtgactaacaggcatgaacgctgaaggctgtcagagcccatggctcctccaagcccacactcacctctgcatcatcactggcagccacactgtcccaaacacagggtgacggggatatcagaaacagcacttggagtcacagatgtctgttatgcagttgctgagtgtactgctctagttagtgcctcatattctttcataaagcttgatgaacttaagactgcacagagcctatggtgtctcaggggtttggttgttaaccagaacccaaaaccactgaaatggttgaacagagtgtctgtggcagtgacatattcggtgttcacattgaaactgtgcatacacagtttgcaaaacacatcatgccactcaaggaatgcacattttggccagtttgggggtctgatagcccttctcccagaggtgttcattaagaaaggaccaggcccggtcactgttctgaccttggcgtttcttcccaactttttctccactttgattattgccaaactttcagattattcaaaaatatatttgggtgcctctcacttcctcaactgttttattttcaataactttttttgtccttttccttcactacctagtcacatcccaaatcttgccattactctagaaactataccagtgcagaagtgttcatttcaaacaagttacaaccattccaatgtacctgttgaggtgcacagatgaataaatctctgacttcatgaagactcgcttggtgtcctacttctctttctacctatctttaaataaatgtaataataaacaatgtactatttttcatctgacttcttttgctcaatataatgtttatgaggttcattcatattgtcgcaaataattactatttattcatgctcatatttctataatattccattttaaaataacaaattttatttaataatcctcttcttattgggaatttgactcatttccagatttcagttattacaaaaagtgctgctatgtccatttttccacatgcattttagtaaaccctatatatatgtatatacaattctgtttggtttattcataggaagggaatgatagggtcatgggacttgcgtacgttcagcttttgtaggtaaagcttttgtcttttgaaggtcagtttgcatagtctgaagatgtttctaacacctccacacttttgtttgatcaatgactaagtcatcgtgtaggttgcaatcatatctaatgagtaaaatgtccataatacaaacaaggaatgccatttggaggtggagttgcatgaatatttacttacaaaatagataggctttttatgtaacatccatggaatttctccttatgtgcatttctttttgtaaacatcttctcatttggttgaagtgtaaaagtacatttactagaagagtaaaatacttcaataattaaagaagatagtgaaaactgtgaatttaccttcaaaatgatcattaagatcttcaaacacttaactagggaaacagattagagtcactgcaaatattgagagtgtgtgaaattacacaaaggatcacgttgccaaattggattcacaagattctaagatctcaaccaataccaagctgggctaataatttccaggatagaagcaaacacaggcacagaagaagcaggagagatctagctggcatagcaacccaggtcctttcctgttgccctaggattaattctcagtgattcaaataaagaggttatttgaaaaggtaatgttggcagccacattactaacataaagtgaatctgtcttagctatgaaatttcaccattgtatactcaggtatttacagaacttacgtggcatttttattaggggatctttctccataaaaccatcgattccaggttggtttattataatcaatcctagacactcaaggacatacctttgaaaacattccgtaagtaagaactctcttactagcaaatactatttgtatacttaccaaacagagtgttaatatgtttacatgaagatatatcctatcaccttttttctatctttcttggctatgttacatctggcaaagcaagaaaatgaatagtagttcagctgctaagccttttcttctcatgatattagctaactaagttatggaagaatactaaatatttaagcaaaatgtgtgtaaaacataagcaatacaaggcagaaaagtagcaattaaattaatcataattgcaatgtttgtaaaatggttttgtattttagcataaaaaaattacatgagataatattttgaaactctaaattttagttattcaattctacttaggcaatctatttttaaataaaaagtcctattctcaacaaagagaataattttcaccttactattttaagaatttacaaaggaaagaactgcaaatctattaataaaggccattataaattatttattattcaaacatagtaatgaattcattgtatgaatgagagaaggaaatgttagagaatattaataatgaaatttttttcttgcaagcttcaaaaacactagacttttgacattactttaaactattaatctttatagttttgagtcaatggaagcttatcaaaatgctttatacactttcacttttttagttattataagcaaaggatttttgaaatttgactaaattacggatctaagcaaaaagttttctcctgaaaaagtaacagaaaaacatggttagaaattgtgttatgatgtccacacacacacacacacacacacacacacacacacactctaaaaggtttagtgatttttaaaaatggatcatcaaaaaacattcagggcaaaatggcttaatgttcaaactaatgatgtgtcttcttttagcatactataattgatcaagtatttatagaattaaataataaagggtcaaccaattattattattttactaactgagtattaactgcatcattcatggtgtgaggcactgttgtatccctggggattaagatgaataaaacaaaacaaaagcaaaaacagccagccatccctgcccatggagcttttattttagaagacagactcaaatagtatgcataattaaatgaatgaactgtatgttaaaatgacattagtgctatagctaaaaaaaaataacaataataaaagcatgtttctccttgggaaatcaagagaggagaaagacctattaatgtgaaacagagtggtcagagtaggatcccaataactgttgcatttaagttacctacatgaatatgtaaaagaagtgttttacaggcagaaggtatagtatttggtaagcctctgaggtaagactttgcttgccttgttaaataaacagtgaataaaactatagagctagatacattgaatgatagggagagaagagagaagagtcagaaagctagcaaggaaggacctctaaaaattacactttctcatacagaatgtagtccatttactgaaaatttcagaaaacaaaaacaacttgaaatggctgagtatctctgaaaaatcaacttatccataaaataatgagaaccttagaaaaattgtcaaagtcatctttatcagaactctagaaattaaccaaaggcttgcaacagtcagaagtgtatttattcaagtaaaagtttcaaatgttgataagaacatggagctttgtagcatttcaactcgccctattccctagttccacagtagccttaaaaaacagcctagggaacataatatccatgaatatgaccagcctttcagccgctgagcaaggcagaaaaggcttagagttctcaaaagccccctccccagaaaattgtaatgtatctgacctttctggcagttccctagaaattcctcattggaggccttgtatttatttgacatgatttggaattcactcactcaagtagcttttcacctgggtgtttacagaaaaaaaatctgcagcaattgttttacattgcaggtatctgaagcagcaataacagttaaggctagtaaaaagctggccaaaaattttaaatggaaaatgagatgtccagagaagtctttgaaaagctgatattttcctgagaatctagaggatcacactcatgtgcagagctgtatgcatgtccaataaatacctgagaaagcctaatatctcaccactggctgaccttgaggatctgtgcaggaaagtagtaaaggttaaggcatagttataaactgctggctggagtattgaaagggtgcctattctgacttcagttcctgtatcgtgattcaattctgacatcaactacccagagttaacatcaaactctgcagctttaagagtagagtccccaacaaggctgaccccacttcagacaccaacagcaaatggtcttcacagaacacctacacttctggccaactgactacaagtccagagagcccccttgaccctctctacactttgacaaattactggaaaaacacacagaaatagagaaagtatatatatgtatgatcatagttttattataaagaatgcaaatcaggaactgccaaatgaaaagacatacgggttgaaatctgggagagttccaaatagagagcttccatgacctctcctcataaaatcaggatgcatcccccttgcagcacccattgggaagccccaccatgctcttatgtccagatattttattgggcatgactgtggtcaatcagtttagactcaacatccagccctccattcactcacagaaaatcaggtttgctcaaattcccaaccttctaatcatgtgtgtggtctttctgtttaccagcccccgtcctgaattgtcttgttagcatagtcagcatattcaggtgtgatccaagggatttatgaataacgaagacattcctttcatttatgagccgggaacaacattcttttcatttatgagcctggaacaaatatcagaattcttttttattatacatcaaggttcattacacacattgtgtccctctgtacaggtaagagattaatttgttcaagacatttaagaaatctctgtccaatcattagctgaccaccaagctaatcatgaggacagttcattaggcacaaaataaataataaataataaatactttagagcagttattattgttaatgctgtttgtttgtttaggtacttttaaacaaacagcattaacattaattaccaaaacaatactaagtcctggattgggggaaatctgagttccagatatactttataatatttaaaatattaagttttcaacatttaaacaataacaaaataaaatgaaataagaaagcttcaccacccccccacacacaccaaactatcaatagcaattttggttggtgtgtgtgtggtgggggacatatattggacaaaattttaaatcaggaatttaaaatatgttcagataactaaaagaaatcatggtaaagaactaaggaaaattaagagaataatatattgctaaaaaaagaatgaatttagaaatgtagaagtaatgttgaagagccaaatataaacgttagagttgaaaacaaacaaaataatagaaataaaatattcactagaaggcctcaagggcatgtttgagctagcagaattggttaggttaggattaggtcaattggaatcatccagtctgaggaaagtaaagaaaaggaatgaggaaaaaataacagaacattagggacctgagggacagcatgaaggctaccaacatgtgcacagttggtacttccaggagaaaatagacagaaaagagctgaaacactacttgataaaataatggctcaaaacattcaagtttgattaaaaaaaataaacatttgtcagcacttaaaagaagttgaatgagctccattagattaacttgaagagatcgacacctagccacatcataatcaaaatttcaaaagccaaaacaagtagagatacttaaaaatgggaagatagaagtaatttatcacataaagggattctcaaagagaatgagtccatttttcatcagaaactatggaggcaaaaaggcagtgggatggtatattcaatgtgctggaagaaaaatagtgtcagtcaagaattctatatccagcaaaactacactttgaaaacagagaagaaagtaagaatttatagactaataaaaattgaatttgtcaccagcacatctttcatacaaaaaatactaaagtccttcagaccgaaataaaataatattacacaaaaccttgaattcacatgaagaaataaagaacacaagtaaaagtaaataattgtgtaaatatggaatacaggataattttttttttgtttgtgacttctcttttatcttctacccactttaaaaaatgactacatgaagcaataattatacaacttagtcaaaggcttataatgtataaatctgtgatggtattacaataaaaacacagaggaggaaagcagaaaaggaaccatatgggagtaaagttttgtagactattgaaattaacttggtataaattcaaagtttatcattatatgtatagatgttaattttactccttactgccttaccactacaaaagtaactttagattaaaaaaatacaaatagcttaaatgtaaaaggacaacaagatcatatcatgtgaatagtcattaaaagagagcttgaatggctgcattatcgacagttttcagacacaaaaaggatattttatatgaataaaaagacagactcatcaagaaccataataattatggatacatatttagctaacaaaaacaaaacaacaaaatatatgatggaaaattgacataatttaagagagaagcagacaacaataatagttacagacttcaatagtttactttcagtaatggatagaacaaggctgatgggcaaaagggaaatagaagatttgaaatacactgtctaccaaccagacctaacacatgtctatagaatgttgcactgaacaacagcagaatgaaaattattctcaagtacgcatgaagcattctctaggacagaccatatattgggctataaaataaatattaataaatttaaaataaaatatatagagaatgttgttcaaatacaataaaatgaaaatacaaatttaaaagaaaaaacatgacatgctaaaatatggagtacagtaaaaaatcagtggttgaaaggtaatcaatagctttaaaaaatagaaacaattaaaatcaataaccttatcgatcatgaagacactggggagaaaaagaataggctaaccataaatcaagtataaaagggttaataataaatattaaagaaaagtaaggccgaacggggtggctcatgcctgtaatgccagcactttgggaggccgaggcagatggatcacgaggtcaggagatcgagaccatcctggctaacatggtgaaaccccgtctctactacaaatacaaaaaattagccaagcgtggtggcaggcacctgtagtcccagctacttgggaggctgaggcaggagaatggcgtgaacccgggaggtggaggttgcagtgagccgagatcctgccactacactccagcctgggtgaaagagtgagatcctgtctcaaaagataaataaataaataaataattttttttaaaaaaagaaaaataaataaaatagagaatagaaaagcagaaaaaaatggagccaaagttatttcttgaaaaggttaataaaattggcaaatctttagccagactgaccttgaaaaaatggagaagtttaacaaaagcaaaaaaaaaaaaaagttaaaaagtgattaagaaaagaagaaagatgaaaaggaaaaagagaaaaaagtcattgagattagaaaggaagaagtaaacacagttgtatttcagatgccatgattttgtatattaaaaaaaatacggaattcactaaaaaatgtttaaattgaattagctcagcaaggtttcagaatttaatgtacaaaactcagttgctttcctttagcattaaaaatatgaatattaaattaaggcagtaatttaaaataccgtgaaaatatttagcaatatatttgacaaaggaattgccctacttttgcattgaaacctataaaatatcatttaaaaatattttaaaatacttgaataaattgaaaggcatcccagggtcatgaattggatgatgatattgtttgaatggcaatactccccaaactgatctatagtaaccacaagttcagaaataaaaatgtcagtgtagtcaacaattttaaatttgcttttgaaaatgttcagcaagcatctccaagatgtgagcacagttcagtttgtgtgattgacttgatgaaattccatcaatttcatcaaccaaatcttcaaatctgaaagcagttgaagaagagataaatttttactttgtagaattacagaaagagtggataagaagcttaataacctggtggcaacctcaccagcagcagtaatacatacacgctgaagtagacaaaaagtatctttctcttccaaaaacttcacttgaaagtaaaagtcaatttattatcatagtagcaattgaacagctggcagtactaataaattattattcctactgcaaaaagaaactaagaaacacaactaaaactttggtaatactagtataataataagcattaattttgcataaaatttctgttttattctcataagcagaatttcatttttgattatgctctttgttgtcagtcctgacttcaaataaatactgattttcaatattttgccatttaacatttggacaaaatatgtatatttgatgcctctctaccctggattgtaagctttttatgcttatccttcatctgcttcctccagagatatattgtctaagctgtgaactcattcatttatgtagagtgtgaaatatatcttcctgaaaaggatgatattaaaatgtgctaacttctcccttgatttatgtttccttcattgtgaatagaaatttgaagaaaatgatctcttagaatccctatctttttaggaaagaatttccaagatcaagggatattgatatcagttacacttagtgatttttgtgctattgagtaaattcactcatatatgtatccataggttggtaaagtaaattaagaaaataataaaaagacaacctgtggttagcatataggttcacaatgaatctatttttaacaagatgtcccaaatatattcacctttcgcacagctcaaaactcaatatcataccctattctggtttagaattaacctattcaagtggcatgatggtgaatatttaccttcactgcttttttcgtaaactgcaaactttcacatttacttgtagctatttaaacataaacacctacacaaatacatcattgaaccttaaattttatgttactttcatttagtccatttcacttatgacagttgctttaggtaaagttaatagcagtagctcacttctgaactctaatataatgtttctcaccatctggctgaataattttattaattaatacattgctcactgcttctaagatgaaaacttacaatatattatcaaagtccttcagagaaatatatctcagacatggctttcacatcacactcatttcaagcaatggctacaaaatctattttactttccctatttttcatgtgatgaatgatacaaggatcaaaatttatttatgaaattttgctgaatttctgggatgataaactcagtctttgatatggtttggatgtgtgtccctgcccgaatctcatgttgaattgtaaatccctggtgttggagtagggacctggtgggaggtgattggatcatggggtcagatttcccccttgctgttctcctgatagtgagtgagttctcacgggatctggttgtttaaaaatgtgtggctcttcccctttttcctctccctcctgctccagccactccagccactccagccatataagatgtgcctgcttccctttgtcatctgctatgattgtaagtttcctgatgcctccccagccatgcttcctgtatagcctgtggaactgtgagccaattaaacctttttcctttataaattacccagtctcagttatctctttatagcagcccgagaacgaatattcttcaccctcaggatttaaagtagcagtagagggaagcagtgcatccaagatggactatcattctgaaaaatttaattctcaccaaaaagaaaaccctcagtgagaaattgcagtttctgctttcactgtttaaggttactcatgatactctagatctccttgatcatctgttatagaaaaacaaaacaaaatggaaattgttccatatttagaaatgtgggattcaatcctatttatgtcagtttccttctattgtcctttccatctgagtaaaatctaatacttattttaatttattttttaatcacaacaccaccaaaacttgacattgcatctaaatttcagaaatgcataaatgtgaaaaaaaatcttgtagttggtgtattataaaacatattaagtgaaaaaagtaataatattatattgcattatgaccataaaatgagcatttatgttaattattaaattaacataacttcaacaatatgtatgagtagacaatatttattattatactttaaattttgttgatttcataagttggtgaaataattaaacctagaaaagtgccttaccatgtttttgttgtaattaagaggtaggattccagtgattttctagtaatcactgtaatagtgagactaatatgtttctagttattatttcctaaagcttattttttttcttttttttccctaataccacatatctttagaaattacaccattaaaaatttgtaagcaccatgttccggaaacaatgtttctggatagattctcccttcccttcccatttccagtaactggtccctcctcctccatatggcattcagagaatcagccattcctataattgccacaacagtcctagccacggccaccattgatcattccactctgggagcctctgatccctagtgttccagttctaattccttacctgaatctgccagatgtctgccatagcagctgaaacattttacaatttcactagtaagtatgaagcatgaaggttccaatttcttcacatactcacccacaggtaatattccatttttaaaaaatatagccattctagtaggtgtgaagtgatgtctctgtgtggttttgatttgcatttccatcatgactagtaacgttgagaatccttccgtgtgcttgttggctgtttatagatcttctttggatgcatgtgttaggattttaaaaagcagcacaggacacctggtactagtgctgcattaatctaggctaggctaggctatatgataaacacaatcccaaatgtacaaactttgacacctaaaatgttttaaaaaggtaaaactctcacttgcatgtcttgggacatgaattatgtatatgttaatctggcttctttgtgggaaaggacaaagaaattatcccaacaatagtataatactgtataatatagttggttttggctgctttttgcaaggtacaacacacacacacaaatgtgagctctgcaaataacggtcaatatgcaagcagaaataataaaagattctagaaaaagtgtaacaatttaactttttcaaatatgagaaagaccaataactatagttctctaaataaagagatatttctgaaaaagcctctgaaacacaggctcaagtgatttaggttaaacatgagactgagggtatgtgtcctgtaatgactgtaactgcagatttgggcattgctttctacttattattcctggttatgcaaaccccaagattgcccattaacttagaagaaacagctgtgtgtaaggagtatacgtaagagaaaataacaaaaaacatctttgagaattagaagttgacagaaactaaggttatggatcgaccacaggcaaagacataaaaaagcccactgggtgttttcttttcttttcttttcttttttttttttttgcaagttgaatgtcggaagaaagaaatcgtgagccttatataaaaaaatcctagacttgctgagcctaggaataaccctttggtctataatttattatcagaaagtgatttgtgaaagttttgaagccctcaaagacggtatatgcctttatgcttttttcagatatggacaaggaggatagtaaaaaaacgaccacccaaaagtggacaagattttgctacagagaataaaagataaggatgatattcagaaagggagaaacattgtatagtgaaccatcatcttttgcccaatgggtaggtggccctcaaagagttttcccagggaaatttcctgtttcccctatattgtttattgtgtgttgggggtaaggtaagagatttcagaaaacgtacctttttgttatctagttttctggactaaaagtagccatattgggcttgatggagttgccttcatatcaccccaagttcctaaactttaagcagaatacaaagatcgggttgaactttgtgatgtcctctattggggagttctttggtgctttaaataaatgtccacaaattgactgatacttttccattcaaaaggtggagtttgattatcttcctcttgagtgttggttagatgcagtcatttgcccctgcagaatagaatttgatgaaagtagcctgtgtaatttcccagataaggtcataaaaggaattgtcttcctacttgctctcctagattacttcctctagaggaagacaactgccatgtcatgagaacacacacagctctataagaccacatggtgaggaatggaggcctcctgccaacaaccgtgtgtgtgtgtgtgtgtgtgtgtgtgtgtgtgtgtgtgtgtgtaccaccgtggatgaggatcccctagcccaagcaagcattcggataactgcaatttcagcggacaacttgactgcattcccatcagagaccctgactcagaaaccccggaaaactccttccaggttcctgactctcagagaccgtgtgaaataaaaagtgtttgcagtttaaagctgtttggagtgggggaaatttgttacacaccaatggaaaactaacacaggttgcatatgctgtgtttggcaaaggtatttagtgaccacgggatatccatttactctccctcatttctgaacccacttcagtcacgcaagtgaatggccagttctgctcagcaggctttaggcagaagcagcgcgtgacttccaaagagaagcacagaagagtgaacagttttccaaatgatttcaccgctcaccctgataatggtggaagcctggcgttgagatgctggagccggaagttggaaacaggcggatccctgagtccttgctggagaggactctcatgagtgaggcatactgttattagtataattttgtattaagcctcagggtttccttgtttgttatcacagagaggctggcaatcttcacaggacggtacagatgttccactgggtggaagtggaggcggtgtctttgtcaaggcccacagtcggcccagcacaggaccaggaactcggtcctcaccgggaggacacaaagtccagacctgggagtgccaccgccacgcactgtggaattttgtcacagagctgctgttctttatcagagtccgttttaatgtaaatctctgaagagaagaacactagtcaagatgatactgagtgaggaacagagacccctggatggggttttctcggaattctgcttaggttcgcagggcagtctcctgcaaatcactcagaagaattggaattaggatatagacccaaacaaccaagcaaggtaaatgcacttcatttgcatgcgttcttctgagcgtcttctaaatccctctgcgtttctgctctggtctgcgcctaccacacacagggttcctgagtggagtccttgcgactttcctgaggacccaggcagcctgggggttccaaggcgggggctgtggggtcgctggggacccgacccgctctgggtgacccgccagctggcagcctctgctacaaaacacccgcgccaaggaggagctcctaatgccttagactaacacggtgatgctgcagtgactagtccatatgcaagaatgcagcactttatgtttgcacccctgaggagtgagagctggtccctagcatccgggtgacacgccccgtgcctgatgctgggagtttaagctttggcctccgtcttgggactgacgccagccccaggtgccacgtgttgaggagtggcccatctgttagaagtggcctggtgtgtgagggacaggcctgcagaggaatattcccagggaggcagccgtagctctagtgcacgtgaggcatctataaagaaaaaaaggacacaaaacgcctctcctggtccacacagatttctgccttcttcgggaaatgtcactaaggacctccaccgcttttgtattccttaccccaccccaaccacagagggctcggagcactcacacctgtgaagtcaggacttgccgccaccctcctctgttgcccctgtcctcccattccatgcctgaggagtcgggcaggcggcccgcccaggccacgctttccgtgtcctctggcccgcgaggctttgcatggacagaaccaacggcgagccgcgccctggggactccaggctgccgggatccagtcccgcctccagcgcaggctccaccctggggagctcccgagaggcctgcgcgctcctgccactctccaagcctgcaaggaagaaccgaaagacctttattacattccctggatgtttgcatgggacagtgaaatcctgccctggaaaatgggagctgacagtagcctcaggagtccagcaaggaatgaaatttcagtccctgctatgagagtccaggcggagatgaaggctgatggcgccttggatgtcctctagaggtgaccaaggacgaaggcagatacatcaatgggcttggcagtcatcattcattttgaatttgttactagatacatgattttaactaagaactgataaataggacatttttgtttgcttattttcaaaattagctttgctttttattggcaattttttttttctctgtagagaccctagtttatttttaattccatagacatgggcaccctgcttcacttttgacggaatagggtaaaggcaatgagagaagaaaaatataaagtaaactagctaagaagatcaattcgttggaggtgaagagctacggttacagggattcagatgggcttgcactatgaccaaatcagtgacttcaccaggggtcaagaccagaaagctgagctgagctgcagaggcccggcaggcccccaagcagggatctggagggcagcagccaccacagacagatccttcagggttttggtaaatagatgacatcaccaatgttgattgtaaaaaaatcaaatgttttctacacagcattccttttctatttcttctaagaaagtgaacatattaaaaataatatttgtgaagtgctttcctagttacaaatttcattcagagatacctctataatctgaatataaactaatgcaatcgattttgtggatttgtatgaaatgcactaatgtgtgaaaatgcactgaacaaaattaaaagcatagtgaagccatgaataaagcctagtttctttttttggctacaatttataaacataaatacaaaccaaagtcagcggtggaaatatgctgcatggtattttttaaaaaccgaaaaccaagtatctccaaggataatatactctgtggaatgagaagtgaaaaatatataataaaagcattaaatccctatgagggaagaacacattgtttctcccacacatctttgaataagttttcctccttgctttaatggtttccattactaacccaggaataaaaaagcaaggctcaaagcgatcacaggagagcacaactggcctgtggtgctgttaacagatttgagtaacccatgtcactattttccaaaatcccaaactgagaatgctttatgcagtctgtcgagaaagaacagaaaactggttatgaagcaagtttgtgttgtgttgcaaatactcacaattacagttgagcatgctgcacatcatgtcttcagttcagggcttgccatgaatctggatgagaaatccattagaaaacaaaggaagcattccagctctccctgtaccattgttttctataacaatccaaatcaatcaatcacactgtttctggagaccaggacttggaactagcctttgctaaaggagtattttatattatgagaaaccatcaacaaatgcagagaaagggcaaaggccttttccatttcttctttgacttcactgtaaatctccaggtgtttatgcacagctcctgagggacccctctcctgaagcacttcattgttcttttcagaaaggataaatgttctgtatacgggtttgtgtaatgagctcagaatggattgttgtcattagtcataggccctatgtgaaactcttaatcttgctgaagatatttcgagttaaattccaagaaatagtctcgtttgactttactatttatggagaaggagaagcaattgacctgtgtgtccttgagaaaggtaattgaactgaggacatttgactccgctggagtgattcgttaatcatgggagtgattcaaatgcagaaggagaatactttctgtttcagcagagaaagtgctcaaaacagggagaaggagttttgaagaaattatacctaaaactctcctttcttttgaagttctgctgacctacactaaatccctctcaatccataatatggccatcccattagctttttgcattctgggtggattttggtatgtaatgagtgcactggcattttgcagttacaggaatctgcaggtgcctacacaacagtcaaactacataaaaaccatcttcattatcatcatagctacttattgaacacaatttaaattattattcatttattgagcaccttttatgtatcatctcatttaatctttacaataaccttacggctgcatactggttttgactcatgctaacctaggtcccacagtgggcaggtggtcctggaatatgatctctcagattcaccagtctccctggaatggcccattttctgcttcttgatatcctggcagtgctggaccttttgtttcccaagggtttgtcctatactcttaaagggtctaaacattttcctctttatgcatttgattgttgttcactgctcattagatgctaaacacaagttctctgattatcttcacatatttactttcctctccagtggtcgcagaaagcagacattcaaaatgccatgtgacctaagaaagagcaaagttttctcactaaactggttatcctcaagatgtcggatacctgtgctgcactgagtattaacacaccttggttcacaaggagcgttacctcaccactcctgaagatcttgacgtgagaagcaatgtgtgactacaattcctagagctggccttccagaatttgactaatggatctatgactgactgagaatgggaggacagacatattacttaacctctctgtgtttctatgtccacttctgtaaaaggacaatgagatagctattccaagaggttgttatacactgtaaaatgcatagcttgaactggtgcttactacctgggaaatattcaacaaagtagctgctttgttcatttcctgtctgtattccccatacagaataggtcacatgggattcaaggaggcatttgtgataactgcatctgcaacaatgctaatcatgagtagttctttgccaccttaattgggaataaccagaggtattctgcagtcctcaactactgtactaccactaattgagggatactaggcaaccagctaattaagtgactagtgcacaagccacccagggcacatttattctcacaggttcttgggtagttatttttatttgcattataatttgttgtaaatcagaatgtgcagggattatttaaaagtagttcaaaataagatttgtgaatttggaaatatcaaggttcccctgcaagaaaaagacactttgaatttcagagtattttaatacttacaaagcattttaagacacatgatgttacttgagctgctgtaagctgccctaaaccaattagggcacagaaagtatatatatatatatatatatgcatacatatatatgcttttaaatatatatatttgaaatatataatatatatttatgtacatatcatatattatatgtattatatataaaatatacatttatatatttaattaaagtaaatatattaaagtaaaattcacataacatgaaaataaccattttaaagtgaaaattcacttgcatttagtacacttacaatattttgcaaccatcaactctatctaattacaaaatattttatcaccctctaaggaagccctgtgtcttacaagcagttattcctttcctcccccaccttcctccagcccctggtgactaccaattttttacttctatggatttacctactctgcatattctatattggtagaatcataaaatatgtcatcttttgcatctttttcaacttaacatgatgctttcaaggttcatgcaggtgttccttgatcagtactttattctttttgatggctgaataatttcccattgtatgtatatggcataatttggttattaattcatccatcaataggcatctcaattgtttccaccttttggctgttgtaaatattgctgctttgaatatgtgtgtacgtgtatttgagtatctattttcaattattttcatatatacctagcagtgcatcataaatattttttggtcaataatgatgatgatcaaaggcacttgagatataagagttaattaaataggctacagcaaaagaaatttattaaacaaatgttctgttaacaggaactaatccatgcgcttgtttcgtagctcaatgacttaccagcctcctgtcctttcaagtatttacacaatgacactcattctccatgcatcacacaatcagatattcttcttagccaatggctggaaccaagctgtggatatttatccataagggatgcatgagagaggctacagtggactattctcctgtttgagaagagtgggcatgtttctaaactataatcaccaatccatgtcttgagtaggcttaattttatcagtgaaaatctgtcaggccagatgcgctggctcacgcctgtaatcccagcactttgggaggccgaggcgggtggatcacgaggtcaggagtttgagaccagcctgaccagcatggtgaaaccccttctgtactaacaaaaaatacaaaaattggccggtcacggtggctcatgcctgtaatcgcagcactttgggaggccgaggcgggtggaacatgatgtcaggagttcaagaacaacctggccaagatggtgaaaacccatctctactgaacatacaaaaattagccaggcgtggtggcaggtgcctgtagtcccagctactcgggaggctgaggcagagaatagcttgaacctgagaggcagaggttgcagtgagtcaagatggcgccactgcactccagcctgggcgacggagcaagactgtgtctcaaaaaaaaaaaaaaaaaaaaaaaaaaaaaaaaaaattacccaggcatggtggcacatggctgtaatcccagctacttgggaagctgaggcaggagaattccttgaacccgcgaggcagaggttgcagtgagccgagatcaccccactgcactccagcctgggtgacagagtgagactgtgtctcaaaaaaagaaaagaaaatctgtttacccaccattttaactaacacacagctaaatttcctcgtaaaaatccattttgctttcattatacaaactagtgaacttttttgagtgatgcagataccgatagcggaaattcttgttttagccccctctaaggaagctttttaaaatatgctcttcagatcatcagtagtgttaactgactatccctagcattaaagcttaaccaaattggtgagtacacaaggtccctctgattagactaagtattttacattatttgcaacataagtcatgcagtatctccgtgagataggtaatgcagctgtgtttgattttcatagttgaggcaaaatggctcaaaaacttggcttgctcaaatgtacatgatgagtttggacacagttctgcatgcctgttgtcccagctacttgggagggttgaggcgggaggatgaacccaggagtttgagtccaacctgggtaacataatgaggcccctggctgggtgcagtggctccagcctgtaatcccagcactttggaagactgagttgggcagaacacgaagtcaggagatcgactccttcctggctaacacggtgaaaccccgtctctactaaaaatacaataaattagccgggcgtggtggcaggcacttgtagtcccagctactcaggaggctgaggtaggagaatggcatgaacccgggaggcagaggttgcagtgagccaagatcaagccactgcactccagcctgggcaatagagcgagactctgtctcaaaaaaaaaaaaaaaaaaaaaaaaaaaagcatagtgaggccccatctgtaaaaaatatttgaaaataaaaaccaacaaaaggttactgaaaaaattatgtgacgagcaaacaggaaaagtaggaattttgattatttgccaagcagaatttttacttccatgtatttaaaaagtaaaaagactgtaacgaacctcactatacctcttataaaaaaaaaaacaagaaataacaacacaaaacttataaaatgttattgccaccaaagccacatacaataattgaaagacataaaatttgaaatataacaaaggagtttaatttcaattttattattttgctatgtgtaagactttaggcaatactttcaacttataaagatttatatctcctaacagaattatgtggatagtagtacctgtgatgctgggttttcaggcatattgtagatgaaatagaaataattttctatcacatagtaagcattgcagaagtttgtattattataataacttattatctcctttagaatgagacacatgcttatttatttcatatctttaatacatggcatgatgctttgttaacaaatatgtatgatagaattacagttaatcagggcatcagagaccataaattaacatgagtggcaaactaatttcatgtttaatgtttatccattcctaaaagtttttttctttaacaagaaattaaaaatatgactgaaaagagagcactttatcactggtgactcaatagatggctttgaagggttcctatgacttcaatctggacgccatgatttctatcagtatccttcccagccaatgcaaagaaatacacactctaagtaaaactaacctgcgggttctgaaaatataaagtcaagacaagtctgatttctcctccccaacatgcttgcccaatttaattcccaaggaatttctggagtcaccgcaaatgtacatatcaatgtcaataaatataggaaccatggctcctagaaggaatttattagaaatatttccagcttagcttctcatgaccctgagttactacattcaaattatggagtcatttataatatgagaaaagttatgaattaatctacttcaaatgaagtcgattactggaatactatcccagtagtggcacatggaaaatgagaaagctattgataattatcttaagcaattaaaaagcaattttggcattcattagcttttattcatttttttatatatagtctatgattgtttggtttttaaaaatcatttattgtattgctattattctttaaaaaatataaattgcagaattatgtaatctgttcatgtcttcatccatctgagctgctataacagaataccacagaccaggtggtttataaacagaagaaatgtatttctcacagttctggaggctaggaagtccaagtcaaggagccagtagctttagtgtttgctgaaagaccacttcctggttcatagatggccattttctcactgtgttctcaaacggcataaggggcaaagaagttctctggggcctccttttatcaaggagggcactaatcccacaagtgcttcaacttcataacctaatcacctttcaaaattcccacctccacagttctatttccatgctcactcttccacctacagaaatatgttctcccatgatgtgtatttctactattttcctgaaatatctctagttgacaaagactaccaagctcactaaaatatcaattataacagcaacaaaaagcacttctaagaacatcttattgacaactaaacaacttaatagtgcacaaatattatttccttctgaaaacatcttctgtgcgtacaattctattaaaattacctttcattccttctgtttttggtgatttattatactttctaaattgcttttttcttataaaacaagaattagcctttcaatttctcattactgctacttactgatattattttatgcagtatatatacacatctatatatgtgtgtgcttgtgtatttatatatacatatgtgtgtgtgtatatatatatatacacacatatatatatacacatatatatatacacatatatatatatatatatatatatatatatatacacacacacatatatatatatatttgagataggggtcctgccgtgcttcccagctggtcttgaactcctaggctcaaacaattttcctgtcttagcctcctaagtagctgggattacaggcatatgctaccgtgatagtctctatttgtgtaatttaatttgactcaggacttttactttagaatgtttttcttctttctgaagtgcaacttttaaaagtctactactaaagaaaaattagatatagattcatttattaatgattttttttctgattctaaagtacctttatttgtcccagttacttgaagaataatttttgtaggtgtaaaatttaaggttacagtaatattctattgatattatataggaattttaaaaaatttctttagacctatctgcccaaatgctattttttctgctaggtttttaaacaatttaatcaatttttaaaacttaaaatttcaactatatttacctatagttacaattggttagaatttatttctagtcgttctatattgttgtattcctaaaacttcacataggtggatggtctcttttttttttaacaatatttgtcataatcttctacattttctttttggtataacatatttttgttatagtatctatctggtaatttcggtgcttaaaatgctttgctttctgattctgcaatttatttaaattattgatcaacatttatgtccacttagaaacaaaaattatttcagcagaatcatgtagtagcactgggagcacctttctaattttgaatttgttaaaagtttaggattattaattcttaaaattgtttgcctctgagtatttatttttctttttaagggttgtacattaaaataaccattttatttttattcagaatatttggtgttttgataccaacatggctgtttttagatatatgtttttattcatccattctgtgttgctataattaaatacctgagactgggtaatttataaataaaagaggtttatttaggctcatgattctgcaatggcatcagtatatgcttagcttctcgtgaggcttcaggaagcttttactcatggcagaaggtgaagtaaaagtaggcatgtcttctggcaggagcggaagcaaggggtgggggttgccacactctttttttttttttttttttacaatcagatctcatagtaactaatagaaaattcactaattactgtggggaggtcatgaagccgctcatgaagaacctaccctcatgacccaaacacctccctttcggccccactttcaacaatggggaatcacatttcgccatgagatttcaaggggacaaatattcaaactatatcatctactatattgcattcccagaaatatagctatataatatcatttaataacttagtgtttattttcatgtaagtgtcatcactgtttacctagttttcattatttaaatttgtgtcctacattttatcattattctcaatagtcataaaaggaattaactgttagagtttgcatttccactcctaattatatgttaaaatttaattgccactgttacagcattaagaggtgggacctttaagaggagattaggtcataattacacagctctcataaacaaattaatgctgttatcatgggagtgggttagagcacgagtgggttcctggtaaggagaatgagtttggcccaatttgccatctctgtcatgtgtattcacttttccttccaccttccatctcccagcacagagtagatgatgcagtgtgaaggcctttgccagatggtagcaccacgcccttggacttccagcctccagaaccatgagccaaataaactgctattgtttgaaaactatccaatctttggtattctgctatagcaggaaagtatgtaagacagaaatttgagatacatatggccttatttcatagctgatgtcacctttacattctctgaagattcagatgccaaaataataaaaataataataataataaagtaataataacaataataatactaaaataataatagcaatccaaaaaaactatgaaaagccaacctgaattttgtaaaattttaagttgctaaggattcagaaatctactaaacaggggaagcctaataaacacataatattctgaacctacaacacaagtgtatgagtatgattttatgaaacagagccaaataggagatagactaagcctaacaaaatggcaaatttgatgggattaagtttagtctcagagaagttttgtaatcaagaaccttaaccggttaagatgaattctcaatagaaaaataatcccatatagagcctcttttcactttggccatatttttctgccttttgcaacactgtaaatctactggtatgataaagaacaagacagtgtcctccaaatgaagtgaaaaaattcatagaaagagatcacaggtaacacaaacgttagaataagcatacaaagtctttaaaataaccatggttgatatattcaaaaattagagaaaagagaagagaaaagattaaaggatggagaactttctcaaataattgtaatttataaaaaagaattgaatagaaattaaaacatttaagtttacaatctctgtaattaagaaattattggctaggcgtggtggctcacacctgtaatcacaagcaccttgggaggccaaggtgggcagatcacgaagtcaggagatccagaccatcctagttaacatggtgaaacctcgtctctactaaaaatacaaaaaattagccggacatggtggcaggcacctatagtcccagctactcgggaggctgaggcaggagaatggtgtgaacccaggaggcagagattgcagggagccgagatctcgccactgcactccagcctgggtgacagagcaagactccgtttcaaaaaaaaaaaaaaattattgattgttttaatagccagatcaaatacacagatcaaaatgcaaacttaagggttaaaagaaacataaaaaaaatcttttaaaacaaaaccacaaaggaaaagaagaaggaaaattcaggaaagacaataaacatatgttgcctggagtagaagcatctaaattgtgtaatgaatgccaaaaagatgagagggaaagcataactgagaggtttttaaggctgagaaaagacatcaacccatcagaagggagcaaagaaaaataaattaaatgaaaaccatgtctaagcaaatcacagttgaaatgctgtaagactaaagaccaagagaaaataatataagcagccagagaaaaagaaacatttgtaacagaagtaatggaatttagaaaaaacaataaacgccatctctaaaatacataaattaatttacttcttttagatttaatgaaattatccaacaaaaaaggaaacaaagatggttttataaaataaaataacaagtgtttgtcatcaccagtcatgcatgaaataaatacgcaaagaaggtctttaaggggaaaagaaaaagataattacaaatgaaaaaagtagaagtacaaaaggaatgtagagtaatatggacagtaaattgtgagaaaacatacatattcttttttctacaaagtcataatcatgatggcttattttgatgatttatatgtgtgaataattaagctgaagatgccagtgaaacaaaagatgatgggatattaagggagataagctgttctgaaattctaggttttttttatttaagaattttaaaaatattgaattttattaatcaagaatgaatgctgtattttccagtgcaaccactaaattaaatttgtgaaatgaaaaataaagcaactttaaaatagattcctgatatgttatcatagtttgggtacacaaagaaattggatgtagagaatcagagaaagcaataagtcagataggctccaagttgttcgcctgagcaactggaaagatggaggaaactgtgagtgtagcaggcttgatggtgtggggagatgggatgttcggttgggatatgtctacacacacaacagaaatataggtgtttttttttttctgcaaattcacgttgactggacttaccccttgtctctcctttttcttatattttatatgactgacacatcctttcctcgtatggcagacttggaattttttctaatattttaatccaattttgagcatttttgactgtgtcctcaatttgctcacatcacactttaactctcagggacaagctcaattttccagactcaggagtagcttcataaatgcccctctacatcatgcttagcaatttggttaaaattatggaaaagtacatatttttattaatttaggctggagttaaattacaagctctttctccagatttcatgaattaagtatttaatattctcaggaagaaatagcatttcctttactattgagaatttaaaaactgatatgactttaatgctgcttgttgtattacatgtcaaatgacaataaaaattcttgttaattataaaaaagttgacacaaatttatcaatggaataattttgaaaaattttgctatgatgaaaataagctaactttttttttttttttgaggcagggtctccctctgtcacctagagggacagctagaatgcaatggtacgaccccagctcactgcagcctcaacctcccaggcacaagcgatcctcccaactctgtcccgagtagctgggacagattattacaagcatgcaccaccacatccagctatttttgtttatttttttattttgtatagacagagtctccctatgttgcccaggctggtctcaaactcctggctttaagcaattctcccacctcggcctcccacagtgcagattatagatgtgagccacaacgactggccaaaacttttaagtttgtgtttcaatcatattacatgaggcaaaataagaaaatgtattatcaatataaattcttgcacgctatatttacatagccaaattatatttaaaactacgtatttcagtaatgttgatctaaaattaatttcacattctacacctgtcaattaattttagtaaatagacaatcaggctgaaaacaatttcatcaaatcaattggtttgcattcatgtgtacttaaaaattatgcgtttactcaaaactgaaaataaatggtttaaatatcatatgaatcaaataaacatttgttttaccttttctttccaaaattatgttgatgcctaagtataaacacagtctatttaagagcacaaaaataccttgaatactttgtttaatactcattaacataaatcagggaattaaagaaaaatgtttctgattagagggtaatgttggatttttattgcactattttgaaattcaatgaccaaatgagttttttttctgcatactttgaaaaccattttaggacacttatactactgtgtttttttcaggatttgaggaatagttagacatattccaaaaactggatacttacaacactggagcagttggtaaaatgcatatacattaactaggaaatttatctctaaaggatcattttgaatggcaattttaacactgtaaaaacccatcaattaaatatcaaatagaggaagttatagcttttggtaagcatagcctgggtccgatttttctttccttttctcaatttctccctttttcagaaaaagagcctaaagaaagactggtcatacttgcggatctgaagccgggcctcagaatgaacaggattgtgacttgttagttaagggtgtttatgaaattctccagggtactatgacagcaactagggttggctcagaagactctattcagatatgtgatgttgggaaatgatggcaactagcactctggggttgcacataatcaagcctgatgagattctccagttggaatttagagaagagccctagaaaaaaggttctttttctagtcagagctacctagaagattagagacataaagagcatttagagaagttcaaattacacctgaataagatttctaaatcagttgcattcatcatccataaaaatagtggtcaagaagaggaatactatatttgggaacaaattgctctagtgattttagttataaaaaatctatatgataagacactgcaatgtgttacttttatgggtctacttaattaggccatagggtgcccagatatttggttaaccataattttggggtgtgtctatgatggtgtttctgggtgagattagcagttgaataggtatactgagtcaagaagcttgccctcctcagtgtattcagacctcatccaaattgttgaaggtctaaataaaataaaagtctgagtaagaaagaatttttctttcggcctttctgtcttcagtctggtttatgaatcttcttttgccttaagacttggactcaagctcacaattagctcctctggttctcagacctttggatttggactacagctgtatcatcagctctcatgggtctctggctttcccactacagatcttggacttcttagccttcaaaatcacataattcagagagagagagagcgagaaagagagtttcgttttgttttgatttttcctactgtagtcttaagatctctttcaagagaatggctataaactctagccctggtagggctccagggcattggttactggtgtttagaatgtgccttacatgggataatttttattctggcagacaaccaaatgtctaagtgtctgacatatgaccatgtgtttctcctttaaaaaacttgtttctggtggcagaagcccttgggtctgttaccttatctgtgccggttcattcctgccactctctagaagaatgctgacaaggaaagggattagcttggctgcatcagtcatatgagacacaggaggcagctcaacaaaatagattatatgacagaagaagcattacttgcagatcctcaagagaagagggcacctccgaaggctgatagaaagtgggaaaccatctagaacatacatgcttaaccagtgggtggaaagcaaaagagagggatggacctgtaggctgaagctttttttgggggatgcaggttgctatctcacacctgctttttcatgggaagttctaactggtagtttagagcccacagacatgagttccacggagttacactgtgtctgagaggtggtttctgtggcattctcaggcagcccgcacaaggcatgagggtcactgctgagtcaagtaggctgtatccagctgtcctatagggaagtggtcaccaggaggtggttgtacaaggcaaatatctggatggactacattgaggaactgggaggaggcagagaactagaaactgtcaaggatgtctgagccttgattctgtaggtaaaagtcaaatttacattcacaacggatacaatgaaaaatattttgaggccaggcgtggtggctcatgcctataatcccagcactttgggaggctgaggcaggcggatcacctgaggtcaggagtttgagactagcctggccaaagagacaaaaccccatatctaataaaaatacaaaaattagctgggcatggtggtatgtgcctgtaatcccagctattagggaggctgaggcaggagaatctcttgaacccagaaggcagaggttgcagtgagccaaaatcataccactgcactccagcctggacaaccaagcaagactgtctaaaaaattaaaaaaaaaaaaagaaagaaaaatattttgagaaccatttattaattgttaatacactagtacacatataattatgtaatatatcctccaagaaagacagttgatgagtatatgaatatgagaaatcactcctcaaaataaaataagagaaaatttatcctaagggaaacctcatagttaaaataagaggactatgaggaaaaaaagagtttttcagaatttatttttccaccaaaacgaaggagacaccctccctgtctgccagagagcacaggcaagctagaaatcacgtgattgttctcatgtagatgtgcattcagaagaaattatatctcatttttattcaagcacgcacacagcaggcaaaccaaataaatgtattacaacatatgcctaaggaatgtgggacatccttccagtaaaactcaagctggaaatcctatgaacttcctcatgtggcaatgctttctaaagtaccagttgtcactgaccatcagactgtcagtgaataaaccttacaaatgtagtaagtgtcagtagtctttcagtcaaaagtaaagcctcattgtccatcagggaactcacaaagcaaaaatagtaaaaatatagtaagttatgtcatttttttgtgatggctttgcaacatattgaatacctttattgtaaaaaaaaaaaaatctggaatcatccaggaaaccactacttccatgccattataacaacataatgttaattgtgatagaatattcagcattttaaataaccatgatgcataattatttatctactatgctagcaaatgttagcatgagaggggtaaggttataggtgctctactacatcataataaagaatggatttttgtttgtttgtttttatgtttcccattgttcgttcttacattctaatgttctgtgacttatgttatcacttcttttttgtttgaagaatttcctttagctcttatttcaggataggtttatttttgtttgtttttcttcatctgagcctatctttatttcccctttagtctagagggatacttaagctagaattggttttgtaattgacagtactttcctttccgcattgaaaatatagaatctgttagcatttgaattaacattgtgctataggtaatgtttccttgctttatggccactttcaagacattctcttttttttttcttttttttttttttttgagatggagtctcgctgtgtagcccaggctggagtgcagtggcgccatctcggctcactgcaaactctgcctcctgggttcacgccattctcctgcctcagcctcccgagtagctgggaccacaggctcccgccaccatgtctggctaattttttgtatttttagtagagatgaggtttcaccgtgttagccaggatggtctcgatctcttgacgtcatgattcacccacctcggcctcccaaagtgctgggattacaggcatgagccaccgcacccggccgtgtatctgctttattaaaacgtatttacaataaccactttaaaactttaaaattgttgtcagatattttcaagtctgattcatcttgacattggtatgatttgcttgctttttttttcactgaacttgtgattgtattggttcctgggtgtgataggtgattttcaactgtatcctggacattttggttattatgttagaagactctgtatcttattaaatctttattttaacatgcttattctctttaggtttagtctttataggtgctggccttcatgtcatggttccagtgaaaatttaattgtcagatcttttgtagcgccatttgtctgtttggcttatttggctctgctgtgatacccactgtgtagtgctggtagtgactgggggttagagggtggtttatgcagcctgggacatctggtacttctagttggggaaagggagtcaccacactgggggaatgaagaatacttcccaggctggaatatgggtgatgctggatcccccgtgtccatactccctggctagtatgccttccttttgagagaggagtatctcatgtggtgtggagagtgcattgctgagccgtatgctgttgatgagcccctgatctattcccgttgttagtgcttgaaggctagggtggcctggtgctatttttgagacttccattgaatctagggaaggaacaagcttccttatgtcaccctgtgttgctacattgggcctggatcatattacgttttctaggggaaagtaagttgccctattgccccgttgtattttcagtactatagtccctaacaaattgtccattttctttccaccacaaagtacttctctgacttcttctcatattagttccaggatttatggctgttcttagccagaagaaagcggggagtaatgagtctactctatcttgtcgagattggatatcataacatttttatgaattgcctgacatttgtccataccaccttttccccacatttgcagttgtatactttcttaaaataaattctatgttttagatcagtttctgattcacagaaaacttgaatagaaatcagagagtttccatttactcccgtacctcctacacatacaccgcctcccccatgtcaatgtctcccaccagagtgacacatttgctataatggatgaaactacattgaaacatcattatcagccaaagccaatagtttacattggtgttctctcttggtgttgtacattctgtgacttttgacagaagtataatgacacatgtcctccattatactgtcatacacagtatgtctcactgccataaacttctcctgtgctccgcattttcatccttctttctcctatgccctggcatccactgagctttctagcatctgcatagttttgccttttccagaatgtcatatatttggaatcctacagtatacaggcttttcagattgacttctttgtgactgtgtgctttttttttttttttttatcacttcttcatgtagctacaatgccataattcaattttctacaaagataaaagaaaactaacacagtctttagtctggatatagataatcatatatacatacacattagtgtgtgtatgtatatatatatgtgtgtgtatatatatgtgtgtgtgtatatatatatatatatatatatgtatatattttaagatattttccctcttgtcacccaggatggagtgcaatggcatgatctcagctcactgcaacctccgcctcccgggttcaaatgattctcctgcctcagcctctgaatagcttggattacaaggatgcaccaccacaccaggttaatttttgtatttttagtagagacggggtttcaccatgtttgccaggttagtattgaattcctggcctcaggtgatctgccctcctaggcctccttaagtgttgagattacaggcgtgagccaccgcacctggcttacagtttgtttctaatataataatttacaagagtttctttcagcctcaaagtgtttagaatatttttcaaaatatctttcagattaattttaggtcaatttaggttttcctatgtagtaactaatgctaaatgtttctagcattgataatattaattaaccagcttgtcttcaagatgtcagtacatcagtgtctgtgttaggtggcctatggtgagttttatgttgtctgcattgacataactacttcatgtaattcaggaagaaatttaaatattttccaatatttcatatggcacaaccttattcattatgtacgtctgaaattcacttattactttaactgtattttcattattgtggtaattttgctctttatgtcagaatagtattaatcaattaattactccttttaagtgctttaaaaatcattaatttttagataaatttcctttcagtaatatagtacataaatctaaaaatgttgaaaaagttatcttcatattcttccaagttagagggttctaatttatcacttgttttattaaaaagtttctatatatatttccaaattatagtcgaatggcataataccaactcagattccctttctcaagatttcaaagatgcttttggccagcctaattctttatgacgtaagtggagtggaatgaaaatgaaataataaccttaacccatttgtgcttaaatatcagttgcaaatataaatgcatatggccatgagaacacaaggctatcactactcccccactcccaaagcttttgaagagattggtgtatatgaggggtcttgagattttagcctgaaaggaagcatggtgagtatgagagagataaaggttggtatgttggaaagaaatcaaaaattggttatataaatatggagagttaattaagattgaaagcatgctggggtcctgtggttcatgtcttcatcctataagcatgaggaatctattgatgggtaaagctgcagaaagacacagtctggtgtatgttttcaaggaatgcttaaggctatcaattgaaagggtgacaaagtgaaaacgcgttaatgaaaaggcacaggatgactgtaacagggactagactatgagtggaggagatgtagataactagggtagatcttaaaaatgtttaggtgaaatcaatagaatttggagatggagaagatatgaaggatggtgaaaaggggaatttaaaaatatcaatacaagaaagtcattagaatttggagatgaagaagatgtggcaaggtcattaaaacaggacattttaagatattcatgtcaaagatgtttgagccagagcgacttcatcttgaataccagctagagaagatgaggatgggacttgctgggctggattcccaggaggttaggcattcttagtcacaggatggaggttggcaggcctggtatcacaagacacaggtcataaagaccctgccgagaaacaggatgtggtaaagaagctggcccaaacccaccaaaaccaagatggtgaagaaagggacttctggtcatcctcactgctcattatacaagaattataatgcatcggctgctaaaagacactcccaccagtgccatgaaagtttacaaaagccttggcaatgtctggaatttaccttatatggtctaaaaaggagaggaaccctcagttcttgggaactggctgcccctttcccagagaactcatgaatatttcacccttggtttaccatatgaacaaaaaataaccataaaaattgccaacaagcagccctctgggctgctctgtctatgaagtagcccttcttttgtttttttacctctctagtaaactcgctttcactttactgtatagattccctccaaattctttactgtatagactccctccaaattctttcctgcatgagatctaagaaccctcttttgggatctggatggggactcctttctggtaacattaatactagtttctgatatatgcaacttcaatgaatggtgggtgttcccctgacattagaactctggaagttattggcttaaatccgtgcctttggttttgaatagattaaatttgaggtgcatttgagacagaaaagatatcaactcctgcacttaagctacgatgatgaagataatgtttttaatcatattttcaaattccattagctttcttaatctttatataatcttttataaatcttaaataatattttataaatcttaaataatatttaagtattcttattattttcccaagttatgtattgaattacattttctgagttctgacactaaaagtcccaattattttggtgaatctatgtaatatgtttcttatgtctctttattcctataatttctatttataatttatactttttaaaatacacaacatttaagaacatttggtgtaacttagttgtctacgttattgttggatgaaataagaatgatctttaaacataaattacttttctaaagttctcaaagtcatcaaaatattttaattttctaaaaattatttttagggctgacaattataaaaacaaatagtgataaatcaccaatgtgcattttcttatattttacttaccatttttaaatgcatggtgcagaagtaaatatgattttaaaatgattttctgatcacataactaataagcaagttttttcaactatccatacattattaaagcttctaatgaatagagctaccttaaacacagcacctgacataatgttcattgatttttttctaattccaagcaatcctgggttctctgtgtttctcagaattgtttttgcagctgtggccaacacagcccttgacctacagattccccagagcacccttttagttctgattttcctggaacttgagaggatttgtattgcaatcatgtattctgtttactgcagacatgcacatcaacagatacaagtggtgtgtgagccccactgaaacctgacacttaatatcacaccctcgccagtgctaagaaattcaggggctcctgctatgtgtgtgtattgtgttgtatgttaggaagcatggtggtgggaagggcagaggatggcaccagatgggattaagggcctgtggtgcctcttgctccaccagagcctcctgcacatgactttctgccagcagcacctcacccagaccattctgcagacgttccctgtacttagatctcaggccctggcatacccacatgactagaaaaattaaattaatattttatgacatatggggctttcagtgaacttggatggaagcacatacatacaccattcacatggaatggtaatacatagcctatggtatcctaacacattgtaggaggaaaagtcccaccattttataaaccattagaagcataacttaggagattgcatcctctcctacaatgagaggtgatgccactcagtccttacatcacgataattgttaaatctaagattatcctctcccctccccacaaaaaaataattctatacaaacacacactcacttgtaagagcaaattaggctttgaagatagtttatctgacacttttcagcacgttaagaaatttgtaaaatcaatgaaaaataagaggttgatgattacagaaaattagaaaactatgtcttttgttacatgagttctcaattaagcatggaaatatggtagaaatatatatatatatatagtctatggatacttgattctttgacctgcatgtacctctttcttatcctgacacagattctgacagagctcagaaatatacatggattgatgacataagagaaaattatacattttacttctaagttgctcatgggacatggctaagttaagctaattaacttaacacaataccccacatacttatcattttctttttgccgcaaacacttaaaaatatatttttaagtataatttctggtatacaatatatgttattaactatagttaccatgttatacaatagagctcttgaactaattcctcctatcttctagaaatttcgtatccttcgaccaatgctcctcaatcccttccctccccaaccaccattctctgcttctatgaattcacctgttaatattctatgtataaatagctcatacagtatttgcctttctttgtttgccatattttgcttaatgttttccaggttcattcacatcgttgcaaaatgacagaatttcgctatttctaaaggctgaatagtatcccactgtgtaaatgtaccacattttcttgaaccatttatccattgatggacatttaggttgatttcatatcctggcttttgtaaataatgctgctaaggacttgggaatgaaaatatttctttgatatactgattttatttcccttgtatatatacccagtgtaaaatttctggatcatgttagttttattttaatttgagaaatcttcatactgttttctataatggctgtactcatttactttcttatcaagaatatacaagggttccattttctccatatcctggccaacatttgtaatcttctattgtttcgttattaactgttttaacagatgtgacattttgtttttgatttgcgtttatctgaggttgagtgacattgagcaatgaatgatgttggaaaaactggacgtagacatgtggaagaatgaatttggaccattatctcacactatatatgaaaaccaacttaaaatggattgaagacttcaacataagacctggaaccataaaaatactagaagaaaacagggagaaaagattcttgacattgatctgggctatgttttggatataatatcaaataaaaagatctgtacaggaaacaaacaatccatagagtaacaagacaacctatggcataagaaaaagtattcgtaaagtatacatctaataaggagttaatattcaaaaatatgaagactctaaataactcaatagtaagaaaataaatagcccagttaaaaactgaacaaaggacccggatagacatttctcaagaaagacaaacagataattaacagttattttttaaaatactagatttttttttacttcatgcatagtgctcacattgacctaataagaaaaatagtaaaaactttctactgtcaagattgtaacttttacaaatcatcttaaagtccattgggaacgaaattgctaatgaatgtaatcatttaacatgcactttcaaataagcaggcaattgactggtgcggttctcactttccatttacttttaaaagcagttagagctccaccttcctttaaattcttattaggtcttaaaacactgagccaatatttattattcctttgatagtgtaagtcaaaaataaaacactgaatttagagctatttaaaaatttagaagtagtggaatataattcttctccatgtactgctatttactttaaactaagaacccttctgtaaatttctttttacatatactccttagtttctatacctttcctgaaagtgtttaatgaattttaagacacttcaaattcaaaattcagggaaaaagtacttattttttattgagcaaaatttgaatacctccagagtacttctcaagattagatttttaaacataacactgtcacactgttctaaagcttaaaaccaggagaaaatcttatattttttattctacattgatgtgtgtgtgtgtgtgtgtgcacgtgcatgcatacatgtgtgtgtttaagaagaggtcacatggaattatttatacctcactttcagccgaggtcctaaaggacattaagcaaaacaagggttaccagtttcttccatatttcccaatgacatgctccccaaccaaagtgcgccttgcaaggtggtctgcccaacctgttcttgaggcccttagctgatcatcagcttgagtatacaaaagcattgagcagtgacatcgagagaagttatcttttagggaaagttgtttgagtgatttgagtgcaggggagtcatttgctttttaccctaagtttgctaaggtcctgatatttctcacctaagcaatgcttaacaggaagagaaatagagaaaggttgtaactgtcgctacctcagatggcaaagcagggagagggaacatttgtggaagtagctgcatgtctaccacttggtgaaatgagagtgcatgcattctcatgggaccaggagctgccacgtgcacagtgcaggcaggagcaccttgtctggactggactgtgtttagggcatcccacatggattaggcatcaccagctgccattaccatagtgtagaattcaaaccggtttgtacaaggtcactatataatgtaaattcccaggaacccaataaaagataaggtaccatgaaataaatgaccgtatgaaacatacaacaaaatcagagagcagagttcttcatagtacccctcttcttaactctaattcctctcccagaggtgaagaaagcaggtaagaggtgcctgatgtgagggacatccacagaccttaagggacaaccaactctgcatagctggggaaaaccaagtgtccacctggagaatacacccagagaaatacaggaattgatgggtgattctactcatctattcattcaattaataattgattacatttttggtactaggatatgatactgtgcaaaaagcaatttatgatctagataggtaaactgtcattaattaaatgagataataaatacatgaataattgttattcggttaaaagttatgagtgagagatgtgtatggtgaaagaaactagaagggtcaaggggaaaataatttgatgtgtgaagaaaaagaaactattaactaggtaaggaagaaagaaagagaatattccaggaagaggaaaagcattaacaaatattttgtggtggaaggaaacaaagaggttcataaaaataaaagtccagtgtaatgacattgcagagtacagtttcacagatgtgtgtaggctagatcatttatatagaaagaaaacatataaatacaatttcttctgactgataaaacatatatcaatcctggtttctaatatttcctattctatcatttattggatttacaactcattgttttggcttttcaaaggtgatagaaaggttgtaactaaggacagaaaggttgttttagcaaattttgtttttaatctaaaaagctatcttatcgtcctctaataatttccagtctcaacagtgtaactcacagaaattgaaaattataggatttaaggctactctctgtcattacaggcttatacttgacaggcaaaagtaatacattaaaatacaaagaaacaagggtaaaatgaatgtttcatacaaataaaagcaatctcaaagaagagaatatagcagaaaacaccatcaaaatctgtgcagttccttcattaagactgtcgaataaattttcactgagagagattgctttttgttttggcttttgtggcagagtcagtttcatctgtttgcttgttggttttctccttggatttaaaactaaacctgaccagtgatctacatttttgcattaagtgctagcatttaggaatgtcaaagcattagcataagcttccacatggaagtataaataattcacggggtgtgtggtttgcagtatctcacagggaatataaagttggcatgcatcaaaggtgagcatagtgattaattattgttaaaatgccaaatgagaatgcctttccctgacaaagcaatctgtgcccagacaaactgcttgggtggtttgatggacagaccaaagtgacataattctttttagtttctgattcagaaaaaaaaatgtggtatgggggatcatgcagccagtgggccctggatactgggaggatgtccttaatcgacctcgacatctgcagcgctgtaatatgcaagcactcagctctgatagcttgtgatagattgttgaactacaggaggcattccagggagactctgcatgattaataaacattaagagcttttcatgtggtataaaccatctaatttatatttctgaaaggtcatggttcagcatttttaatgcatggtttaaatttattttttcataacaagtgtttgtggagagggagtgggtgagtgtcttgtagtatgtttaaagaaataattttcactataggtttctctgaactcttagttttgagaaacctgaaaaatgatgcacaatatggatcattttctttgcagttagattagcactatatgatgctattcatatatattttaaataatttttaaatctgcatgttgtccacatgtaccctagaacttaaagtataataaaaaaaaactattttaaataagggaataggtggagcactgaggatttttagggcagggaaactatattgtatgtaccatagtggtggatgaatgtcattttatttgtctaaactcataggatgtacaaaatcaagaatgcaccctattgtaaactatggactttgggtgataataatgtgttggtgtaggttcttcgatttccaccctgggagggtatgttgatagtgagggaggctgtctgagagagcgagtacagagtatatgggaaatctctgtaatttctgctcagttttgctgggctctaaattaaaagttgcttaaaaaaaacttctttaaaaatgaagtctatttaaaaaatagtttttcttgtgtttttcaatgcctattttgggagttcagaacaactggccaagtgtgtaaaatataaaaataattctcaaacacttgctgattatggcagacggttttcaaagatggccacagtaattccttccagccccacatatgcaggcttttgcaatatgatttctcccatcaaggaatggagtctaattctcatgctttatccctggtctcacgacttgttttgaccaacagaacacaatagaagtgctatgttgggagggctgaaccttgacctcaaaaagacttaaatcttccattctccctacctgcacgttacctacctatatggtaggtaacatgatatgaggaaatcttgcttagcctcctaaagataaaagatcatgtggcaagtgagaatgccagaggatgggcagcgccaagctccaggcacatgacagacaccactgtggaccacctaacccaagtccacttaccagcactgcaaccacagcagcgaccccaggcagaacagccaagagctgccccttttatctgggcctaaatcactgaacaaggctcatgagctgatgcgatgattgatgttataagccaccgaggtttttgtctctatgttttgttctttcagcaatagataattgatatatcctggtacattctctatcaaattacaaattggagtttttataatgaaccataaaaacttgttcatttctatagtttggacagctcctttgtacgaatacataattttagaaacagacatttttataaaaatattttttaatttattttttgcaagaagagcacttttttcttttttttctcctgacttcctctttttattttattttatttttaaaattttactttaagttctaggatacatgtgcagaacgtgcaggtttgttacataggcatacatgtgccatggtggtttgctgcacctatcaacccatcatctaggttttaagccccacatgcattaggtatttgtcctaatgctctcccttcccttgccctccaccccctgacaggccccggtgtgtgatgttcccctctctgtatccatgtgttctcactgtttgactcccacttatgagtgagaacatgtggtgtttggttttctgtttctgtgttaatttgccgagaatgaagatttccagcttcatccacgtccctgcaaaggatgtgaattcattcttttttatggctgcatagtagtccatggtgtatacgtgctacgttttctttatccagtccatcgtaatctacaaggaacttacacaaatttacaataactcttttttctattcccttccctcatcccaatccctgtcttcactcccaggcaattaacaacaaacatcacaggtaactaggaggagagcaaggaagggagtccacctagagagacctagaacagattcaaaacagtggggcaatatttccaatattgcaggtagttctttggcaacactttactgacaaacattctttggaaaatcatctacttttttgctctctattttttaaaatattttaactttcattttagctgaaaggtgtatgtgcaggtgtggtatataggtaaacttgtgtctgagggttcatcattgtgcagattattgtgtcacccaggtatcaatcctagaatgcatttcttttttctgatcctctcccttcctccaacctcctgtaggccccactgtctgttgtgtctgcccctcttatgtgtccacatgttctcatcatgaagctcccacttctcacttataaatgagtacatgtggtatttggttttctgttcctgcattagtttgctaaagataatagcctccagctccttgttcctgcatctgtgttcctgcaagggacatgatcttgttctttttatggctgcatagtattccatggtgtatatgtaccacattttctttatccagtatatcactgatgggcatttaggttgattccatgtttttgctattgtgaatagtgctgcaatgaacatatgcatgcaggtatctttatggtagaatgatctacattcctttgaatataatcccagtaatgagattgctgggttgaatggcatttccgtttttagttctttgaggaattgcctcactgctttccacattggttaaactaatttacactcccaccagcagtgtaaaagcaagaaaaagactttcaataggcttataaaattaacaactgtcactcttgttctacttaagtaagggtttatcagtaaaaataaagtctaataaatccaagagtagagataaataattaattgccaatattgctcctttctttatttatcttccagaatttctttcactcttaaattttctttctagatttaaatttaaataaaattttaaaattatgcggaatcgtttggtgctttccttaaaaatctaaatttttcaataacagagttaagaataaaatcgtctcaacaacttgtcttttcaaaaactccttcacttattcatcaccccaatacccaataccctagggaatcaagaaatggccatgaagaaaaaaattagctttcagaaactagtttttcagtataagcattttctcatatattttgtattatcagagaaaatgtatttatattggtttcttaagagataaactaaattttttaaaagttatttgagatttggctgaatgctgagcatcactgttattttttaaataaggagcctcctgccaacttgcattactagtttgttataattattttatattatatccgttagtgacaccttcattttaatgaaatatatttgcacacttcatttagcttctcagaaattatggaactttacaacctgcttttaagcacatcatttatttttcaaagatagcaccacagaattcagactccttgctcaagaacaggtaaatatttgtttccccaactcattctgatgaagtggtcagccatccttggacattgatgatacaggcaaacattatcacaatattattagctcagaacttggaaagtcacaaatctactttgaatctaggttttgcaattaactaagtccactaacttactacacattgaaacatgtacttaaatcatctatggttgcctcatctgtcatgctagccttgatgctaattctgaggctttctgatcatctatagaagttatctgtgcctgatacataactgtttaataagccatggatattatcatgattttataacagtactcaagcaggcaggggcagcatccacccctcacagtcctgtccagctgcatcttcagaatttatgtggtcggccccatgaggattgctccagtttgataatgttctgtcacatatgctgctcttctcaatttgtcaatatctcacaaaagtctccaaatgaatgatgaatgaactgttggtgctgattcaaagaaaaagagccacaaatcaagcagtcagacactcatctgccttcccgtagttgctgctttctcaggagagagaaatttctttgaacattggaatcagcaattgacaaagacatattcccaaatgacactttgctacttaaccatctttaagtattaagtgtttcttaatttaataagaaaggggagctgagctaaacctgtccctgaaaccatcctagagaagcacctgccagcagcaaagctgttgaaatgaataaataagattaaacaactatgggaaatatgtttagagaggaaacttcaaataacataaaccataataagtaaaaatacaaatgttttcagtatgaactaactaaataacatttttagattcaggatttgagaagaaatgagggctgatagagggattgtgggtttgctaattttccatttaacacagtgggagtatcttcagttttaatttaagaagaagattaaaaagccaattaaatatatttattaatgtagccattagattcagtaaaaataacttgaattatcaagtaagcataagaaaaatttaaaaagatattgaaaaataatatataaagggagcagtagtataaaaaaacaaaagcacaacataattgaagaaaatatcttagaaaaacatctcaggtttcaataaatgtgagcataatcaaaataatttgttgtttatgacgaatataaacaaaacagactaagactggatcataaaaaaacactaactctactaaaaataaaatttacctgaaagttgaaagtaaatatacgaaaattaaagcagaattatcatatcaattgcatgcaaattaaagtcaaataaagcttaaatagcaaaaaataaataggtatatagatgttctaaatgacacactcatctatatacatttagatgatatagaaactgaatgttatctacttaaaaagagcaaactattattttaattacccataaattacaaaaatttactatatactaggtcaaaaagcaaaaacatcaatacagttcataatataaaaataaatcagcaatgtgctttgacttaaattttaaaatattaatattaataagaagcaaaacagtaattatatgtaactattctttgtaatatttgagtcaaagatttaaattaaaatataattaaagcttcagaaaatttcattgatggaatcatatgacacagtgaatgcaggaacaaggaaagaatgtaaataaattcattaatcagtaagttaaaaattaaatcaccaattaaatgcgataaagctgaataaaattattaataatgttgaggacaaaaatcagttagtacagacattaacagttgaacttgcaagtatagccagcaaataattttttagaaaatgcttagggtggctgaggcaggccaatcacatgaggtcaggagtttgagaccagccttgccaacaaggtgaaaccccatctctactaaaaatacaaaaaaattaggcatggtgtcaggtgcctgtaatctcagctactcaggaggctgaggcaggagaatcacttgaatctgggaggtggaggttgcagtgagccgagatcacgccactgcactccagcctgggcaacagagtgagactccatatcataaaaaagaaaataaaatgtataggaatatcagattgtcctttaaatgtggccctcaatctttttttatttatttgttgacttaagttaaaatagatggagcaactcagtaaataaacatgaacaaatatagacataaaggaataaattaaaacaagaaacctgtctttccggtgttaaacatgtgtttaaggataattagaaaatgcgtagattgtgataaagacctatctcagcaatagaggaaatcagaacacacgataacagaaatgtgatatttaagaaaagataaaggaaacccagagttaagagaggaaacactacaaggacactagagaattgggaggcatctggcacctatagcttcagaaaacattaaatacagccggaaacctagccaagttggcaaaaacaagcaaacaaacaaacaacaaatacatctcatactaacagccttttaatttcaattcctatttcttaatacattatgtctggcttttaacaacaaattataaggcatactaaatgacaaagaaaaaaccccacaacttgaagatactgggtaagcatcagaacaagactgagggcagagactttggatttaaaagacctggaagttaaaacaactataattaatatgctaatatttctaatggaaagagtggaaaatgcaaggacaggtgattaatctaagtaaggatatggaagcaaaaagaaatgctagaaatcaaaatcactgtaacagaaataaagagttgttttgatgagctcactgccaaattggacatgccaaaagaaaaaatgtcaatagaaacttccaaaattgaaatgcaaagagaaacaaggatgaaaaagacagaacagaatattcaataactgtgggccaattacaaaagatgtaatgtatgcataatgggaacatcagaggaagaaagaaagtgaggagcagaataaatatttgaagcaataatgagagagaatttctcaaaattaatgataaacacaaaaccacagattcaggatattcagaaaacaccaagcaggataagtaccaaaatatttacacttatgcatatcatttttaacctgtggaaaaccaaagacaaagacaaatccttaaaagaagacagaaaaacaaaacaaaatgaaaacaaaatactattgaggaacaagaataagaattacatcagactttcacaaaccatgcaaacaagatcagagtgaagtgaaatctttaaattgtggaaagaagaaaaaaagtcttgaaaattctatccagagaaagaaatcttcaaaagttaagaagtaattattcatcacccgcagaaatgctattcaagaaacactaaaatttcttcagggagacaaaaaataatatttgtcaaaaactcagatatacataatgaaactaagagtattagaaaagacataaagttaaaataaagattataaaagcaaaaaacaagtgctgcaaatagaaaacaatcatacacatggtagatactaacccaactacatcaataattttttaaatgtaagtgatataatctcaccaattaaaagttggagactgttggggtgaattaagaaaaaaagacccaactctatcaaaagaaagctggagtggctatattatttttagacatgttgatgtcagaacaagggaaaatataagagacaaaggaggaaattacagactgatgaaggagtcaattctccaagaagacaaaacagtcctaaatgtgtgtgagcctaacaacggtgtcaaaatatgtgaaacaaaacacagaagtgaaaggagaaatatagaaatctgctaacagagttggagactcacaacaccctcttttagtagttgatagataagacagaaaatcaataaagatatagttaatgtgaacaacatcatcaatcaattgcatttaattgacatttatagaatactccctccaacaacaccacagcacaaattcttctcaagcttgcatgaagtatccatcaatataggccacattcaaggccataaaatatatcctaactactatacaaaaatagaaataaaataaagtatgttctcagaccacaatgggattaaattattaaataataacataatatagctggaaaatcctcagatacctagaaattaaacaacttagtttcatgtaatatataggtcacaggagtttcaacaacaattaaaatattttgaactaaatgaaaatgcaaatttatgaaaattgtgggatgcgatgaagtaatacttagaagcaaacttacagcaattaatgcatatgttatataagcagaaatctaaaatcagtaacctaaatttccatcttggaaaactagaaaaagtagaaaaatttatgtctaaagcaagcagatgaaaaggattagcaaaaattagagcaaaaataaataaaattgaaaataagaatttacagagaaaatcaatgtaactaaaagattttttttgaaaagatcaataaaactgataaatatctatctaggctaacaaaaaagaaaagacaaaagacaccaattgccaatactgaaatgaaaaagaggtaataactattgatcccatggacattaaaatgatgttgaaggaacaccacaaataactctattcccacaaagttgatgaactagacggaatagaacaaattccttgttctacaaactaccaaaagtcacacaaggaaaaagatataatctgagtaagcctatgtctattaaatcaataattagcaactttccaaaaccaaaatgacaaagcccagtgactttattggtgaattaccaaacatttaaggaaaaagtgataccacttctctgtaatttttttcagaaaatagaagtggcaacaatttctaactcattctataggtcagagtcatctatatggtaaggattatagttatgtaattcagcataattgtgtgtttaacttaacatagaaatatgtacagatatgtgtataaagaaatattaatagatgtgtgtacatacacaagttaatatacaaacatatatctccttttgttagcagagaaaggctggaagcaaaggcacctcactagcaatgacaacaccagatgaccagatgctggctccttggcaaactggcaaattcttggcatgaggcaagaaatatacaacataagcctagatcttcttgtagttccaaaaagtaagaaaatgttcaaaacacatagcaacaacaacaacaacaaaaaaacaaaacaaacaaaaaaggaaacctctagaatttgggagagagagatatgaatgggactcaggaccttactgaaaaaaactcccagtgactaaatctacaacaattagggcaaaaataaagtagtattggattataattcaagggatagaataaatatccacaaaaccatattgatatgcatgaatgattcaatgcataataaatgcaggagaacagacaaatctcccacacaaaaagttccaaagggagtagagcagaaccctctactttctacaattcttacaatgtgggctgtgcacagtgacttccttcccaggaggacagtatgaaaaggctgaggaatcaccttacagtggagaaacctggaaaatactgccttagccaggtgatcacttcaacatcagcagtgatgaatcatgcgattagtatgcacctttgatataatgtgatgaaaacagcagcttacctctgttgtcttgctgcccagaacacatgactccactgtaaccatgagaaaaacatcaaatggcgatagaagaacattttacaaaataccagactagcacaagtcaaaactgtcaagatcatcaaaaacaaggaagccctgagaaactgttacagcccagaggcatctaagaagagatggtgactaaatgtaatgtgctatctggacattatgttaagaaaatctaaagatataattgattatacttaacaaattggtattggtttttaaatcacgcatatgtaccatattcatattgatgttaaacggtgaataagggggaaccgagtgtgtggtaaatgggaactctacactacctttgcaatgtttttcacaactgaatgatgaggctgagcatcatgcaagtccataggagatggcatttcgtgggctgtttctttatctatactttacataggctaatggcataaagaccacacggttcaacagccgtcattttacagggtgtagaagtgaaatcaggccgtcctgacttgagctttgctaatagtctcatttaatcaccacctcccgctcaaaacctttcaattgacgataaatatgtatgtacaagaaacagactgagaggagagggttcaaggttatacttcttaaaacatacctatgctggtgaagttttgcttcttactcaaccagcatctgttttgaaatgaatgacatcttatggaatttgacaaactaggaactatccttgcttaactaaaaaggctctacatttctgaatagagtccaattaagattgtttggatgagacaagattttcttcaaaatataaaatttggtaacatatattcaactagtgaccatattttcaactttcttttttttagagatgggggcctcactctgtcacccggactgcattgcattgacactattacagctcattgcagcctcaaactcctgggctcagaagatcctcccactttaacctcaccagcagctgggactataggcctgggtcatcaagtccagctaattttttctttaaaagaattattttttagagacagaggtcttgctatgctgcccaggcaggtcttgaaccctggcctcaagcaatcctcttgccttggcctctcaaagtgctgggattgcagatatgaatcaatacccccaacctcaattttatatcagctagctgcattattatttcctctttgcctgacaaactatttgtttacatttatgttaagtttttcttctcaggattgagcaccaggttgaaattatatatactgtataaactgtgtgtatatttttcatatatacaaatatatatatatgaaatgccatacacatagttctttatgtttccaaattcaattaatgaattaagatctgtatgacttcagagtcatagaattactgattttcaaaattttcaattttgcctaagatgagaactgctgtattttagcacgtttataaagacaacacaaaaacatatcaacactaaattacatttttaaaaacaaaatccaatagctgtcgaaagtttatttaatcatcacacatcgggacaaatttttacatgctgaaaacagttaaaataaaagattgtcacaatataccttttaaaattgtcttttcagttaacattaatttacattctaacaaattgcttagttaagaaagaaagttttccaaacatccaaaaaggttttcaaaagtttagtaagacaaatcttgtataaactcaataaataaatgaaatatgtttttctatagaactctggttagaaaaattactatttattacataaaatattattttacataggcattttttacctaccttgtacctgatcctaaagttatctgctaagtaattcagtaaggtttaattattgcaattagacatataggcctttaaaaagttaatagacatatctgcaaatatacaattgaacttgaatagtttttaagctttaaacttctatttcaaagaactctttgcccaactgggcatgaagaaatagagaatgttgagtttcacgaaaatctcgattcccttttgcacttttctttttataaatataattctcaaacaaaacataactaggagatccatacagaaactcttaagttcaactagtgtctcataaaaatgaaaggactgcctgttttctaagcctctagtattcaggtctgtgacaacccttttatcacatagatacagaaaaagcttctaacaatttctgaactgcatatgtagcaaaaagattgttagaccaacattgaaaaagaaaaaacccaaaatttatgtattttaggatttttaaatctataagaatatcaactgtaatacatgcttatagttgcattaattagaaagctataatgtattcattatattacgtatttatcataaaatgattgttttatactgcataagtgtcattttttctatagaaaatagttcagaaataaaaatgcattattcaattgaatataatagtttatgctatagagtatggtaatattctaggctataaagaataattctctagccctgaagtaacagaaaataagctgctttaggtaagcaaataaaaattggattcttactctcttattcttgaaacacatcactaatctcaaaaataactagcaatagctagtaaaattcaaactaatctttgctggtggaaatggaaaatgagggtttgaagaaggaatgtctaaaataagtatagaaatcacaggacttcactgcaattcagagacaaaagatgctaatttttggaaagaggcaattgctaaaaagtacttgcagaaaataacttgtctttatgtaagttttactctccaactagcacagttgtattttgtttgtttttagttttttgactcttgaaagtacaggtgctgtgcacctgtgggcctgataattgcctgtccagtggaatatgaaggaacagaaaccagaaacctcttatcgagtttaaccaacagagaggtgctgttagagtttaaaggaagtgattctacctgggtcttcatcagctgcatgaaaatgtattcagaattacggcacagtgaaagaaaaacagtccaacaggtctgcacgtggatctgaaatgtgatttactctccagaatctgagcaaatgcttaacctatctgtggctcagtttctcatttatatggtgaggatcataatacccataacttgtgctgttttctattaaatgctgcttccctgcattggtcccagcctgcaagacaaagaaattacacttacaagaaagctctagttccagattgacaaggggcctgtcagcaaaatggcttattttttcctgtatttatcaggttaaaatagggataatgcctttatctggttagctctaggcactaaccatatataaaggaaaataaaattacccacctgtggtctccattatgtgaaagtttgattttttgcgttaggagagtaacaataactgttaagaaagattcatcttggcatctgttgccagaatactgggagcagtaacttacaagacacctgtgagccatgggaggttgagtggagtgttggataccacagcctacacagcctctgtaagactgtcagtgttactggatgaatgctggactgatgttactgggaaatggcattggaataatacacatcccacatgacagtaaacattttcttgattgattgatgtagaccttgccaattaaaatagctcaagggagattcagaagtgagcagacagagccacacaaaagatcaaatcttagggctttagcatgtcatttccaagtacatacattgttttcaaactatatgttgttttcaaacaaattcattactataaattttcctctaagcactgcttttactgcattcgacatgtttagataagctatatcttcattttctttgtgtttgaaatattttttaaatttattcttgagacttcttctttgacccatatgttatttagaaatttgtttattaatttccaagataggttttccagctatttttgttattgatttctagtttttttgttatgatctgagtatttattttgtatgatttctatctttgtaaatttgttgtgttttatgtcccagaatatagtctatgttggtgaatgttccatgacagcctgagaagaatgtgtattctactgttgtttgatgaaatagtacataaatatcaattatattcagctgattgatggtgctgttaagttcaactatatccttactgattttctgtctgctggatcttccatttctgtagaggagtgttgaggtctccaacaatgatactgaaatcattcttcctctgaagtccgctttgtctgtactgaatatagttactcccactttcattttattagtgtcactagatattttttctttattttttcactttaaatctatctgtgtttttataaagtgggtttattgtagacaatatagaattaagtcttttttttcctttggtttttttttttttttccattcactctgacaagttctgtttttctgttggtaacaactgatgtttagagtaattattaatttagttggtttacatctcccttatttgttactattttttctgttttctatttttcgctcttgttatttttttgttttccactcttttcttgccttctctagttttaattattttatatgattctatttttctcctctcttaggatatcaattatacttattttaaaatattttttattggttgctatgccttcgaactacacatttacaattaatccaagtttcatttcacataatgttgtatcacttcaccagtcgtgaaagtaccttggaatagagtattcctaatctctctcttgcatccccctgtaacattacggtcatttatttcattttccgtaaactatcattactgagagtttgaatactattaaaacgaatgagaatagaaaaagtagacgatgctattttaccccacttattccttctctaatgctcttcctttctttatgtaaaactgaatgtctgacctatagtctttttcttctttctgaagaatttcttaccacttctgtcaaggtagttctattagaaacaaaatttcctcatttttttgcttgtctggaaaagtcttttttcctctctcacttttgaagtataatttcactgatacaaaattctagattggtgagtttttttttccttttagcattttaaacttttcactctactctcatcttgcttgcgtggtttctgaagagcaggtcactgcaatttttatctctgctcctgtatatgtaaggtattgttttccttttttatttccctcctctggttttcaagattttgtcattttctttgattttctgcagtttgaaaattatatatctatgtgtaaattttgtggtatttagccggctttctgttctctgaaattcctggatctgttgtttcatatttatcattaatttgggggaaattctcacttattattacttcaaatactttttctcttcctttcttctcctccttgtattcttcttctgcatacctcacagcttttgtgattctccttcattcttgaacattttgtcctgccatttcattcttctttctctttgcctttttgttttggaagtttctattgacattacttggagatcactgattctttcttctgctgcgtacagtcttttgatgaacattattaacatgtatttgatttctggtatttcctttttattctttcttagagtttcaggcactcttcttacattatctatctgtttttgcatgatttttgacttttaaaattagagcccttagcatatttatcatagttgttttaaattctaggactagtaatcccaacatgtctgtcatatctgggtctggtttggatgcttacctgtctcttccaactgattttgtcttttagtatgctttgtaatttcatgttgcaagccagaagtgatatcctgggtaaaaggaactcagtgaggtaaacggcctgttagtgtgtggtttatgtttatctggtttattgcttgctgtagctgtaagtatcaggctatggtttcctgtggtttctttgtttgtgcctcccctgttgtctttgggatttcccatttttttttcttaaaaaggactaagatgtgcagttctctaagttatattcccttgttaccccattgtattacacctgtgcctctgaactgtggcatttgtaactgcttctcatttccctaaccccttcctaattaagaaggagaggatggagggagttagaattgggttctaccttcccctcacatggaagacttagacctgggtattttatttcccccatgtggagggctacaaagggatgcagttgaatttttccccttttcaggtcagtaaggctgtagtaaaaactcagcagcacaggttttgcagaaacccccagtacgtttgactctggtggaatagtttctgtagagggcaggcctagttaagaacagaatgctctggttctacttcaaaatggctacttttggaaaactggaagcaagagaggatttttctttggtctttattaagagaatcctagaggtaaacctcacaaaaatgtgagggccctcatggaattgttaactttcaaacttatccaccatgaacagctatcaaattgtcaactgttatttaggttttcctaccacactactagtgatataggagttaaaaagaaattatttaggcagttagtgagggtacaggagtcctcggtaaggttttccttttaataaaaagcagtcccaaaatcttttcttttctaacaaaaagcagcctgaaaaatcaagcagcaagcacagataaaccaagctggaggcttgcacaggtgaatgctggctgctgtgccaggtgccaggaatatatctaacatggaggatttctcttcccttttctttgttgccatgtgtgagggtgtcatggcaccagccaggtagagacaccatctgcataataaaagattagggtaggatggctagcctcttcatgggctatgtaaatggcacacctggtgcaaccaatccctgggccttatgtaaatcagacaccacctcctcaagtccctctataaaaccaactgcatactgtcacgaaaaggggagatctgactggaactcccctccctctaccttggggagcttttctcttgcttctttcacctattaaaccttccgctcttaaacccacaccttgtgtgtccttgtcttagttttccttagagtgagacaacaaacctcgggtatttccccagacaaatgacacagcttcactagttcctgcagagctttctgctccagtaaattgtgattctctgtaccctcctgtgtgtctgtccagtttggggagcaccagcttcctctgtgacttcaattatctgatggatctgaaaagtcattggtttctattttgttatgcttttttcctgtgggaacagaaatgatgacttccaagttcctcacatgctggcccaggaattggaggtcccccatatgttcttgattatttcttaccctccattattgatagtacctagcatggcagagtggtgagctaagcacctgtcaacaataggttaacacatcaaaggaagtagacctagggagtggcttgtactcaacaacagatacaataaggcaggttcacactgaatacccaactttgtcacaaccaccatgtatttaactacggctaatatttttctgtattttatttgtgaaaaattgagtaaagtagattcaaataaaaaccagaagtgtaagattcccaagataccctctgggctcttgctcttcatgccttgtattaatcatgtttttttttttttaattatactttgacacctaaggggctttgggatctggggtgaaactgcctgtttcagcatgagctaattcctagagatagtaatcaacttagtgcagacctttcatatgcaaaccaaccaaccctgaccccatacccttcatcctcctcctttatctaactctcatacaccaagcagatattccccctgtcctaagtcactccagagccacatgccagataacgagggacgacctccatcacccagggtttgccaaattccaagcttgttcagttgctcactgtgcctcatggattccattccacagaaaccacatgcttatgtccatgcttctcccagtttcctctgcccctggccaaggctggtactttcttgtgtggtcctgcatggattgccatggtgtgtcctctcctcttggaaactatgagtaatcaattcttcttttaatggctttgacccttttctgtctgtcactttactgctcctgattaaaacaaaactctggtacattttgaaacatgcctttttgtaaccgcccaatgggttcgccttgcccactgcctagccacactactagtgatataggagttaaaaagaaattatttaggcagttagtgagggtacaggagtcctcggtaaggttttccttttaataaaaagcagtcccaaaatcttttctttctagccagagctgatttatcgagacaggggaattgcaatggagaaagagtaattcacacacagccagctgtgcaggaaaccagaattttattattactcaaatcagtctgtctgagcatttggggataagagttttaaaagataatttggaaggtaggagctcaggaagtggggaggactgatcggtcaggttggagatggactcacaggtggggtagaagtgagtttttgtttgctattttctgttcccaggtgggatcacagaactggttgagccagataacaggtctgggtgcagggtctgcaaaatgtctcaagcactaatattaggttttacaatagtgatattatccccaagaacaatttgagaaggttcagactcttgtagccagaggctgcgtgacccctaaactgtaatttataaccttgtagccaatttgttacttctgcaaaggcaaactgctccccgggcaagaaaggggtctttttgggaaagggctattatcaattttgtttcagagccataaattccttcccaagcttagtttggcctcctcccaggaatgaacaaggacagcttaaaggttggaagcaagatggagtcagttaggtctggtctctttcactgtcataatttcctcagttacaatttttgcaaagatggtttcatttcctttgatgtaaaatgtcaagacctgcaaaacttaacttttctctatacacagtgcagaaaaatacaatctaaagtggtcattgtttaagaaactttggccttttttaggggggagttgttctgtttcattcatttttaatggctaaacttagactgttaatgattacttcataaaataacattagcagaaaactagccatttcaacgtttatccacttgacagatattaaataatgaatagcttagttatttaattcagcaagtatctatttattgctatttactattgaagtagcattgttgtctggggtaaatacccaagacttgtcgtctcgtgtcaaggaaatcgagtatgtggacagaagaagtgagtttaggagtggaggtttaataaacaaaagaaagagaaaggatagcagctctgtcttgcaagaaagaggcgctcctgaatgggacttccagcccacaggagagtgcaccggattttatagacaggcttgaggaggtggtgtctgatttacctagggcccacagattggttggaccaggtgtgacgtttacgtagcccacaagcaagctgatagccccaccctaatcttattatgcaaatagagtcttttcctggctggtgtcgtgttgcctgctccttactgtacactggctggcaaagagaagggacgatggagccaccatgttgaacatgcctaatcccaggtagccttttcctattggcatagctgccggcattcacccatgcaagcttccagcttgcttgcctatgtctgcagctcgattttacaggccgctctttgttagaaaagaaaatgattttggggctgctgttcattaaatggaaaaccttactgaggacttccttaccctcactatctgcctaatttcttcttaactcctgtatcactatgtttgaggtactctgttaggcactgagtagtgaacaaaacagatcctgtcctcattcgtgcttcattatttttgttgtgatttgggaaaacttctcagctttactgtgatttctctaatgtactagaatgtgcacagtgtataaaagttaaaaatgttttgcatttcattgtataatgaaagaaggcctccaaatgaaatatttaatgagatttttttttcatatggataggaaaattttaaggattgcgttctgtcaggcaggaaaaatacaatttttactttagaaaataatcaaataaaaaattatataaaatgaccaagtatagcagggataattatagtaattattatactgtgctaaagatatcaacttagaaatataatggaattgcaatttctaccatctcacagaaactgatttcaactcctggggttctagtaccagaagggagaaagctttctgtcttttttcttttttcattgcttatagccacatgaactcattcttatggcctgtgggatcttaattttctcctcctctatttacttccactttgtattaacttccttcttaccttttatatcttcatatctaaaaaataggtttttttagaagtttagagatttttattgcttcaacattattagtgccatatttacaaatgtgtagttgctcaatttgaacaaatttgaatagagtgaagacttataggattttagaaactgtgcaattacattccttcattaaagacaagaaattgaagctatgtgactgctcagtgttaagtgttctgtgaacaaaacacacattgacacagtgtcatacacacacacatatacacacatgcatagagtcacatatagttatagaattttaatgctacttatattaaaaacaatttgaatcttaagtaaagtgagttagatattcagtcatttaaatgtaattttttttttttttttgagatggagtcttgctcagccgcctaggctggagggcagtggcgcgatgttggctcactgaaacctctgccccctgggttcaagctattctcttgcctcagcctctcgagtagctgtgcctcccaacaccagaataatttctgtatttttagtagagacggggtttcaccatgttggccaggatggtctcgatctcttgacctcatgatctgcccgcctctgcctcccaaagtgctgggattacaggcgtgagccaccgcgctcagcctacatgtaatttaatatgcatatttattaagctaatatgtattgataaaatattggatttctattaaaggaagctggattatgcatgaagttggatttacctcccacgatcgatagaagtttaaatatcctcacagataattagaagtgcctaggcaaatcatgaaataacaaggggagaatagtcataaatacatcatgtgctatattacttaatgaccataatgtcagccttcttcatagaacccaactgtaatactatcaagcctatgagatgcgataccagtagtcttagcattgcgaaaggtcagagagcagcgtggaagttatgaatcgtacatgtaagaagacagcagttgtttgtcactttgacaccctagctcagcagacaggagtcttaaaggactcaaggacaggttctgaaaggattactgaggttgccttctgattgggagatcatttttcttgggctgaaccctggtctactcttgcttccctagttctttcctttcaacagatctgtgttccataatattttgagtaaaataaaatgacagaaatcactagtgtcatgtagttactatgtttctgctgttaaaataagcacccaggaaagaatattgtgctgacattttaccattcaggcttaaggagaaggaatgatttaaaagatatgctttgaaacttcatagtgtcttagataagttagatagataggtgttgctattatcctaatatcacagattggaaagtgagacacaggagttgaagtaacttgccaaaggccacatagtaagtaagtggcagagctgagactggaggctagactgccatgtttcagagcccaggcatcagacactgcagagcctcggatgagctgacacaataagagatgttattgaaagcaataactcaattgttcagatgaaaacttgactagaacattatggagaagaagtcaatagtaactgacatttttaacaatgattcttgcaggaaattctcttctacttaagtgttttgttttcaaagtacaagatttgcctttcagattatgttcaaggtctgagctgacaggatctttggcttagcaggaagaatttcagaaaagaaatgttcctgtaacaagacttgaaaacagaaattggagctaggagggcccattgattctgagaaagcctgggaagctcggaacccatgatactggattgattatcaatgtgaaaagagggaaacacagcctaccattctacagattaagcatgatttcttctaatcagatgctatcaacatttcaagtcctcattcagcaaaaaatagcaataggctataggatagctttcaaaaccattagctaataactttatttttaattatctcacctactgttaatacatggaccaaaggatacatcttttcctcaagctaagtactgtgatttgcatttgacacacttagaaaaattatttatattatatataatatatatctatagatatatattatatataatatatctataaatatatattatatataatatatatctacaaatatatattatatataatatatatctataaatatatattatacataagtaaaatatatacaaacatatgacaaatataaatgataaatataaaatgtacattttaaatatatatacacatatatattgtgtgtatatatatacacacatatatgtatatacatatatacacacatatatgtatatacatatacacacacatatatgtatgtacgtatacacacacatatatgtatgtacgtatatacacacatatatgtatgtacgtatatacacacatatatgtatgtacatatacacacatatatgtatgtacatatacacacacatatatgcatatacatatatacacacatatatgcatatacatatatacacacatatgtatatacatatatacacacatatgtatatacatatatacacacatatatatacatatatacacttatatatgtatatacatatatatgtgtgtatatatatacacatatatacatatatatacacacatatatatatacacatatatatatatatggacaaagtcttgctatcttgcctaggctgttctctaattcccagcttcaagcaatcctgcttcagcctcccaaaacattgggattacatgtgtgagccacaatgcctggcccctgacacacgtattttctgatccaaaagagaagcagagagtaatttgagatgcttcccaatgataataataaacaggaagggaaaatgcaaataagaagaaatgctatctagatctttccacaagcacagtttacttaagtcattatcttttagaagaatgtttattttggcaactagaattgaggtctcaactctggtttgcctgtgcctaggatgcaagcagacgttgctgaagcagttccctttctgcggagcctgctgacaaagcttccactaaacatagacaactacctgaaaacaggcccttgccaacactgcaggactctcaaaacagacatactttgtggccccaaggtataaaaacttatttgtaaagctccaaagactacatattttaaggttttagaattatgtggctactattgcaactactcaaatttgatgttgtattaggaaagctgtcatagataataggtaaataaattggcattgttatattaaaaataaaactgtaattacacacaaaaaagatacaggctaggtttggttcacaggccatagtttactgacctctttttacttgtaaattcaaagggaaatccgaagacgaaaatatatttaaggaaaagaaatactgtgaaaggaaatgaccaagatgaacaaacaatgcaattaagccaaatgaaagaaaaaaataataaaatagaagtaaaattgttaaaatctcaggtgatcctctcagaaggaaggggctacgaaaaaaaaaaaagaaagaaaattagaaaggtatattgtaaattaaatactccatgtaaacttaaaacaacagatagattcaatattgaaatggaaatgatctaaattcaactaaaatgtaaagaaaaaaatgtatggagagaattatttttgagggggctatgtattcatatacaaatatttccattaatcactaacatttgggtagtgactggactctcaatttgttacatatcagactggcaataactattaacttaaaaaaagcaggcaaaagttttctagattctcaaataaaaattcctcagttttagaaatgttaaggtattcaagttcaatcatgttaaatcataataaattatgatttatttaaaaaaaagaaaaagaaaaagaaaaaaatgtatggaacaaataaaagaaagtttaaggggcataagaaacagatatagaaagagcagggtgtctttaattccagaaacacagaataaaaaacttagaaaagaaaataatacatgaagtaaataaaacttctcagtattgacagcaagcaagcctttatactaacataactcataagatgccaaacaagataacgcatacatatacaggttctgatgacacaacagaactccaaatacagaaatgcaagtcctcaaggtgtccagagagggagagagcgatacaagtagagagagcaacacatttttcttcaaaaagtatacaaaatagaaagaacaaaaaatctatcacaagcaataaggcatgctgaaaaacactggagaagtaccctcaatattctgaggaaaaggatttgggagttaaatgtctatgctcagatgaaatgtcagtccagtctgacaataaaatgagtatattattagctattcgaagacttcaaatttctttcaattatatccaaaaaatttcaccatgttgtcctaaggtttatatatatatattagagatatatgatataaaattgtatatattgtacagatgatatataatcatatagatgatatataagcatatgatatataatcatatagatgatatgtaaatgtatatatgataaataattacatagataatagaaaaagttgggaatttcatgactagcctggtcaacatggtgaaaccccgtgtctactaaaaatacaaaaattagccaggcgtggtgttaggctcctgtaatcccagctactcagaaggctgaggctgcagaatggcttgaactcggggggcagagatggcagtgagccaagacctcaccactacactccagcctgggcaacagagcaagactctgtttcaaaaacaaaaaacaaaaaacaaaaaaataaaacacacacagttggaaaaactgtgaatgatgtaaaggaaacaatagctgtgaaaataaattttaaaggaatatactttgattaagctttgagagattatcacttaagtggcacttaagttttaaccacgggggattatttatatataaatcctgtcagactgcttctttctgtagttggtgaagtgtgagttctactgttaacggaggtagagattttagaacataccagtagacagactgtgggacactcaattaaatggcaaaacatccacaataccaacaataataacccaaatcctcccaattaagaggtgaagtggggagagacatactgaggaagcaaataaatttacaagctaaatgtgcttaatgttgataaaacaaaccacagaaagctggttttactttgtattttttacctttctagttgtgtttgtttgattttactttttatttatgaatatgcattcctttgagatttaagagaaacaatatttttgaaaagacagaatacttaaaaagtaaatacttttccaataagggcttgttctgtgctttataaatgatgtctctgtctgcaccctcaatgagtgagtaatcaagctccaccaggcctgtttcacaggggcactagtcccattcattcaggctctgccctcatgaccttaccacctcctaaaggccctacctcttaatgccgttgcattgcggattaggtttcaacatatgaattttgagggcggcacaaacatttagaccatagcagttgaattcattttcctcctcacatctggaaatatgattactttaagttaccttcttagtgtcacacatagcctggtaactaagcctgtgtgtactcattttatttatgctgataatccacaaagatctctttaatttgattcaatcaaatatagattatataaactttattgaaagtcttagacatataactcaaatatctgcttggcatggatggcctgggaagctaaatgcagtcctaatattgttgtctttagttttctgcatgcagtcaatagcagagacaattcccattgtgtctatcatatcatacaccacatagtaattgttgggcaaaacatgtttttttaaaaattaattggtcacaaactattttaattttaagcaatatctattcctacttcttccttaaccacttatttatttatttgtttatttattttaagacagagtctcactctgttgcccaggttggagtgcagtggtgcgatctcagctcactgcaacctccgcctcccaggttcaagcgattctcctcctcagcctcccaagttacaggatctgccaccacacctggctaatttcttttagtagagatggggtttcaccatgttggccaggcttgtctcaaactcctgacctcaggtaatccacctgcctcagcctcccaaagtgctgggattacatatggactttacctctcaaatttcacaagactttctagttgccaaaacaaaatgatcttccctcacctatactgatgttactgcaatcactggaattatctcatactgttgtccaatctctcctgattataaacctcctatggtttagtttctgaaaagtccattttttaattaatatgtttttgtctcttgaccctttcctgactgctcttctttaatcagcccttaagctcccagccttagcttttcccactctgatctcctagaaaaataaccttttctgctatgaccaaagtgtgttccatttggttagtccttcagtatctctcaccctgatatttgtcccaaattgcaaagaaaatgtccagacttcagcctatggatgccccatcaattccccagttcgacatctccaacagtttttactgtttctctatcctcccaaattaggtctgtgcctggatctgccgtcacagctgagggtgactctgtctttcctgcatgtgcagccctgacagttcaccagcatttgcttcctccctcattttcttcttccatgactccgccttttccttgattttccacttccaaccagtgaccaccagtaaaccacatgtagaaggatgaaaagaatacttctgagtcatacttgaggaaaaacagatgctggactacacacagttccccccctacccctaccccccggccttctttttccttttaactcgaatagaaactgaggtaagaactaataaccatatagggatggaggaagatgccatatactgaaaggaggatttctggaaagggcaggactgtgtggattaactgaagacacattgaatgagccatctgattccactctgtgtggagccttgactccgtgaattcacctgcaaacattttattaataaactgagaaacagtaagggctgatgacagcttcaggcagacccaggtcatgggcttaagctgccttgaaaaacctacagtcaatcttggttccttacgtctatttgagcaatgtctccgtattcttccccactttgcactgtaagtgccagatttcctagtttagatcctcttcattagtctttgccatctgtattaataattgctatggtttgaatatttgtgcccctgccccaaattcctatgtggagattctaaccaccaggagaatgatactagagcatggggccattgaggggtgattagatcatcagagcaaagccttcttcaactggaataatgccctgatgaaagagacaacttataaaaacaattatgccattcaagtcctgaaaaatacatgatcatgtaagaattaagtacaaatatttcagtgtctgtcaaatctcactacatattgtattcacatctactctcttctcctgtaatgctcctagccatacccaaagccaaattccatttttcaaataagtgactattccttgtttaaacctggcataagtatctcattgatacctttggaaagtacactgtcactagtctgccttgctaattaaagaagggcattgacttcttctagggattttctgatgcactgtaagaattcattattgtgttttgacatgtcataacatcctccagaaaaccaggacataaatggactttctttctgctccttacactgttctagcttatgtgatttgatttgtttttttgttttgaaacatcattgtattagtctgttttcatgctgctgataaagacataaccgagactgggaagaaaaagagctttaattggacttacagttccacgtggctggggaggcctcagaatcatggtgggaggtgaaagacacttcttacccagtggcagcgagagaagaaatgaggaaggtgaaaatgcggaacctcctgataaaaccatcagatctcaagagacttattcactaccatgagaagggtatggggaaaaccacccccatgattcaaattatctcccaccagtccctcccacaacacatgggaattatgggaatccaattcaagatgagatttgggtggggacacagaaccaaaccatatcaatcatagttcatatttttttcttctttacagaaaggtcagctattgtatatttgctacgatggttattttcactaattccaaatttcttaaattttccaagatttgatataactcagcttacaatgataaaatttaacaatattgaagcttttagaatttgctcccacagtatccattaatggattccaaataaagacaaggtaaatggactcctactgaaaaatatttcctgattttccacagtgttctggagagttaagaatgtcagaacactgatgaccacatacctgacttcttaatatagtagtggtttaggtaatgatcatagaacaaatgcttatgtgatatttactcagtgccaggtaactctcaaaggactttgcatgcattaactagtttactctttaccattaccctatgtggtaagttctattgctatcctcattttacagatcaggaaactacagctttgagaggcaataaaatatttactgaggtcacatggctaaaaattgacagagacaaaatatttgcattaaggcttctaaccactttgctatatcagccctcatgtctaaaatgtaaattgcctcaggtagacagattttattcactgttttgatttcctcatggctttcttcatgaacctcagcctctaatgtgaagaaacaaatctttgctttgcagtatgttcaagcatctaatcacatgtttggtgggacactggaacatagcatcctttgataatttattttacacagttgtattctgtttcgctattttacacggggatggctattctatgaaaatgtggaagtatttgatccaaatcttatagaatacttttgtgctcaaacctctataaataggcctgcagtggtcttgtctgctttgtgaggcattgcctatgtcctcagaatctgtttgaagagtttccatgttaacttcagggcctcacatgaggtatccctggatcctgatcctggggaggctgcagcggggcttagcgccacaagaggtgacccttcatcacatgccgctcaaaatcacagaaatcacaacatctcaagtgccaaagcaaaaataaggccaaataaggaagagagcatcaatctctccttcctgatgtttctcttgtaagctttaaggccacatgggggatgtaaggagggtgattccaattatatttcctctaaactggactgcatatttgagaataaagtgagctgattttttaaattgcagtggagcaacagagataaactggccatttcccaggtgtacaaactgatgtacacatggtcacactggaaatagaaaaatcaacaaatacataaacataatgaccacaagctctgactcattatctcatgtctgaccaacaattgtgccttagttcatagaagaatcattagcctccaagtttggcagatgaagcttggaaaacctttaaacacatgcgtgcacgcacacacacacacacacacacacccttcaagaagttttagcctctttgtctccaatttgcataatgtaggcctattttctaatagttaacttgccgcttattactaaggatgttcatttccacatcttttccagccatatttagtttggaagtgtaatcccattgtgtatctctaatatatttttcaacataatacatctgctagatttcaaattacatttcagtgagtagttcttgtcttgtattcaacccccatttaatgtttgcactcaaatgaaacaacttggtaagcaaagtgccttcagcagttctgtcaagatttagtaacttaatctggattcctgttaaaccactcttcataactaaacacttgggtagactctggctgagatctcattgctggaagctaaatatatactgattaggagagaagcaaccctggggcatgttactgaacaaatgcatcatcatttctatgcagacatttgtacttgaaaaaacgatcacaatttaataagtaacagacgtaagaagaagataaatgatagaagttattggagagcaaaggacttgctaaagatggtgcaagatctcaaattaatgaaagaaaagattaaaactgtttcaaacatgttgtctgaccactaaatgtaaatatcatatggcctgactgatacacagatgaagtagcattttaaagctgtgaataagaaccacttacttttccacactgaacatcattttatctctttgaatagcaaactaggtctttgtcaacaacagccagatgtggtcattgaaagctaagtaccgtgttggactgcatgtctagtgaagtggaatgggtgagaggggacaaaaattccattttctgaccaagccaaataattctgtcattattgcattacaattagcccttcataattagaaggaatcgagtagcttggggatttaatctgaattggtaataaaaatggaaatggctttaaattatgccctatgagacatacttacaggaaatggggcggatgtaagtaaacaggaggcaaatattgataagtgcagtcatttgggggcagttgggaaaatcacatgagactttttctctgtggctttgaggtctcatccagagcacattggaaaaagagaagtaaatggatttgatctcagtataacttttcagcagttagagctgttcaaaggaggaatattttgttcattattaccacacatattgaagtaggtctgatgaccaccagatgagcatatcgtggtgaagactgaaatatccgatgagtggttgattacatagccaccacatctttctattgtaatgagattctctgtcctcccttccctcataatcaaattgagatagggaatgcaggaggaatttagcgtacttcaacaaaattattcaataataagtattttattaggtaaatgaataatttagatcccatttctcaaaaaattagttgaagaaataattaagtgacattgttcaggtgtcatatgggcctagtttctgaggtgagaagttggctgctcatttccacagagggttgagtgaaagaaaattgagctgaaataaagaaggaataatttaaaatatatgtattaaaagtttattagtttaagtgggtatacaatattgaacctggctgccctgaaaattttaataaagaataataacaacctatttggttacatataaccctgttataagaatgttgtaacacattaagtacatgatatctttgtaatgaagttatatctagttacatgctgctcaaaatgtattcaaaatacaaagaatgccaacgtaaatggaaaaaccaactcaattctcaaggtttggagaattattagtatgtctactgaatattgtctactaatttgccacagaagaggagttttctgaccacttaattgaaaacagaacctcctaaataaccccttcattatttctattgcaaaactctgttcatctccttctccacggggatcactggcttgtaaaggtttcttttcttgcttgttgtcttgttcattgtctgtcccatccaatgtcatttaagctccacaatggtgtggactgatgatatctgtcttcttccttgcatccatcccccaaatctagcatcgtgccaaagagacaggaattgctcaaggaatacttgtggaataaacgtgtatgtttgcttttgtttgaataagttacatgcatttgccattgtaaactaaactggtttggtgaacggcttgcattttatttaagaaaaatgaattaggcttttcgaatgtgaagttacaaagcaattacctttttctgctacaagaaaaattccttcatccttctcttatatatgattgaaaatatattagtaaagccttcttcgtttttctttgcccaatatgaagaattggttctaaaacacgtccttggcacaatctccagccagagagtgggcaccagcttggcttcaaggtgtgacctctctccctgtacaatattttaaatatagtgttcaatgaatactaagataagcacaggatttacaatacatgaatttaaatttccactatatgatcttgaaaacaaatatctgttagctttttttccaagaaatttagtttcctagcagataaaatgtagaagataaaaatcttcctagaagatttccagagtgaggctgtattgcatatttcttgtttgcatatttcttgtattgcatatttcttgtttgaacacagtgagaatcctggtatatgtgacgttgcctgaggctctgccttcttggggacttcaaggagcactccaggaagagtgtgcaacatcagcaagatgcaacaggggagaggagaggctgagaccttcctctcatacagatgaggtgtctgcctacccttgagcagcagggctaagcacacagagcccacaggcttcgagaacttctaaagtctgttctacagaaatatttagatgagattatgaggtattcaaaaaggtttttcaaagcaaaataagtttgggaaactgcattaagtaaagtttgcttagagctttcacatgctaagatgcaatgtttagaaattctgaaagtaccagtgcatgtgatgaaactctgatgaatggtggtgtcacttccctattgttaagtatttggggaccaaaatcatctcttataatctatctttcctggtgccatataggtcatggttgagaacttgatgaaagttgaataaaaatatctaacacttcttgtaaagtatctggagccaggatgccaggtaggcctgaaaagcatttgtttaaaaccaatgttctttgctgcctggaacattagtttgattttatcaactttaaaaatggaaaagaaaaagagtaactaggctgagtacaatgagtccttttaaaaatatatctttttaatttttgttcaaaatcattattgcttttattacaaaataaaacaaaaatagaaaaccacacaaacaaatccatactttattgaattaatgtaatgtcaagacacattttaagaaaagattagctggataatccagaaacaaatacaactcttttgttttataaattatttttccatttttttactgttatatttcttttctctctgaaacaagagctaaagcattgcttctgctttctaatcatttttttgttatgtctatcagaatatagtctcccttttttcagtcttcactctctgtctcctggttaaatgctgatctccattcagggatctgatggagtcccggcggctaaatatggcagtgaagaaagtaccaaccatgctagggctcagaagaagaaaaatgtgggaaagtttgtaacttcttagagacttggagggctcagaagacaggaagatgtgggaaagttagaaacttcctagagacttgttgaatggctttgctcaaaatgctgatagtgatatggacaataaagtccaggctgaggtgatctcagatagagatgaggaagttgttgagaactgaggtaaatgtcactcttgctatgcaaagagactggtggcattttgcccctaccctagaggtctgtgtaactttgagcttgagagagatgatttagtgtatctggtggaagaaatttctaagtgacaaagagttcaagatgaagcagagcataaaagtttgaaatatttgcagcctggtgatatagtagaaaagaaaaacccattttatggggagaaattcaagccaccagcagaaatttgcataagtaacgagtagccaaatactaattgccaatacaatagggaaaaagtctctgtggcatgtcagagaccttaatggcagcccctcccatcacagacccagaggcctagaaggtaaaaatagtttcttgggtcaggtccagggtctcttgctgtgtgcaggctcaggacttagtgccctgggtcccagccactccagccatggcaaaaaaggggcccaggtatagctcaggctattgcttcagagggtgcaagtcccaagacttggccgcttcgacatggtgttgagtttgtgactgcacagaggtcaagaattaaggtttggaacctccacctagatttcagaggatgtatggaaatgcctgtatatccaggtagagatatgctgcagggacagagccctcatagaggtgttagggcagttcagaagggaaatgtggactgtgagcccccacacagaggcccccaccatcagcttccactgtgtgcctggaaaagctgcagggaatgccagcccctgaaagcaaccaggagagaggctgtaccctgcaaagccacaggggtggagctgcccaatttcatgggaacctactacttgcagtatcatgacctgcatatgagccatggagtcaaaggagatcattttggagccgtcagatttgactgccctcctggattttgaactttcatgggacctgtagcccctttgttttgtccaatttctcccatttggaatgggtgaatttacccaatgcttgtactcccgttgtatctaagaagtaactaacttgctttttattttacagtctgataggtgtaagagacttgccttgtctcagatgacactttggattgtgaacctttgggttaatgctgaaatgacttaagacttcaggggactgttgagaaggcatgactggttttgaaatgtgaggatatgagatttgggaggggccggggcagaataatatggtttggctgcatccccacccaaatctcatcttaaattgtagctctcataatctccacgtgtcatgggagggacctggtgggaggtagttgaatcataggggcaggtttttcccatgcttttatcatcacagtgaataagtttcatgagatctaatggttttataaaggggagttcccttgtacacactctgtttgcctgctgccatgtaatacatgactttgctccttctttgccttccactataattgtgaggcctccccagccacatggaactgtgagtccattaaacccctgtcctttataaattatccagtcttgggtatgtttgtattagcagcatgagaatggactaatacatgcagtaatcaaagacttcacagaaattttaaaaatggaggaagagaaaattatctctggatctgattcagaaccaaatgtgtggctaacagtctagtgaaatggaacgcattgtagaaaattataaatccaagaaaaatcatggaagcgaataaaattgttctgaaaaacaagatcctgctatatgcattttgaagggtctaaataataattgcagtattaggaatttcttcatagaaattttaattaaaaaattaaaattgcatacatatattcaaggaaaacaacttggtatttataaagcaagcaggtactagttctaaactaaatgctagggttcagataaagaatttagatataagaataagatgatctgagaatattatattgggtaggtttttgttacacatggagaaaatagacaaagactttcagatgtggaaaactacattatattcatatacctaaaataagacaggaggagaagaaggaaaataggtaggaaagaaggaggagaatccagcttttcaaagtatgaaaaaaaagcaataaatatgcaaaaaattaaaatgccagaaaaaaactgatggtgtacttgaaatgctggattaacctctgggactttcaacatccataacaactttcaaaaaagacctgaagagattaatcatgtcagtaagctccacctgactaaattacttaccctaatgtggtcaaagggttgatgttttattttataattaatataaaattatagttaatttctcattatggttgaaaaccataataggacataaaaattctctgagaaggtatttcttttcagacaggagatgataacttattcaaaagcctaaaccatgaaaattataattataatagtaaaatatctcaagaaaaaatacaagaaccaaatgtaaccacaggctcaacagattcatgcttaagtaataggaatatgtttatttttatttttaatttaacatatctttaatgactacatttttctacctcaatttaaactgtttaataagaaaaattaccttttatgaaaatactagaattgtttaaacaactgctatttttaacagagtgtcacagtatttgtctgctatgaacaaggaacaaaatcatctaaagtgagaacaagtaggaaaaaaaatcctgcaattttatttaagaaaacattttagaagattaataaaaaaaatttaatgtaaacattgaaatgagcacagctggtttccaaggtaaacaggcagaaaaattgtcttggtccatttgggctcttataacagaaaaccatagattgggtgacttaaacaacaaacatttattctcacagttgtggaggctgggaagtccaagatcaaagcacggacatgtcctttgtctggtgagggcccacttcctggttcatagactgctgtcttcctgctgtgtccccatttggcagaagagtcaagggcattctctctcatctcttctcataagaacactactctgatcagaaatgctccactcccatgaccccattacctctcaaagactcccccttttagcaccaccccattcatggctagggtttccaataagaatttaagggggaccacaaacttgcagttcataacagaagttaaataccatttatgtcacttgctaggagagctgacactggggaagtcctcagtgtttagaaatctctcaaacattcttatactgatgaagagagataaaagtgtgctaaatactcttttatatagacaatacccaagacactcattactttatcacaataatgatcttcaaccatgactgtaaattaaaataccgtgtggtgtatttttaaaaaatgcaacttaaaagcatgattccaaacctatcaattatggtgtcttaggatggagtctgtacttcaaattttttcaaagctccctgagaaattatggtgcactaaaaggttaagaaaatagtgaaaacaatagaataaagttttcccatcagaagttatatatacctgaattgtctaattttaatttataaaacatttgttccaacttcccaagatcttattcatataattatatgaataaattcatgtggattatacaaatgaaggtagacataggtttttagagtttgtggactggaaatcaataccactcttgcaaaagcagaggtgtttacaagctatttttaaaatatattcacaccaaatttaggaaatgtttattgcacttttcctgtgtttgcatttcagagggaggaaagtgagtttgtgttaaatcatatactttatggatgtgtctgtgcttgctactccaggcaggaggtaaatgaataaacagaataacaatacagcaaacaaactaggttttctttttaagtgccatctcctggagaaagaggtcaggctgagaaatgccctctattctcacttatcctttacaaaattcaggatttttcatgccagacacctatcctcacatattttccttttacttgtgtgtttctttccacctcattatttacttatttattattttctggccttatttacagtctaagaatacaaaacaaacccaattcagtttacaattctatgtacgagagaaacttccaaattgaaggatatgcaaaaatttgcttagaattcagttatgagacttttccttcatattgggcaaggaaaagcgaagaaggctttactaatatattttcaatcatatataagagaaggatgaaggaatttttcttgtagcagaaaaaggtaattgcctttgtaacttcacattcgaatagcctaattcatttttttttttttttgagacggagtctcgctctgtcgcccaggctggagtgcagtggcgcgatctcggctcactgcaagctccgcttcccgggttcacgccattctcctgcctcagcctcccgagtagctgggactacaggcgcccgctaccacgcccggctaattttttgtatttttagtagagacggggtttcaccgtgttagccaggatggtctcgatctcctgacctcgtgatccacccgcctcggcctcccaaagtgctgggattacaggcgtgagccaccgcgcccggcctcatttttcttaaataaagtgcaaaccattcaccacaccagtttagtttacaatggcaaatgcatgtaacttattcaaacaaaagcaaacatacatgtttattccacaagtattccttgagcaattcctgtctctttcgcacgatgctagattttggggatggatgcaagtaagaagacagatatcatcagtccacaccgttgtggagcttaagtgacattggacgggacagacaatgaacaagacaacaagcaagaaaagaaacctttacaagccagtgatccccgtggagaaggaaatgaacagagttttgcaatagaaataatgaaggggttatttaggaggttctgttttcaattaagtggtcagaaaactcctccctgaagatgcagaagctgaaatggggagctaagcaggcacagccttgtgacaagctgactgatgagcaaaactgaccagaccggggtgcctctgttttgtgaacagaaaaaaggccagtatgtctggaacatagcaaggcagggaggctggattctgagtaaggatttaaaagtagatgggacctaaaagatatgggatgtagattttattgtaagggcaaaatgagggcattgaatgactttgtggaaactccaaaatcaagaagaaatcatgactaggtttccatttaccaagcatgctggctgctgtgtagagaatgggctgagggggtcagagggggcagcagggaacaaccaggagccccttgcggaattcttggtgaaagatgttgggaacacttccctaggtgagtggcagtgcacataggttgtggccacacatgtaagatacattttagaggaaaactcagaagcccaaccgatgaattaaatgtgaggggttgagaaaagagaacaattcaagttgattaccatgtttctggctaaggcaactagaaagaaggaagaattgatattaacggttgatgaaactggccagggcacatgcttagaggtgtgttcaaaaattccattatgatagtcttaataggtgagatgcctataaaatatccaagtgcagatgttcaagatggaatgaaaaataatatggagatcagataagtggtctagactggaaacataaatttggggttcatcatttagatgacctcttaaggcatgggaatgaatgagataccccaaggagagaacagagataggaaagagaaagggacccaggtgctaccacgtggaatttagtttgaggaaaagtagtccgcaaaggaaactaagggaactagagaagggaaagacaggaagcatatcaggccatgttatagcaacaaacagcctaggaatgttagtgcttgacaaaatcagagcttgatttctcactcaaaccacgtgatttgctcaggttggctcagggattaccccaaaatcaaggctgagaaagccactgttttcaatattgcctattgccatggcaggaggaaagagccgggcaggctttgaatggacagttcaatgtaggtgcctggcagctataggtctgaattctactcaaatgtcatcagtcattgctagtcacttagtccccaactgcgcaagagctatttcgccatgcactgaactatttggtgaaccatattaaggtcagtaagaatctgcttttctgatggccagatatttctcactcttactaaagaagtcaaccaagccagaatcccaaccagtcatagcataaaagagcagatctgtgggtagtgtttggtaattattggactacatcacattcaggtgtgggtccttttcatacagagacctatgaaacaaaacaacctatctaccccaaaggaacctacaatgcattgatggagccgagtggataggtaatctcattcaaaactcccatttggaaagacactcataggaaattctctgcaaaatcttcctggttagggtctgattcttctccctagaagggtctctccattgcacagttctccaaggaccttggcttccccttatgtaagttggttccttctttatcatgctctttggacacatccgaatcaagcattggacaatatgttctccttggacactgagcaggtttttctgtctgcttcttacccatagaaagattttgcccaagggattgtcttaaatcttgaaaaatcaaacatgtttataatccaggcttatggtgtttcagcagcgcagttgcctcacaaacattccctgcttcttatcttttattccagtgagctccatgtgccaatttatgtaagacgtgccctcctctctcttatttattccagatattttcagtctaacagcctccacaggaagagtgaagcctttagtctctttttcttgagcaattttgctaaaaatttatttacagggaccatcttgactctctgcaccagaaaaaacagatgtcaccactgctatctggatagacattgttatgttttcaaaatcttaaaaagttattttcaaataatttacagaattaagagtaaaggaatagtgaaaaataactattaaaaaactttagtaagaatttaaacagaaaacccatgtttttttaatttcatatttacctggcggtaagggtatatgcatgtgaaataagcaaagttctttgaaagaaactcacgtgctcatcaactctcatgaaataaactgggccatatcaatctggtaaatactgattcctgtcttcaaacattcacatcaattccatcttacgattacttcacgtgcagcatgttctttctttcttcatcaaaatgcgattgattttgaaggtgtgaaacctcataattttgttgcagagaggttagccatcacttttggacctaattgtaaaatatttttcatttttacatttgtaaacaccaagtagaatggtctgctaatattgtagattatttctacataacacatggtctgccaatcaacttttcttataaagactttatttttagaatactttaaggttcaaagcgaaatatgaaggaaggtacagagaattctcatatatcccctgccccccacatgcagagcctccccaactatggacaacattcaccagagtagtacctttgttacaattgataaccacagtgatacatcatcacacaaagtccataatttacattagagtttacacccgctgttttaaattttatggatttgggcaaatgtgtaatgacatatatcatagagaatattttcactgacctaaaaatgctctgtgctctgcctattcatccctcccttcctccaacccctggaaaccactgattaattcactgtctccataaatttgcctttccagaatgtcatatagttggaatagcacatgtagccttttcagattggcttatttgacttagtaatatgcatttaagtttcacccatgctttttaaggcttgacagctcatttattttcagcataatatcccattgtataggcacacaacagtttatgtatccattcaccttctgaaagacatcttggtcaattctgagttttggcaattatgaatacagctgctataaacatttgtgtgaaggtatttgtgtgggaataaattttcagctcctttggataaataccaaagagtgtgatagcaaaatcgtatggtaagactttgtttagtttttaaacaaacaaacaaataaacaaaaaagccaaaatgttttccatagtggctgtacaattttgcattcttatcagcaataaatgagagttcctgttgctccacattctcttcaacattgggtgttgtcagtgttatggattttggccattctaataggaatgtagtggtattttattattgttttagtttgcatttttctgatgacatatggaatggaacaccttttaaatgtgcttatttgccatctgcatatcttctttggtgagatgtctattaatgtatttggccaattttttaattgtgttgttcgttttattactactgagacttaagatttctatttggataacagttctttatcagatatgtcttttgcaaatatattctcccactctgtgtcttgtctccatttacttgacagtgtcacaaagcagaaattttatattttaattacatctggcttgtcaattctttttctttcccctatggatcatgcctttgggattgtatctacagagtcgtcaccaaacccaagattacctagattttatttgtgacatgaattttcaccatcatatgttatggtgttaaaagactgtgtgataacatcctttctgttgaataactgcatggagattacgtattaatttttcattcttggaaatatattatggtttactcattgattattgaatttgagaaaattcatctagaatattctttctgatgacctatagtctgaaatttcactaacataatgagttttactgttatcactagtatcttaagtgctactatacatctctttgcattcacactttgattcacataataattaaggatatcattctttttgccattttggtagaattctttataaaaattctgatttctgatgtttgtttaacgctattttaaagaaggctacaagatcatgctattagactattttataacttcctgaaaaatgataaaattgtacaactcactaaaaaactgaacgatgatgtaatattgataatttatattaccactgcattattctagtgatttaatttcatttttattttattctctcttaggtgttgcttgaaataatttatgattaacattctaaggtgattcaaagcaaaatatgtcaagatacaggtaaaataagattcctaagctcttgtaaagtacattagattcaaaaactgtcgaatcaactcatgttaaaaatatcttttatttaaagtcaactaattttagatattaattatatcaataaaatactttcatgactttatttgaaacatgaaatattatattttatgttaaatataatgtgatgtttttccttctctatctttaaatgatcataagaaaaaaatataatgacatagcaatccttacaaagagttgaactactcaaaaatatgctcaaaatctaaacttggattcaaagcatgttatgtctgctgttacaccatggattactccattaagaaatgataataagaagcataatattcatatccttggcttgaccttgacacagagctgaggttttggttttttatttctttttagtaagacatataaacagcaaaatgcacaaatccatttctacagctagatcattccatgatgtgcccacttgtgtcccaccactcacattaagaaactgcatttttccagcttaccagtagtccccctcttgccccttcgatcactgtttcttatgaagggaactattctctcaagttctatcaccatagataagctctgcctgtgtttgaaatttatataaatgaattatgcagtaagccctcctttttgtatgtcttcttttcatcaacattatttttccaagatcattggcgtcactgtagtttgttcattctatttttctaaagttctgttctatgaatgtaatacatttatcccttcttatgctgatatgggtagttttctatttttgctgctataatagtactgttataaacagtttttgaatttctttttttttgaatgcatgcagctatttttgttggctttataattaaattatgattcaatttttattagtactgctagttttcaaaagcagttgagttgaattacatttctgtcagcaacatatgagatttcttcttcagaaaaatcctttccaaaacagtatcgacaactttttttaaatcattctggcctgtatatcatcttattctgtgtatgtgaagtaattttctaatgaatataatgaatgatgagatttaacacatttttatacgtttattgatgatatgaatatgttgtttcctttggaaggcatgttcaaatattttgcttatattttggtacagttgtctgtcatttttgttgatctgttgaagctttttaaaatatatattctggatacaattactttgtcagatgtgtgtattgaaaatatcctatcacactgaggattgctttttactttctagatgttgtcttctttttcttcaaagtttaaaacctaaagttagctctttttgtcacttattgaataaaattatccccacttctgcatcattaagtttctcttaaaagcttttaattgaactattgcttaaatgcctcctcagttttatattttattagttagaagtctaattattaacattacccattgtatgtgtgacatattattgcaagtgacagtattaccaaaagcatgactcactgtattgcagccttcaatggtgattagtttgttgtcttttacggggtctctaaaacaatgccaatgtcatgcactttgatttttttatgtttgttttttgttttgttttgttttgctttgcttttttgtttgcagcagcacctacttatgagtcagaagaggccaggttatggcatggcaacgacaacaaaataacagtctctcagtagtgatatacatacacaaagggctacttcttactctccccagatctagggaacagctcactccaaaacccatgctgcaaagacagccaagcttcaaaaagttgcttgtcattaaggtacattgacaatggtctaggaggtggcttgatctggaactgacacaggaactcctgctcatatttcattggctagaatgcattacattcctatcaagctccagtgggtaggaaacaacacatgctgtcatccttcatgaccaccacagaacgcaaatctaggatcttggatcctgagtgaatagagtatttcatgaaggaaataaatggtccctgtaaataatagaagaacacgtaaaagattccatgtcaagccaaagaccatggttacactccagaccaccacatctgagcagtgtttcctcattgataaaagggaaatcagtgagccttagatacagaagctaacaagcaatcaagcacataattagtttaagtgtagggtgcagtgcttgacagaacaagttttcaatgaatatatgaagtattaatattatccagctcagttttaaaacagaaatgaatatatccatggttttcttaatatagttgaggtaccagtgaaatggaaagaattctcagaagtaacaatgagaataatttttctagtcctttctcaagcacaagtattctgaaaatattcttgtaacagattaccaattttttttttttttttttttttgagacggagtctcgctctttcccccaggccggactgcagtggtgcgatcttggctcactgctacctccgtctccccgggttcacgtcattctcctgcctcagcctcccgagtagctgggactacaggcgcccgccaccgcgcctggctaattttttgtatttttagcagagacggggtttcaccatgttagccaggatggtctcgatctcctgacctcgtgatccgcccgcctcagcctcccaaagtgctgggattataggcgtgagccaccgtgccaggcctaccaattatttatctaaaatcttgaaaggaaaatatgcaatctcatttttttaatctgaattaggcatctcactctaaaaatttctccctttgtatttgttgggtctcagtagagaaaactagtttgatggaggaaaattattaacacttatatatagatggcaccttgaagtttacattttaaaaacacacatatacatttaaaccatataactgtaaagaagaaagttattattttacttaaataaatataataaactgtgcccaaagttacagcgagcctcagatgcagattcctcatagcctgtttgtatgataattgccaaccccagtatgacctcaacttcaacatccacaaacagacctagaagtcccccttcccttgaccttctgcactagtttgggttctcagaatcaggcaccaagacatgtttgacatgcaagagatttactgggagaaatacctgtgaaagataaaggaggaaaagaggcagtgttaggggaaacttcagattcgacacaggtctggcaactgtgaacagattcgacacaggtctgacacagggagaaaagcgggggatcaggaaggaagagtttcagactgcagtgaggttctaagaatggggagtcctggagctgaagggactgtgcgggtcccacagccctcacatgggtcagcaggagcaactctttccccaccccatgctcacagctctgccaggagcagccagggcaggataacacagcagagaattgagatgggtagctctgagctgtcattcaaatacactcctcagagcagcatatttctctggctgcaaaacccactgaaatccctttctgcattgcttaatttaagcaattatttaataaattatttatttatttattatttaagcaataatttaagcaagttgctgacttcacagttcactaagagccatgttataagctttggattttgtgcttgaatgtgcccatcctgcactattcatgtaggaccttgaattcatccctccattaacactgtacccagtgctcgaggttcaagtgattccattggttgcttgcactattgcaacagcctgctcattaattctatagcatttattatctccaaacatctttggtgatagccctcatcaaacaagtcagaaaaattctaaagcatttcctgaagttttcattattttcttccactataccttacctagtcttgctaattcttctcctatacctatttcatcttttacagagttttgatttctggtttacacataatctcttctaaaatatagcactggcagtttagttaccctcaatgcttgcaggttcatccagctaacccatccctaacactgacgccagagtcacttaactgaaatacagatcatactctttcctcactcattcccgttgcttccacagggcgcataagacaaaagtcactccttagtctatcattcaatttccttcacatttttatttggccaactgttttcagtctcatctctcaccatttattacatctccactatgttctagcccaagatcagatgcccatcctaggcagatgggcactgtagatgagggagcacacagtatgagtggtagtgtgaaaaatgtctctccaccaagagaaaccaagctcaagttttaaaaacctattgcttgtgagccaaatgcagcacggaactctggtgcccacaaagatggcaagctggctgttgctgtggtgccagaatccattgaagaaaccagagattctggtggagacaatgaattccgtgaaccaatgaacattcttgagagatgaggaattaaaggtgtccttgatctcagggatgaagatggtgaagtaaaaggcaacctggagcagcactgtgagattcaacacaaggaaagtcgaataacattcactcttgtccttccgcaatgtcacaaggagaaaatcattgtctgatctttccttgtggaaatctgtagagtggctgaacactggggtgttcctgtcccaagagaaccatcaggccttctgagaaacgtgaggatggatgaagtgttgataaagatgggcctgacctgactttctgccttataccgttcctctactcatgttccctacaccaataaacagttggttcacaacagatagagatcgactttagctcctgctgttttaccttaaaaacaacttaaagcggacagtttcacaaaaggatggcatgccacattgatagcaaggacagcaattaacacatcctttccttaaattgaagaatttttaaatggctaggtactggtcattggcccttgctgcttacatattgtaagactgtgtggtgataaaaagggaagtatgaacataccaaaatagctagatgattaagagataggactgctttaaaagattaataagtaggccggatgtggtggctcatgcctgcaatcccagcactttgggaggccagggcgggtggattgcttgaggtcaggagttcaagaccagcctgaccaacatgatgaaaccgtatctctaatgaaaaaactagttgggcgtggtggtgcaggcctgtaatcccagctacttgggagaccgaagcaggaaaattgcttgaacccgggaggcagaggttgcagtgagctgaggtggtgccactgcactccagcctgggtgagagagcaagactccatcacacacacacaaaaaaaatactaataagtaagtgcagaatataaaaaatttaaatgaaaatatattgaaaggaaaaggaatttttaatataataacaatacataagaagatggatgatttaggtgatatatataaaaccgagatcatcaaaatagctgtctatttcagacacgaaaagtaaaatatttgtacaaaacgttataagtgctataaatagatggatataactgataaaattaggaattagggatagtagtttatgaatctataacagaagacaacataaaattataaaaacaataaaaaatagaaaactggtatttttaaatataaaggtatggattaatatttataatatctaaacattttaaaagtgttaatatctatgtaataaaatcctggagggaggaaaataataaaattgaaaggagaaaatgtttgaacaatcttatggcatgtgattttttttagattggctttatgcaataaatgtaatgcatgtgaaacccatttaagttgctatgtatatcaatagtttgctctttttaacaactgagtagtattccattgtatgaaatgtattatagttaatctttttacctctgaaggacactttggctatatctagtttttggcaattacaaatgtaatgcctataaacatgtgtgtgtacatttttttatgtgaacgtatgttttcaaatagcagccatagaagatcaataatgacattttaaataacattacaaatcaacatctttaggaatctaagaaattttgtatgtataaccaacaaaattaacataaggaataaaatgttttcataattattttatgaagcctacttttgcacagagattgaagagttatttgtgagaattttagaaaatttatgttctcattactatctctttgaattttactgtaactattctctttgtaaatgagtttgaaacttcgtactttaaaactctaaagaaaaaacacataaagtggttttgttgggtataggtatatttttaaatatcctttagtttctggatggtttctttatgagaaataaaaggaatcgaatcagaattattttcatatttgggttttgttttcttgttctcctaagtaagaaccttttcattacgtctgttggtttcctcaaattattcttaatagttgtgtcattatctggatgttttattttacagctattttcctgacagaaagaattggaacatttccaggtttttaatactgtgagttctctgtggtttgagttggataggagaagttaccttgtgttagttataattactataataaactgaagccacacatatctgcccacacgtgacccagctgtcttcataaagtactggcagcaatgagatgcttttgatagtactgaacatgtgggctcatcagaagaaccagctaggagaaattgagcctggaatcccacaggaacaatcttatgggaaggtgaaagtggttccacagacatcaaaattagtccaaaggaattttattatatacatgagctgaagacagagaaatttttaagtgtaaaaaccctcagaaaaaggctttggtgaaaaagatcctcaacaaataaaataatttttcaaaatacaacactttgacttgctatatctctttacgcattatttttaaaaactgagtgatgatgataactgtggctatcaattatttcatacagatgtagaatcggttctttgctgttctaggttttttttttctcttttcttctctcttcttttttcctttcctcttctcttcttttttcttgcccttttatttaacaaaactgaaacatattttggagtcacattgaagcatttgaatgacatgtacgtaatccagtacctgtgcctaaggattgaggacttgcagtgtctaagttcaaatatgagtcctgcaacagtgaagatcacatcttgaaaaagtgaattcaaagccatatgtaaacaggcttgagatatgttgtataaaaccaaaatttacagccatatttgattcattattatattcttctaatttatatgactgtttcaaaatccttcctataaacatcaaaacacgtataatttgcatggcaattattaaatagtttatacaaaaggaagcaggttttcaaggccaagcaaagttttgtttgcagccataacagattttgtacacgtgtgaatatttattatagtatctcagcatgataattgtgtttgacagtcactggcttttggattgcacaatagcatggaaatcagttcagactgtaaaatttgtgctgaagtcctacttactacatatgttaaggtcaaagtagctgctaatgttatacttctccaagcaattcttgggaacaaacatttcaccagttaacctagcacatcatttttgacatattctttgcaaaactgattcaatgaacagaaagtgtcgacacttgaaagcctttcctctaagatcaggaacaaaacaagggtgcccactcttactaattatattctacataatactgggaatcctagccagagtaattagacacagaaaagaaataaaaggcatccatatatagaagcaagaagttaaattatctctgctttcagatgacaagatcttatacacagaaaacactaaagactccaccaaaatctgttagaataaataaatgaattcagtaaagttaaagaatacaaaatcaatgtacaaaaatcatcagtgtttctgtacaataacaatgaactgacagaaaaagaaatcaagaaaacaattccatttatagtaattaccaaaataaataaataagaatatatttataaccaagaggttgaaatatctgcatattgaaaactataaaaaatgttgaaataaatggaagaagatacaaattaatggaaaaatatccagtgttcatggatcagaagaataatattgttaaaatgtcaatactacctaaagcagtctaccgagtcaaggcaatcctaccataattccatgacatttttcacaaaaatattaaaaacaatcctaaaattcatatgaaaccacaaaagacccaaatagccaaagcaatcttgagcaaaaagaacaaagctggaagcattacagtatctgttcccaaaatacacaatgaagctacaataattaaaacaccaccgtcctggcataaaaacagatacatagaaaaatggaaaagagtggaaaacctggtactaaatgtatacatctttttggcaattgatttttgacaaacatgccaagcacacactatggaaaaagggcagtcttttctgtagaaggttgggtaaacttgatatccacatgcaaaaaaaatgaaattagacccttatctcacaccatacataaaaatcaactaaaaacgaattaaagacttaaacaagagatcagaaattgtaaaactattaggaaaatacaggagataatctccagggcaaaggtctgtgcaataatttattggatatgactcaaaaagcacaggcaacaaaagcaaaattagacaaatgggatcacatcaaactaaaaagcttctgaacagcaaagaaaatcaacagaataaagagaaagcctatggaattgaaggaaatattcacaaaacacacatctgaaaagggtataatatccaaaatatgatacatatgtatatgtgtatatatatacacatatatatacatatacatatatacatatacatatatatgtgtgtatatatatacacacttttatatatgtgtgtgtatatataaatatatatatatatattttttgagacagaattttgctttcgttgcccaggctgcagggcaatggcacgatctcggctcaccacaacctccgcctcccaagttcaagcaattctcctgcctcagcctcctgagtagctgggattacaggcatgccatcacacctggctaattttgtattttaagtagagatggggtttctccatgttggtcaagctggtcttgaactcctgacctcaggtgatccaccctcctcaaagtgttgggattacaggcattagccactgcgccctgccagtgtctacatatttttaaacatcatactctacaccattaatatatccaatttttatttgtcaagtaaaaagggaataataataataagtaaatatcaacactaatattgtagacatacaccacttttagatcacaggtatcaaccagttgtgtagtttgaatatctctccatccacatcacacgccactggagggcgtctgtctgttccggggtcatgaaagcctctggttctagcctaattaagccttggtaacacttgccagcaccatttggccagagattcctgatttcactctgttctactttactacttaatcttcatttccctggctctgtgtttttctttttatccactgaagtagtagtagtatatccttagctagtgctttatttcacaactccatgacttatgttgaccattatgacagggaacggtgtagtataaaattatcaaaattaccactactaataataaaattggaactcataagaaattttaaaattattccatgaaagacactgagaagaatattaaaggacattttatagactaaagagacaaatcaaatcctttttctccagaggcacagccaattataagttgtgcttgttcccaaggccagtttcccttaccctctgaagcatgctcaccctgccaggagtcaagtattttgaaccatatgtcttgtccttctactctccgtggatcctccacatctcatcatacaaaccacccacattagatgacttaaaagaaggcccctgattgaaaatagctctaaaccttgtgagggaggaaaaggtgaaagaactgcagggaaaaaatccttctcccatttatcagtaatagagagaacaaggggcagtgatatcagaaaaacaaatcttaggaagtatttctaggaatatgatagaatgaggaagaatcactaacatactattcttcctatcctcaccaagagttgttataggctgtctttattattatgcccattccagtgtgtgaagtgttatgtgattgtggttttaatttcatatctctaatgactaacgatgttgaccgtctttttatctctttatcagttatttctatgttatatctggtgcaatgtgtattcagaaatttatgtcctttttaaaattgggtcttttttttcttcttactgatttgcaatggcttttttatatattccagatggaaatctttatcagatatttgattttctgtctgtaggttatcttttttttagttatatttttgatatataaataattttaattttgacaatgtctaatttatcattgcttcttttatagattgtgttttgtgttttgtatcttaaaactcctctcttaggatctcaaagatgttcttcagtgttgttgttgttttttttttttttttctaaaggttttgtagttttagttctaggctttaggttctatgattcatgataagttcattttcctgcatagtgttatgaacagatctaattaatgtttttctaatttcctttgggatgtcttctttgacccatgagctatcaaaaaatgacttgctccatatttaaatatttgggagattctgtatgtttctttttgttgtttgttcctaaattaattctattgtgattagatatcatatttttatgatttcaatcttaaaatgacttgcttcatattcaaatatttgggagattctgtatgtttctttttgttgtttgttcctaaattaattctattgtgattagatatcatatttttatgatttcaatcttaaaatttattgaaatttatgcaagatctctgtgtgagaactgcaaatcactaatgaaaaaatcaaaaagatctaaatgaatggagagatataccatggccacagattgggagactcagcatataatatgttatttttctcctaagtgatctatagattttcataataaaatcaaacttccagcaggattctttgtagatatagataagcacatttaaaaatttatattgaaaaacaaattacctagaacagctgaaattattttggaaaagggaaatagaagaattatactactttattttgagacacattaatttgatagtaattaaaacaatatggcattggcaaaagcatagacacaaagaccaacaaaatagaacagtgaatccagaaacagacccatacgaatatggccaagtgatttttttaacaaaaatgcagagacaattaaatagtgaaaaaagtttcttcaataaatggtattggaactattgggcatccagaagcagaaaaacatacctcaaataaatcttccattttcaacaaaaattaaatcagaatgaatcataagtctgaatataaaacaaaactataaaacattcagaagaaaattttgtaaacatttttatgacttcaagttagaaaaatattccctacacatgaatcaaaagttctattataaaattatcaaaattaataataataaaattgtaactcataagaaattttaaaattgttccatgaaagacactgagtaaaacattaaaggacaatttatagactaaagagacaattttcaaccacatatctgacaaaggacttatatacaatatattatatatatacatactatatattatagtatattatatatacataaaatatatactacatgtatactatatacataaaaatatattgtatatactatatatacacaaatatatatactatatgtatactattttattggtcttatatatatagtttcttatatatgtatataaaatctcagtagtaagaaaaatatcaaattaattattggactaaaggattggaatagactttttatcaaagaggatatatgggagctaaagcagatgaaaaggtgttaattgcattactcattggggaacacaaatttaaatggccaaacacctctgcacacctattagaatggtcacaataaaacataagtcttggaaaggatgataacaccagtgttgataaacaattggtactcttacacattattggtgaatttgcaaatgccacagttaacatataaaacagttggcagttataaatttaaataaacatcaatatgaaactcaatctcatgcatagttatttacactggaataataaaaacatatgttcatctaaaacccacacatgaatgtttatatcatctcttttcttaacttcacacacatggaaactacccaaatatgcgtcaaagggtgaatagctaaacaagaggtgatatacatattcaatagtgtactacacagcagtaaaatggaatgaaccattgatatacacagcaacttggatcaatctggaagtcattatgcggcgtgaaagaagcctgtctcaaaagtttacatactataagattttattctataacattcttgaaaagacaacgctataccaatgtagaacagataagtagctcctaaagctttggaggagggagagttgtgactatgaaggaataacacaagtgagatttttatggtgaaggaaatgtcatgagtcctgtttggagaagtggttacagaatcatacacatgataaaattcactgaaccatacacacaaaaatctatttttctttaggtaaataaaaaaaagtttaaaaatgtccgttgtgaagttagagaagaaaaattattctgcttgggattgttcaggtttcctaaatccataagttgattctagataattctcagccaaaaccttttgaatattgttctttgacatttttctcttctgtatctagaatttcaattatacacacacatacatatacatatatacatatatatatatatatatatactcacacatagcacatcatattctatctctttaccaatgctaaggtttgagagagatgttaacctttcagttccttttgtcattttcatctagatcatattcacaccaagaaagtatatatttttgagagatttcaagtaaactcctgttttgggagaccctaaagaccaccctaagtccaaaacaatggactctgcctgtcgttatgctcagagctatgttttattataatgaaaaggtattgagaaaaatcatcaaagggacaaatatcaggggaacccgcccccaatatttcaacgtagcttctttctatttttcctaagtatctgagaaataaagagaaagagtacaaagagcggaattttacagctcggccgccggggtgacgtcacgtatcggtaggtccatgatgcccacctgagccacaaaaccagcaggtttttattaagcgcttcaaaaggagagggggtgtacgaacagggagtaggtcacaaagatcacatgcttcatagggcaaaaaggagaacaaagatcacatgcttctgaggccaataaagatcacaaggtaaagggcagggcaaggacctcccccaggaatgcattccttccccagggtattaattattaatattccttgctgggaaaagaattcaaagatatctttcctacttgcacgtccatttataggctctctgcaagaagaaaaaatatggctctactctgccagaccccacaggcagtcagaccttatggttgtcttcccttgttccctgcaatcgctgttactctgttttcaaggtgcactgatttcatattgttcaaacacacatgttctacagtcaatttgtacagttaatgcaatagtggtcctgaggtgatgtacatcctcagcttacgaagagaagagaattaagagattaaagacaggcataataaattataaaagttttaattttgggaactgataaatgtccatatgaaaatgaaatcttcataatttaggttcagagattgcagtaaagacaggcgtaagaaattacaaaagtattaattttgggagctgatatatgtccatattaaaatgaaatcttcacaatttatgttcctctgccgcggctccagccagtccctccgttcggagtccctgacttcccgcaacagacaaatacatgtagcaaagtccagagcaaatcagcataagcttccaagagtcctcatccagcacaaccacgaaggatgtactgaactctttcagtaaagaattatggcaacccctatgaaatattgcccagggaagatcattagaggttcagtccctaagaattttattggggactagtcactttggtaatctctgtttaacatataccaaaatttcagactctcaaaagcataaacaacattgctgtgcagtttaggcacaatgaactactcttattagttctggaaatggcatgaggcattctaaaacccaagctcccaaatgtcagtcatagaccaagctttcacgatagcagctttgggtctgctgtgttaactttctctgcagaactccccaccttctgcagtgcttacactcttttatttcatgcattctgcaacaccataaaaaacaagcctcagcatcctctaggtttctgcttcataactctatttatttttctcttaattcttactttgacttaacatttggtttgagagaattgtatattttattgctagatgaacattttaaagtatttcatatataattgaacactttcagttgttttcttttaattcaaagggtcattcagcatgacctatctactgcgttgaagaacacaaacagtgatgttatttttcattaaaaacaaatatgatttgcttcattgcataggcttgttatttatagtgttaattgcatattggatatgtattaggcaatgtcttcagcatcaacattagacaaaacaagaagttgagctgaaataaaatcaccacagatatcttagaagatcttacatttgctctggatccagatggtccttcagagttgttgcaattatggaaaggggcctgtccttgatataccctcataatccagcactgaatgaggctgctccaagaaggaaacatgaacttgctcaaggtcaagattttgagctgaagacaagtccaagagagggaccaagctcagagctgtgagctgcttctaactccattagctggaggagtgaattccatagtcctggggtccaggggagagattgtgcacatcactcacatatatccattgtagtctgatgagaaaccaacaaactgacattaggaagcttattttgaagttattcaaatatttcctatttcctcatatatttcttgcagatatcaatatacttaagtcattaaacagaaaaaaaggtgcctttgttttatattttgctttcaaaccttaaaaaatttttattataattagttacggactgagtcattgctttagtccatttgtgctgcaataaaatactacaggttgtctattttatgtaaaaaatcagaaatgtatttctcacagttctgggggctggtacattcgagatccaggcactggcatctggtgagagccttcttgctgcacaatctcatgacagaagacagaaaggcaaggaggcaagaggaggctgaacttgtttctttaagaaggcatttatcctctgcctgttaaggcagagttctcatagcctaatcatctctcaaaagctcctcttctcaagactgttacaatggtaactaaatttcagtatgacttttggagggaataagcataaaagcatagcagtcatcatcattatcaatattattttttcctattttgcaactaagtcttttaactgggattatcgctttcctatgggttgatttatttaactgtttacttcaaaaatttgaagccaaaaaatcatttattattttattaaaaatttccctgcgtttttggtactctattttggctaattgaaaactggttgcattttggaaataaatagaatgtgaatgaagatagaaatgaatgctttaaattgtttatcacatggtgactcaattcttttgcctcatcctctattcagattgctggtaggtcctcccctttttggtatgttgcaacatcaatgtcacgtagactgcttggtgcagacacaatcacaaacttaaaagaaaatgagcacatcgaaattacatgaaacaactggctttatgatgctcatcagataatctacaatttgaggatgtgtatgtttatcgccccgtttaaaacacatgtaaacacaaatcattcaaattctggttcactggctaaaacaactaatatgccttgagaaagaaaactgtagtctctgttccctgacttgcgtataagtacactggacctacagaacacctggggattttgaattttatgaactacctttcagctaattttgtacttggtcattttgctctcgcgacacaggagtggaggaaaatgtccccagggaaaccacctgagttggctttcctgtgattgtctaaaagttcactaacatttctataccgtctcaggcactttagagacctccatagaaaagcactagtagttacattttaaggatcaggaggtaaaagaaagttctgatcatgaaatgctgctgattcatgtgtcctgattccaggaaatttatggctctaggagacaggagtcgaggccttgtaggttggagatgatgacagaggacaaaaggtgacaggaggcaccaaggacaaatttcacctactttattattttagaggaatagtcctgcggatggcagttttcaacaggagagccgagggataaaaataagaaagggactcccctttaagtttgttgagagagaaaatatttaaatagcagaaattctcctagaagggctttatttctcttcttgctcacctttacttatatttcctcaaaatgtagttggttgcaactgctgagattatgcagtgcatagacaagtatctgataattatgtaacaaagatgcctgttaaacaacacgacaacagcaagaaccacaaaacacaccactacatggcaaatacatagaaattgttaaaaataactgtacctgttcctaaggatttatttacatccttttaaaaaaataaatcttcagatttctttgtggaaggataaacacctgctgcctaatttgaacttaatgtgttgcatgaaagtgtttacaagagtgtgtatttctaagttattacagttaatcacaattttaaagatttttgagtgtttaattgaagtttaaagttttaagaagtgtaaaaataactgaactatgtttaagaaccctgagaattgcagatgaaatgttaataaaacatcagagaacagattgaataaattaatagatacaaatgaggctcagatgacaaacaagaaaaagaacattgaagattgaaaaggctggaaataagaacagcaacaattcaaatgctcattgcaggacagctctttggacggtcttgggccaacccagttctttcccccatttttcttgtaattctcaagggtaactgcagaagatgctgggaatgcaacatcccaagacgaggaggaactggctggagtagcctatcctatccctttgagaacaggatattgtagaacactttagtccagcatgtcatgtagcccctggttataaaacccagggtggactgctttctgaggcctctcaaccacagagcaagttgagaatgctggactccattctccctgggcggctttcctaagccagtgttccagcttgccataaatcctgggcttctcacatcccttgctgcctgtctgggagtaacacatctgcttcatgtaacttgctatgtgctagtgctctgtctcactggacttaggcaagtgatagaaattggcagagtccaagtgcagtgtgggaggtgtttggcctcctttcctgggactgatactaatgctcagtaatcctgcttcaccctaaataaatagaggtacccagataatcagcatgaactcctggggcttaggggctcttcctctggagcactgtgctgtgctgtatgttgtcctcctgcatcgcttcctgtttcatttccatatggtttccaaagacaatttccattagtgttactattttcaaataccattaggttgccaaaaatattataccatcaaaaactggtgtgttgatgttttgacagtcaggcctattactaatttagcaaaatgtgctaccatcctctaaattagcaaccattagcattttctagagaaactagatgcactagctagggagagggaaaaagcttgagataattcctgaggtaaaatgaggtaaaacagtaatagtaattaataattgaacactgaccttactaaatactcacttttattgttgttgttgttgttattaaattgtcactataatcttgtgatctaggtaaatatttcaactttatagataaaagttattaagattgaaaagttaaatagttttgcataattttaatactaataaagaaaaggacaaaaattctagcccagctctgcttaaattccaactgagttttaagagggaatcagattgtcccacataattccgagatgctaaagaatatagaaaaagaagagtatgtggatttcattaggcaacaattagaaactggttaacttcttcctgtttttaccatttccacacttgttggtgaagcctctttggacaatcaggaaggcatttgcatgcccagacttcatttaccaccagcattcatgttgatctgaacagcacctggcgtatgtaagagaagtgagaaacagaggaaaaggaatgacccctagactgtgtttttatattctcttgcatagtaattatgatgaataataattaatacttagtctttctatataggatgtctgtgtgtgtgtttatttttcccatggggcttttacaggtcaaaattatgtacacgccattttctcaatgtgatttggtgatcccacagggatatgatttcactgtatattacattgtttcactattaagtcttaaagaaaatggacaaccaaatgtgaataaatgaatgagagagagttgatcaatttataaacatgaaattataagaatgagtgggaacacatcagtattaagtatgtcaaccaacccaagaagagagaaagaaaggaaagaacaaaggaaggaagaagaaatggaaggaggagggagagaaggaaagaaggaggtagggagggaggaaaaagggagaaaaggaagggaagagagagagaaaaaactaaaatgagcctaccccgtgcagtcagcattgctgtgaagatctgagatggagaaatttagaagagcatgttgggaggtatactgaggttgaaatgtcactctgaaaatgtactaatcccagttgttgtggaatggaagcaaaattgtaaatttggttcagcaaaagattccttttagcccaaaaatatatataaaaggaaaaaatggacattgtaattcaaaatcagcaaaacagcatttgactttacaggcttctgtttcatttctaatgaaattattcttccagactgagactctattgcaagcatcattaataacatcctttcccagaataactgtagttgtatatagttttcttcaaaatgaaattatgtggggaaaaaagaagctactaagcaattcttaaaggagtcactagttgtgggtttcattttttcatatccatctaagatgagcatactgttgtgtgtagattttcttcaatcaatcacacacgtgtgcgcgtgcacacacacacacacacacacacacacacttactacagatcccagaagcattttggtttcgactggaaacttaaaaagcaagggtacatttttttcctgactccttccctttttctcgtgagttcagctgtttgagtcactggttcaagaagtagcagagttctttgtgaaaattttaatttgagagaagaagaaaacaaaccagggtcaagtaacatattagctatgtacaaatatttataagttttcattgtaacccaacagactagcagcaattccattttaattacaatttctatatactgtaatttgattggacaaagtcttaaattaaattcaggcttcaagttgactcaaaatctacatttcaatactgtagaacacagttataaatgaaaaaaaaaaacttgcatagcaaaatgcctaaaatgttttagtaatacatttgactttaaaaaacactatccatattttttagagaagcagaatttgaaaggtttgtttttcagtcatagagaaaatattatttttaaaatgttagtgacatatagagaaattttggtaatcccctatttattcatatgagatgatgccaaattttacattataggagttcatataatcatattgacccttgcaatagttaatagagtcaaaatgtattgtttctgatgtcccaagctctgtacattcacgcacatcttatggattttctaagctatacatgagataagctcttttttctttctttataaaaatgagacagctgagactcatcctagagcaccagtgggaaggaaaaccaggctttgaactcaggcagtctggttccagagcctctgaaccactgtgtctgggggactcccattgctacaaaatgaaactacacccatatagtaggacggtgtgtttgtaaagaaatcaaaatattaaattcttcagcattttgactagaatttagaacaatagttgaacatttcatatggcgagtatcattcgcgtgtgcaccagttattttgtgaagttgttttcctcctgttcaacactatagaaaataattataaatcttagctttctcatgggatttataatccccatcatgcagcctgagtaattttgctatcccatgccagttttattgtcaataacagcctggagaaaaaatttgctttggcttagttttaatttgtaagtgtcctaatctcaactgcacataccaattatatatcaagcattctttgctcaccagggagatattgtttagatgcttttaaactcatatgaaacagaaataaggaggactgaaattgttccatttgggcttgagggtgattggctgtcttgctaaaagatatagataggccattaaatgtatgtgacggttgggggatgcgtatgtgcttatgtgtgctaaatgcctatgctacagcctgggaaggaaattataatttatatatttgagttctcagaaataaaggtttctgagacttagcatcaataaaatatttgttctgtattttggggtcctaattcctggatgttgaacttgttgagcaatcttgagagttacatgggtggtaatagtagttttagcctttctacattttgagcagttttaatttagtatcatgctcaattgccataccataagctaaaatttaatgttcatggattgcattcccagccctatcatgagattatttcttacatgtgtactagatatcatataggtctctagaatgtgtgagacttcctttcttccttctttccttttttattctttcctttccttttccttccttctttccttccttccttcctgcctgcctgccttccggccttcctgccttcctgcctgccttcctgccttttccctttattctattgtatttcttttcttttttcttcaagggataaatttttagggtacaatgtaatgtgtgctaattgtgttggtttgaatgctggctccacatgcattagttgcatgaatgttgtcataccatttactctctgcatgcccatgattatccatgatgatcataaaggatgtcaccaagatgagctgttgtgagaattaatgggaaaaatacatagtaagcaactagaaaagtgcccagctctgttgttattataaatttgttagtaatttattgttactctattatcaatttaacatgtatgcactgagtggcgaatatattctagccactctattctaatggtgaaaattgccaaggtgggtacgtgtaagtcacaatcagtacatagtttggtggacttttatattattttttttgagactgagtctcactctgtcacccagaatgcagtggtgtgatctcagctcactgtaacctctacctcctgggttcaagcgattctcctgcctcagcctcctgagtagctgggattacaggcatgtgccaccactcccggctaatttttctatttttagtagagatgggattttgccatgttggccaggctgatcttgaacccctgacctcagttcatccacccacctcagcctgccaaagtgctaagattacaggcatgagccaccgtgctcggccagtttggtggacttttttatagaaatggtcacaatcgccacacactttcgtgtccccctcagaatcccagtccttggatacttgaacagtctcctcccacattgactctgggcttcacatatgaccagttttggccaacagaacaaaagccaaggtgattcaagtagggactatgaaagtccttgcacataggagtttggattttctcttgctgcagtcaataactctgccaccaccatgctggtaacaagttagattaacctgctaagcacttggcctcacctagcccaatttcttccgtttcccctgccaaccatgcatcagccacccaacatgtgagaccatggacaccagctgactgcagacctatgaatgtgcccagtgtgcaccatggggagcatcgatgagccttatcagctaaacagagcccacattactacccacaaggactgtgagcaccaggcttctatgtggcttgttatacagcagacaataactgatatatgtaagttatttatctagatttatgtttttgtgaattcatactggaatgagagaggcctatccaggccaagaactccttagcatactgctcatagcatcatgatgctttctcagtaggtgaaattctcatctaactcagaatgtcttaccatctttaatctctccaggaaacattccttaaaatgatggcaggatgatttcattcaccctactctaggttccacaatttcctttatctcatcaaggatactaggatgttctttgatggtaactatagcataaaagcatcttaattgcttttttttaacatgtaaatgagagtccatggggtaggagattgcagcatatatggtaacattactgctgaacttggaattttttccatcttattacaaaaatataatattgatttgaatatacaattcaaatttattttaaatgatactttttataacttattatgtttaagtttcaaaagtagtattaaaaatcattagatacattccttaccttctctgtattcttctcttaatttgtgtcttattttagaaagaagtatgattttaaaaaagacagagaacaaatcctaaacatctctctggatatgtattatttaatttagtatatctctcatatactataaggcagatcttgtaaagaaagaagacacaaaaggaggagatatggaatgataggcagtatttttaaaaagatattaagtaatgtatttaaatgttcttatatatatttcatttgtttctcacaatatccctatgatgtagccattttaatatgacttttgagaaatgcaataattaggttgtatagagattatgtgattgctcatgattctattgacagaaagtaatgggaacaaggtttcaatgtccttgacttctgccttctgtcatagaggacccattaagaagattgcagaggaccacaatttaaagaaaagataaacatcatatgctatggattgtattgtgccagctccacccaaaatttatgtgttaatgccctaaccctcaatatgactgtatgtagatagggagatttcaaagtaaataaggttaaatgaaatcatcactgtgactcataagcttaatcagacatgtcaccagaagcctagaataaagatgggattacaccagcagaaaacacaggcagtttgatctgaaaagtgtggagaaagcaggatggactgaaggaaggctgttggacttagatacaaaaggaccaggccatagaatatttatttggctgtgaacatgttattttttaagaaaagttaagaatgatcacaactgtgattcagtgattgtcaggactgcctccttcatttcaaaaagtgaggtcattgtctcaattgctcaagccagacagcctctgaccaaagcttcagggccaggaccattgcccaagaggatctgaaaatgggattgctaccctagtggatttggaaggtaaaacatggaaccaaagaggattattcttgagcattaagatctaatggaatttatcttgctggcttctggattagcttgacatctgtcactcttttctttcttctgacttttttgttttggaatgagattgtcttaagcatgtgccactgttgtattttggaaggatgtaacttgtctgattgcataggctcacagatggagagacatttttcctcagaattaaccataccttgagtcccattcatatctgatttagacaatatttaggtgagatttcgacttagatttccgaattgagctggaatcaatgtagtttgcatgtgataacagcacaaattttggttggccagggttagaatgttgtggactgaattgcgaccccctcaaaattcttatgttgtagccctaactcccagtgtgattgtatctagagatggggtctttaagagataattaaagttaaatgaggtaatatgaatgaaaccttaatcctttagaactttgaccttataaaaaagagaaagaggcagctttccctcattctttctaccatgtgagggcacaggagaaaggagactgtctgcaagccagaaaggcagccctgatcagaaactgaacctttctggaccttgatcttggactttccacccgccagaactgggagaaaatgaatttctcatgtttaagcacacggtatatggtattttgttatgattgcccatgtttaccaataaacatcatgttacacatagagatctgcttccacttcagacaaatctaataagcaatgggcaagcagtacttttccattaatccttctgccttctgtgtttcagaaaacagagtgtgccaatataaggctttctcagggcacatattggagatattgtggtgctattttaattgctaagaaaaacactactacaacaaagtttagccattttacacaaccatttaccctaaggaattaatcaaggatatatgcaaatatccataggtattaatttagatattaattttcactgaatcacaatttatactacctcaaatttgtgtaatttaataatgtcatatataaatagctaacaaacgaagacactacataaaatgaaataccatacatctatgaaaatagtgttcagtaagagtatctattgacaagactccataactataacatgttgtcacattataaatagtacatacgatatcatgcattaacaaacatgtgttggctgggcatgttcgctcatgcctgtaatcccagcacttggggaggccgaggtgggtggatcatgaggtcaggagatcgagacaatcctggttaacacagtgaaaccccatttctactaaaaatacaaacaatgagccgggcgtggtggcacatgcctgtagtcccagctgctggggcggctgaggcagcagaatcacttgtacccaggaggcggaggttgcagtgagccgagatcgtgccactgcactccatcctgggcaacagagtaagacaacatctcaaaaaaaaaaaaaaaaaagctcaaattcctccacattggagcaagataaaaataaaaaaaatactgtacataaaaattccatgtaggtagacagtgttaaccttaagtgtgctaagtaaagcactaaatattagtgctgctttaaatgtttatgtgtatacaaaagaacctaaaaaagggtggaaaatataaataattggagctttgggttcaattttaattaatttaataattaattttaaataatttaattttttatacgtttgttaaatgtacaaaatgtacatacaataactataagaatactagtaggagtataatatatgatgaaatgataaataactttaaaaatttagcattaaagaataagaacattatgatcagcagtatacattgataaaatgaattttcttctaatttatcatcttgaaataaaaatattaatcaatcttcccacagcttctctttgtttctttgcttgtatttataaaataagaggcagtaaactagaagatgaagcaaacaataatgaaaacaggagttgagggtggctgtacacttctgaattgtggcaacaagtacacacaaataacagcctgaaatgctcacaaccttggatgtttgcttttgtttatgaactatatagggtgcttattttctgcttttcatgatggcaataaccaatcttttcccaccatatttatggtgcttttccttcctttttttttaaagaatattttatgcttggcagtatctaaatgttgtgtctggaatttaaataggagaaactgtaatttagccttagctaactgaaggaggccaagcccactgctgaattgatggtgattatctttagcagagtgaaatggaagggttcattgattgaatactattatgacttaggttcttttcatatatcatcttgtgacattctccaaacaaccctgtggggtaggagatatatttctcagtttccaggaaaagaaaaatagcatggagcagttttcagctttggcttttctgagctcatatcccatggtaagtggactggccacactaaataacacgtatgtaagatgatattatggacacattaattgttgaagtagacctagtcagtgttgcacaaagatctcaagtcaagagcgctaaacacattggctaacaatgtagtatatatgtcaatactcttgtctaggtgttgcctaaggggcttatatcatacctgcattagttaaacacaattttaggtaatgaacagatactttaactataatctaaaatagtggtagatctgaaattgtgcatcatatgataataaaaacagtagctaataaaccagcatttatctgggtttaataaaaacattggcaatgaaacgcagtatattcatatttctctttgtttccttgtaacattgttgcaaaaagaaaggctgactttattcagagaaacattcctctcagtgcagggaaacatatgtaatccacaaaaagatgtataaatgataaaaaatttagcaagtttatatcattaaagataagtatattaaagccaatagtatttctatatgttaacaccaaaataattggctactaaatattttaggccatttacaatactatcaaaatataaaactcttagggatattagttttatttggcaaaaagatgtacaagaagtctgagataatttaaagaaggcttaaataaatggaggagcacattggcacatgagtcgtagaatcaaagcagttaagataccatttctcaccaaattgatctatagcttcaacaaaatagcaattaaattatcagcagaatttatctcatagaaattggtaaactgattataaatatcagatggaaatgcaaaatactttaaataaccaaaacaaattttagaaagaaacaaaattggaagaataacattacagtacttcacaatttaatataatcttacagttatcaataacgtgatattaacataaaattactgaaatgaatcaatggaaaaaaattaagtccaaatgtagacgcacacatgtatgtaaaactgatttttaataaaggtacaaaaataattgggtggagaaagaatatgcttttcaacaaatgttactggaaaattttcacacacatttgcaaaaaaaaaaaaaaatcatgaccacatacttagtgcaatacgaaaacaaacaaacaaacaaacaaaaaaatatgcaccatagacctaaatatagagcctgaaactatgaaatgtttagaataaaatctttgtgatctaggattagacatagaacacatagaatatgatgtgttttaaaacatgattcaagatataacaaatttatagtttggactacatcaaaattaaaacctttggttctttggaagcaccgttaagaaaacaaaaacacaaacctcagcataggagaaaatatttgcgaatcatacatgtgattaaatatctgtatctaaaatatataaaacctctaaaaatcaataagaaataaacccaataaaagtcatcaaaaggtttgaacagacttcaccaaagaaacatacagatggcatacgagcatgtgaaaaaatcattagttattggggaaatgcaaattaaaactgcaattagatgacactacgcagatactataatggctaaaattaaaaacacatggatttaaaagtgtggagataaattttagcacccatgcacaggagatagcaatatcaaatgttaaaatcactttggaaaatagtttgtcagtttcttttttcatttcttttgtttgtttgtttgttttttaagatggagtctcactctgtctctcaggttggagtgcagtggcacaatcttgacccactgcaacctctgcctcctgggttcaagcaattctgcctctgcctcctgagtagctgggatgacaggcgcctgccaccatgcccagctaatttttgtatttttagtagagacggggttttactatgatggccaggctggtctcaaactcctgaccttgtgatgcacctgccttggcctcctaagtgctgggattacaggtgtgagccactgcacccggtcctcagtttcttaaaaagttaaacattcacctacaaaatgacacagacattccattcctagatgtttaacgaagacaaatgaaaaagttgtacaaagtgttcttagcagtactagccattatggcacaaaactgtaaacaatttaaatgtccattaacacataaatgataaacatattgtattatgtccacattttccaaaactgcttagcagtgaaaaggaatcagctattgatccttgaaacaacatggatgagtctcacaataattgtgctgagtgaaagaagtgaaacaaaaaagattccatagtgtatgtttttatttgtataaacttctagaaaaggccagctaatctatagtaacagaaagcagactggtaattgcctggggatggtggtgacccgacgtggaggagtgaggattagtaaggggcacaaggaaatgttctgcctgatgaaaatgttcattagtttgattgtggtgatggatttatagatgtatatgtatgtcaaaatttatgaacttagatactttgaatatgtccactttattatatgtcattatacttcaatgaagctgttaatgaagttctaaagtctcctgactttcacagtaactcaggtgaaacacttgcattcagatcagcatttattaatttcagttctatctaagggcatgtgatataaattagactctatgtactccggacaaaatgctaaaatttgtcaataaatctaccaaaacaggttctatattctcaggtgccaatagaagaagatgatattcaaatcatgcaacatgcactgtggtaaacaagacacatctgactaccaaaacacaggaaaagcatttgtctaccatgtctagcttgtcatgaattactagaatactaattaagggaaatcatagaaattaaatgtcttgcaaattgaaagttccttcatatttggttgtgaggaaaaaagaaagcaaaaatttttaaagctattcttattgtaatgattttcacttctattttaaattacatttagcattcattcccttttgtctttcattcacaacagatacacaagtggatgcacacactctaatttgtttcagaaactttgccattccaatgaacgatcctttttacttaaatcaagtttatttaggtttttgatcaaaaagttttccgggaaatgtatgctttgttttcaatgcctacaaaatattgtgcatgtaatacgagtttaaaattctaggcattgtttttaactgtcataattaataattgaatttaaattatgtacaaatgctgtaatgactactcaaaacagagcaaaatattcccacccaaaatttggttcagatgttgagattaatgaagccacacacccacctagagggcatgaaaatttttatatcttacataatgaggttttctgaagaaaagagggcattatcttccaagcttgtctgaaaatggcttgaaagggcagagaaaggagggtggtttggggtgtttatgttggtttaggggctagggctggggtgagcgttttcatgtaagtggtggcaggaggttgtgtgatttgaacttttcactggtgtcaaaggagagagcactgggacattcttatcaactgctcagatggtgaagcacaataagaagatgagaagggcatggggagtcacatcaaaaatggcatcaggctctgcatgcgttcacgtccctgtgtgatgacgtcaacaacaggccatgcctactccgtgccagatgacaggtagcttgggagatgtccagtttatctaaatgaagactttttagccttcacagaatgactgattattcattcagtgtcaatcagataggttaaaaaatgtagagctaatagtttccatttgtaattcttgcatagaaatgaatgttgtgtagaaactgttacacaacaaacattaagggccttaggttactagatatgatcttctacttaaactacttttcattgatgtgaccttgtttccagtgcaaggtagtctggtagcaaaagggaaggaaatggaaatcttcttttatgaaaatagatggactattccagactgtatctgcagaaaaataaacgaatgtctgcagcagttgaaattacggcaaagccatcgcattacagacagcagagcagggaaggtgggaaccaggcttgcggtcgcctgcctgtcaggtggcagatttagggataataagtcaggggacaggtgagatgagggacaaatcaaataagcgggccaaatcctgaaatgtgaaaggctgtggccagagagaggagttttggattatgaaataatgagagtagagaaattcctgctactgacaacattgaggatgcagacaggagacaggaacctattgaacattttaagattaaaatcctctgattattcacccaataaccattacgtggcaggcagtgttttggtgatagaatattagataagaaaaaaatcctgacgtttagggtcatccaactaaatggggtattagccgctagggaagcattttacatcaatgttccctcatccttcatccacctgcagaagtgttgttattatctgcactttagagatgaggaaactaagacttaggggagttaaattaaatgcctagagtcaagcaactggttaaatgtcaaaccgtgtaggagtcaaacccaattctgcttttcagcaaattattctttctgttattgctttcccagcaagaagacctcttgaaatgaaaagcaaaagcagcattagatgctgatatcaggcctaatagttgtacatttagaagagataagattagaatcaaaaataagtgggcagaaaaatttcaagtactaataatggagcaagagacaaaagataccatattctctgaatttttaataactttaagtaattgaaaaacattaagatgatcaaagaagatatgaataaaattgtcacttagataaaataaatgttctaagaaattaagaaaaagaaaacattgtggatggaatttcctgatagttgacattcaagaagcagatgcaaatttgctaaatgtttcctttatcacttacgatccagcacatacactgtgacttctattataatcagaggacctgctgggccctggagatgaaaaggtgactttttggggtgtagagtgtgaatgttaaatttccccctgagaaaaccccactggttatctaattaagcctgtgaacatcctctccccaaaatgcacacatataatttataactcctggagtttacaagatattctttctatcttactgaaaatgtggtgtgttagaacaagtcactttgttgatgtcctaaaagtcaaaagtctgtgaccaatatgcatgctagaattttttagtatatagtattttcaaaagacaaaatgtggattcaagaatatttttcactccttaggctatgttttctggcaatgaacatagaaagaagttttgcttgacagagaaggtttgggtaagagaaacaccttgtactaatgattatgaattcatctctactgctgcatgtagtattttatttaacctgcagaaaattatgttttatgtaatatgaattctgaagaaattaattcctgtaagggtgcctaaaatttgaaacaaatgagcaaatgacttatatgtttctttgtttatgtgtagatttcttttgctggataactgattaccacaaacttagaggcttaaatagcctattttatattctcatattttctacgtaccaggcatctgactatggcttaactgggtcctctaacggggtctcacagatgcaattaaggtgttaggtggggctgcaatctcatctaaggctcgggattctaggctcacataaatattgtcagaattcatttcctggaagctgtagagttcattttggcttcttctaagctgcagtggaaagcctctactgctttgagtttctgacatcaggaaaggaagccctcttttaaaagactcacttgcatcgatcaggtccacccaagattatctttcttagattgattcaaaaccaaatgattaggtatcctgcaccttgtagtgcctccacttttgccgtatcctgtgcataattacaagagtgacattgcatgttgttctcaggaccccagaccaacccagtcaggtacaccttcctgggcaggggagtccacaagggtgtgagtcacaggggagcattccagaattatgcccacaacaatgtttatccacagagagatctgacaaatgtagtagcacagctttttaaagaaaaccttgccaagcactttgggagacggaggagggtggatcagctgaggtcaggagttagagaccagcctggcaaacatggtgaaaacctgtctttactaaaaatagaaaaaatagccaagtgtggtggtgcatgcctataatccaagctacttgggaggctggcgcatgcctgtaatcccagctacatgggaagctgagacaggagaatcacttgaacccgggaggcagaatttgcagtgatctgagaacatgcctttgcactccatcctgcctgagagacaacagcgaaaatctatctcaaaaaaaaaaaaaaagaaaagaaaaagaaaaccttaaaaaacagagggaaaaaggggcattttggacttgtaattgctgttctttgcaaaatttcctgtgacaacttcttctttttatttattttatttttttaataatgggaaaagtatgtacattaaactcctgtttgttagaatttctttattacactttctcttttgtcaactttccaatctcttttgtctcaagagtgttccagttagatgctaaaatgtctgcaatttgggaaaaattaagagatttatttaaaaatattttgtgattgaactttcaaaaataaaaataacagaaaaagaatgtgtacacataactgtacttcttttctggtatatgatataattgaatttttttcaattttgctttcattctaggagctggtttcttctttatctacctggtacttatcatgaaagtaaataatggttatagaaggcactcattcatcactcagtcatctctgtcataactcaattgctgcaacagtggtaccacttctacacatgctatgaaagaaccagcataatcactctttaaagtcattacagattaaacaaataacagtgaagcacattttggtaaacgtttatttttcttgctctaaacatagtatgtcctcacatttactttaagttctgtccttgaattaatttcatttataatatattttaaaaataagaaaaaacttgatgtccctcattaagaaaacttttgatttgtatgcatctcatgttgtgtttttgtaaactaccactgaaaaatcttaagataattgctgtataatggggtaattaattaaaataacaataataaaaattaaaattctaaattagtctcaaaccatgttaactttactttaattatcaagctgtaatttcaaaccagagaaggaacttagaggcattccatgtaaacttcaattttgtctgtgtggtgtgtgtgttttgttttgttttgttttttaggaagaagagtggcccaaaagatgatgagtctttattgtaatcctataacagtgattttgtaatcacataactgattttttaaataaggttatctccttttgaacattttctgagatgctagagatagtgggtaaatgaaaatagaaaagataaataaaatggaaatatttaggatacttttaaagacacgtaattattaagtattgttttaaaggaagagaagactgtttattcagtgacaaagaaataggacgggaagtcatgggggaaatcagacctgggaatccctaagagaatcctatatctttgttccattttgcagcatgtaggtaacatggtgtggtggcaagacagtttttgtttgttcctttgtgtttcaagcgagacaaatttgggggaagagatattacatccattgatctattcattcactaaacatttactaagctactgttgtgtgatcaacactgcattttgtatcagtctaaagaatgtacataatattttggggggaccatttgttttacaattttcatatactttacaagccaaaatatcacctcatcttaatagtcgtaaactgagcacagctgtatgcattatgtaaaacttaaacattttcaaatatattaaccaaattcagtagcatagtttcatttactacacccagaaggcatactctctaactggtctgggaatagtctcactttttatttgaaattcaacagttattaaaactgttttggctggagtaccagccagttgacccaggctcaaaatcagatctcagtagggagactattttctttaatccaagccagaatggaaagaatctcggccaagtgtccaagctaaaggcaagctcaaacaaacaaaaccaatcacactaaaagatggtcctgtatgatagatgaacctaagtagaacaagcctgaaaagaaagataagctggttcaaaataaataaggacagaacatgattttctataaacaacatctagatttctgaagatctccctttgcgtctagatttctatgtcacatgttggcctgaaaaggctagaaagaataattttatttcatttttagctgaaatatacttcataagtgtgtatacactgaaacactttaaattactgaccattcttggcatttcacacttacttttatcttccctgtacctcaaagaaatacaaggaagccactttttaaatgataagacaagtcaccattgttttcaaggccatggatcaaaacttggaagaaaaacttagccactgacaactttttattggaaattattttattaatttagatctgcttgaaaataatccttactgaatgcatagtataaacttttatgtggatgtcaatgaatagaacaaaaatgatataaaagtcatagtttcaaaaaaaaaaaaggagagagacttggcttttttttccattcctaattctcccattctttcaagttcccttatttactttgagattattacatttttcttccattcccacttctcctcgtctatcatgctcctttctcattttatttgagactactacaatgtgtctctaatggttctattgcactcaatctgtgcactcagaaactggcagagaagcacccaaaaacagcctgttgagctccctagaagaaaacccccaatcgtgtcacttcacttcacatgaaaaaacttcttcattttctgccaaatgaaacctgacttctccgcctgtctttcaggctttctactgaaaacccaccccacattttcaatatcatgtctcgccattccttacctagaatgagctcttctctgccctgtgccttccagcacctgtggctttattctgatagtcctttctgctttttatctagttctatgagtccaactcaaattctgaatcctcctggaatttactctaatttattttcctttcagtacttccctgttctcagaatgagctgttctaccttggcgcactcacatacttgcttctgatgctatgtctcatgtgcagaattgtgtcccaggtatttttctaagtctctctagtttccttaaacaatgacgagctctgtgaggtgcaggctgcactggatccagggctctccatgagcagctccccagcagcctgcaactggcatggattgccctgcaccctcctctccaggcacagtgtgggaaagcttttcattttcataaagcttattttttatataaaataaaataaaaacctgcatgataactcatgatacgttggagagaaataaagaggcagatgtggcaggatatcacaaggaaatgtcagcatcttatgcagcagggtttgatttgggggacagtggagaatagataagatcgagaggaatgataaaataatagggaagactgtacccacagacaataaacagacaggcaaggagactgcaccatgcagaaaagaggggagattaggagtggcggatgaatgataagtagttttggttattcataaatcagaaaacaggtagttttggatttagtatttcagttctggtcacataggttaaatacacactgagatatactgaaagagtccataaatctaaaaaacaactgaaatatttaaatacctagataaaaatactggcacggaacaaattgtgtataaaaagtaattgttacctaataaacttttttcagatactgtgcaatattatgctcagtatctgaaaaaagtttattaggtaacaaattaaaatgtgctttatgcaaacatatgggcattagcttaaaatatctaccttgtcttgagttcagtgtattttaaaaatgcaaaaataaatataatttatttgtatttttttatctagatacttttatttaaattacttaattagcttctttatgttccacctcccatgaaaatgattgagagtggcttatatagacacatgcaataaaacaaaagttaaggaaaatagatgaaacacttggaatacatacaatacaatgaaattgagctaagaatgttccacaaaggatatattataaggttctaaatcataagttggtagaagtatcaaaatatggctctgacctttctggaggctggagcaaagagagaagtgtgatcattacaaaacttatcaagcatttcttatcaagaacttggaaaaggaaaagatcaaagaaacaataacttatcaaacactttgtctaggttctctcattcaatcttcacataccccaaagacagtgggcctgtctttccaacccacggcagggatcagtggtttttctggagctgttatggaggtggttagtatgtcggagtagcttcctcttctcctgcatgaaggagggaacagttgctgtcctttaaaatgaatcttttctccaagaagaattcagaaagaagccaaaaaattaggaaatatgaaaaaaaaaaagatctgaagacattggagaggtcataactatatgcctgaagacaggcataactatacggctaagatttcagagatgaaatctcacagaaagtgagcccagtgttgaggactgcttctcccctagagatgtaatctaaattcacaaaagttaacgtaagtttggaagactaagaagctgtgaataagagtattttgctcagagtctgctaaacaaggccctacaaacctccttgcccaggatttgggttgggatctcaaagtgctacaacctaggggtgaaactgctcttgcaaaaattacgatagtcagagaaatctgacataaaaattatgacagtgaaatgaatctgacataactggctctgtcctgcttctaacctccaagctgcccttgttcattcctgggcataagccaagctaactataggaggaatttagtttacaatttaactttaaaacaaagatgataacagctccttcctgaaactaactgcctccttgctcagggatcaaaaccacctgtgtaaaactaaaattagcaacaagtgtagaattatagttcaggagtcatgcagccagaggttacaagatttgtaaccttcccaattgctcctatagatgacatcactgttgtaaaacctaaggttggtattagaggtattttctagaccctgcattttgatggactagctggtggtccacctgaaccagtagccaatgctaagaaatgggctcatctggttttgtgacccaccacccaggaactgactcagcccaagaaggcagctttgacccgctataattttatccctgatccaaccaatcagcattctccattccctagcctactgcctgccaaactatccttgataaaccctagcctctgaggttttgaggagacttatttgagtaataattacacccatccttttacttggatagccctgagattattacactctttctctattgtaatattgctgtctcagtgaattgactttatctttacagtaggcaaaaagagcccattgggtaataacaggagtgatagtaattcataaatagactggtcatagcagggactgaaaaccagctttggatcatctcaatctatgactagatcaaggccatatgggattactaatcccctagcttctttccagaagcaaatatgaatcaatctcagaggaagataatattaatttaagcttaacattatttttataattattcaaatacaatgtctggaactgaaagagaaataatcaatatatgaggagacaaagtaatgtgatacaagataatgtgaaaaataatgttattttgcaaagaaaaataacaaacagtagaaatagacaggcagggaatgcagataatagagttatcagatataggctttactgtagctatgaaaaatatatgcaaggaaataaaagacaagactttcagcagagaactgggaactataaaagaagttatttaaattctagaactagaattcagtggatgaagctggacaaagattagacatggacaaagattagacataggcaaagacagaaaatatccagaataaaaaatggagaggtaaagaagatgaaaatgtagaaaatcacatgaaaaacacagagaacacagtgaagaagtccagtgcacatgcaattgaggtccctgaaaaagaggcaagagaaagcctggggcagaaacaatatttctagacatagtaagtgggaatttttaaaaaagagaagctaatttcaaatgactaagtataagattggcaactgccctctcaacaaaaacagtgaaagccataaaattaggaaataatatatttgaattgctgggaggaagaaacactaaaaagaaaaacaaatactctcaacccaaaattctataaccaaagaagatgatcattatgatgatgaatatggatttaacgtactgtctatcaaaatctcaacgggctttttttgcagaaattgacaaactgatctgcattagtcagatttcaccagaaaaacagaactagtaatatactagtaatatacatgaattatggaggctgagatgtcctgaatctgcagctggaaagctagagacccaggactgctgatggcatcattctagtttaagtatgaaggcctgagaaccaggaatgccagttttataagtttcagtcgggctacaagtctgaaggcaggagaaaaccactgcctcagcttgaagacagtcatgcagagagaattttaaatataatttattaattataatgcttgagacagaactattaaaatgttgtggtgaattaagtttgtcacgtgaaagctgggataccactctgcattgttgaaacagagacaaacattttctctttagttctgcaaagttaaatttaccctgtgtaatggcagcataaaaattggctgagattgattttttttttaaactggagtagaatggtgtactttaagctcagaagaacccgaattaaaaaaaaaaaagaaaaaagaaaaagtgaaaaatgttttattagaaggaacaccttttcagttgttactttttatctgacatgtatgataacacacaagaagatgctgtaaagctgaagatgggggagctagtgaataaaaggtgttgcactggcaatgggcagagaggtgcctcacaagcaggcagggagaagcaacagagtggaatggccaggagcttcgactctggagccaatcacctaactcctctgtgcttcaattttcttatctgtaaaacagagtcaataatcatcacagcattgttatatggattgcatgagttgctgtttgtaaagtgctcagaacactggcacatagtaactacttaaagcttcgtaagacaaaaaaactgagctgacaaagtccaccgtcacaactcagttctactcctctgccagcacggagtagaacaccatggccttttaagagcaagtggcttctagagaacaacctccgatatatgcacttcccattgcccacaattattaagagatgaaaactaccaagacatctaaaaattaactaagggaaatactaccgccagaaactcagaggaatttgccctaagtacaaagccaaggaacagaatgggacctactgacctacttagtcttcactgcagaaaacagagtcctcacttcttggattgtctaaggcatcctgggtcaaatgtagctagagaaccaggcagctgctctctactgaggaagcagtgttctttcaaacagttcactcattattctaacccctgtaaatccattctaagataaaaatctcagaaaatatccgggaaaaagatagaaaggggtatcaaaacatatcattacctggaaggcataatctttataagtaaaatagcaaatagtcaggcagaggaatattaagagttacatttttttctgaactgtatcagtccaaaataggaaagtaatcagcagtttatgtggtaaaccagaaaacgtaaatgatctgttgtctctatgctgggtgtacgaagatgctccaggtgtaaatcttaccttcagatttagtcaagccttatctacaaaccttgtatattagtaaatatgagtataggcacacacacacacacacacacgcgcgcttttcaaacaaacgtaccattaaatataaagtaaacttcctctgaggacacattattctctaaaagtggttcatcttagattgagaaggctgccctaaattgtttggcatacacaaagtaagacaaaataacgtggcacttattcattttttttactggtttaacaagttagctttgatatgtaaaagggactctgacagaacttgaaattcagcagtgaacaaactggacaaggtccatgcttttgaggagcttacatttggtgatataaacaacatattacattgcaaacctgtttgactgtttcttacacgtcgcttttatttatttctttaacaagtagttttgagcatctggccctgtgcttcttgctcttggactgttcgtttctgggtttcatatcgaacttaaaatctagtgaatgacacagggtaaaaaatcagacacaaaggtatactaagattgagattatttttagcaagaaaatacaattccgtggaggtgtatataagtgtaatttaacctgagagatgatggagagacaagttaggtatttaggcagaaataacaggacattaaaaaaaattgtggtaacaatgagtttgagatatttgaaaaggtataaaggccagaaatcgagcagtcacataaggacggaaagaccaaatttctatgcagtgagaatccaggaacgggagggcataaagaagcatccagtttttaggcggatccttctttaagtccatttcccagacccatttccagccaggtgtgatgatgtgatcctgtcctggtctattaggggaaggtgaagcgccattttctgaaacatttccttaaacaagagctgcctcactcacaacctttgtcccttttttctcattttcttcctgctgcttgtggcatgaacatggattcccactgggcaatgaagacaaatgttccagggatgacaacctccaagcagcctggcctccactggggttcatggagcaaaggcattgcagggtcctgacggcatagctccatgcttccatgcaggcaaggagtgaggcctagtgttgtttagccattatcatccgaggttctgggcactctgtgccgcatccaatcttaattaatgtagaatttggtaatgaaagtgtggcattgttaagtcacattggaaattttaatagctttttttttccccttttaactctgcaggatgttgggaaaatggtagaaaccccaatctaaatgttactatgccgtggattcttcaatatcctacccattccagatgtgagcctttaccattcctgcccggaatgatatactgactcctatggtatccagataactggtgcttctcattctctcttttgtaagtaggagtcaagttacactttttgttaatgttccataattacatattgtctgtgcagggaagcagatttatattttaatatctagttttcttgtttacaaagagccccaattgggcatagtgaacaatcctggacgtggatctgaatgtgatttgcaatggaacttcaggactgcctttcacagaggagtgttgactgtggtttacacatgggaagatacagagttaggagagccatttattatagtcagaggcctatgctcccacacacaccacacaaaactctccccaaaaattcaaaggaatcctcacactccaagaaatatgtaacttagaaaatattatcaataaaatgaaatgtgaatagtcagtggtttttaaataaccaaagaaacacatgctaagaggactacctttgaaaatattgatagacctataaattatggattttggcccaaaccattttttaaaacaagcacaaaagtaccattttatgaaacaagcagaaaagaacaagatggaaaacctatctaaaacgatgtttttggagaaggttaatatgtcatctaaatagagtaaatacagatgtaactgcattgataccaaatggaagatactggagaatcaggaaaagattggaagttgaaggaaaggggaatgtaaagacctttttcagcaaaagagcacaggaaaaagacattttgggggaaatgttctcaggcagaaagcgttagtagttgaccttcacattggagaagatcctcatttcctcagtttccatggtttacagagtttgcatgataattgacaatttcccatgttctaggtggagatcactgggtatgattagattggaagtgtagttaggattggcatccgaggctggtaaagacgtccacagcaaggagctgtaaaaatagatgtcaatgtatggcatcaagtaagcatctgtgttcagttgaggatcaaactgaaaaagtgaagcctgagaggaaaagtaggggaacagtgaccattagtgagctaagtggaaagggggtgacttctggaaagaaagttgaaaattaataacttgtgtaaggattggggtgtggtggccagatgtgagaccagatgaggagcattagggatcttgagggctggagtgttagcaagatgggatgcatccaatatgcatcagcagacatctgtgaggctggtagaaaggtctctatactataaaatctgacctttgagcgcatcctaaaaggaaacttgaaaaccttcacaccttgctaagtgtgctgtgaagtatagccatggccaacgtaatgtgaaagaagataggtcatacaaaatgtaatatatatctaggatgatgcaatgatgaaagcatctgaaagtgtcatccacgttctagcagaagacttgttagctaacgctattgctaataacatcacgttacttctaaagttgcaggcctacatccctatgctgaaattttctgttttattaaatgcatttagtgtggcatctatactagtttattaatcctcttttttctttaagatagtgtaaattaaaatatggtttaaaaaaaacttaaaaagagagataaccaaccaatctttgcattttctggccaagtgctttgatggggtgaatagacaatctacttggcaaaatgcagtccatatatgccattttttcatctatatttattctcagtgctaatcatttccctccacacatgcaagtctatgcatgttctcaatgagatctgtgctttcctgacacatttctttgcctgtctaaaacaacctccctccctttcacttctcagattctgtgcactctccaggatgctgctaaaatactacttcattaagctttcctaagtactactacatctcactgcaacagggccttttctttccttcaagttttatttttgttactttgctttgtgagttagacccagaaaatctaggttagaattatgcacaaagtaggatgtctgtttttgaaaaagcattgatttgaaccattaagaatgtgcttgatcaagctgaacttaataatggaagaacagatctagttgcattccctataatttagtaaagggaattccattgatttagaaaccctgctgatgccctgcttagatatggaaaattacaactaattgacattgagaaattaatattgaaaatacattttcaaattacaaaaaatattaaaaataattatgcctaattaatatatcacattttccattagtatatctcatgacttcagagtcaaattactaatgtgtcacaagcaatacatgttagaaaaacctcaaaaggaattttctgaatatttaagaaacaaaggtaattcacatcatgtataaaattatccctatctattgaacagccttttcagtctgtgctcatttttttctcttctgtcattaagctttctaagaaaaataaaaaatatatatatgggaaaaattaaagtatgagagtttataaatattgctgtttattcattcggctttagattagtttgtttgccagtgtcttctctcatttttccccactccctgactttttttctcaatgctaatgaatcctgtgcccactgttggcttctttgcaacaaaagccatctggaaaatgccatttattttaaatgaaactcttagccagtcttttccataggcagttgatcacaggagataagcagctcataggttaaatgagaaatcatagaattgttctatttacggcacccacattctctctctcttgcagctgccatctaggatttaacagttaataattacttgtggaggagaagttcatttctcataacggcaaaagcctagtcttatgattaataacaagcttccttgttataatgacattggccatttaacatacttaggtattaggtggatttacatttctggaaagttaaagaaattctactttactttcttttgctcttagaaatgacatgaatggatgaggaaaagtgcttgcttcttatttaaatttcaaataagaatttcataaagaaggattaaatagctgtacttataaaatagctgtctatttttaaataaaaatataaatcagatataaagtttaatataataaacaaatctaaaaagtcaaattacactactttctaaccaaattctcctttccttccaactttccatgtatttacattaatatttttacttaactcttatagagccactttttcagttttagacgtattttattgtcttcctaataccaaagttaaagttctaagtcttatatacatgtatgtacctgcaacatgaatgcacacacacacacacacacacacacacacacacacttcattccctctacctccagggagttatagcctatgttgttgttggtaagtcattggctatgatattatgactgaatatttttcacagctttggcaaataacatactagaattacatttctttttacatgttttaacttaaataactatgttttcctttactttaattattattttttagactacctggggaaaaagaatgcatttacatgttttcaaataattcaataattaatttgtggaatttttctctggaaccaaccattcttttctaacagtctttactggggactctctagattgactgccctggtgttctccttaatcttcccttcaccattgtcctgggcagcccatcatcctctcctgtgttccatgtcttctttctagatgtgatttatttctctccttgcttactcctgtgggtggctgggatagggagaggaaggataggcattcttcagtagctcacaagatgtaattttttagatatctatataggtttgcaaatgttttctttccatataaagttcctatggtaattgatttctttagaagaagtaatttcccctcattattttaacgacttcattcactccattgtcttctggcttccagtatttctattgaaaagcctgatatcaatcaaattagcaatactctctataggattttaggattttgtcccttttctagaagaatttggattttttttaattccttgtgttctgaaattccatactgctatgctgtaacacaagtggtgttttgtttcattttgtttttcttgttttttcatgaaaataataaaaagatatgtaagttatagcatcttattctcaggccaatacttcaggtgcatttgctctgtaaaccctcaccactcatccttcagcctctcagggggtcatccctctggatgccttagcatcctcctaaaatcccattcatcagaatacagcttgcatgtcatgatggacgtatagctcccttccacactccttcatgtttcttgtctctctgtatctcatgtcctcaccagataaaacacagttcacagtgacacagttcatcttgttgtgctgtaattcaccaccctccaatggctactccatgcagcccagccgtcctgtttcattcttcctagagaagacattttcttttcctctgtccttaaatgctttggtaggatccttctcatgttatttatactgaacctcgtggattctgtccatctatacacacatatttttctgttctgatttattttcttctataatttcttagacaactcccctcttactgttttcatttcccttctcccagcactcccattatttggatattcaatctcctgaagtgattctttctcatatcttcactcttcgtcttctcattgtcttctttattttctaattttaggagacttccttagctctatctttttctactaaattttaaattactctgctgtaattttaattttcaatctctccttttgtgttttatgaattgacatagataaatagatagatagatagatagatagatagatagatagatagatagatagatagatttagaagcctcttgtgtcgtagatgaagtatctaatcaataaatttagtattttgttctttgtttttttcagtttcatctaattttctgcttcctctggaatgctttttgttctcattttttgttttggccccttcctatctttatgttagaaatgtttcctaatatcttgtaatcactgcacattctcggatattaattaaagaattgctaagaaacatgcatacataaaatgagtgcatgtttgcactggtcaaaggttggttttcacaatggtgtagttaggcaaagacaatgttgttttgttgagggaaatccaaattattagtgtgttttgagtattttcttctgtgacaattaagtacccctgagtagaaacttctgctctatttcctgacagctgtattcctggcttccactatccccagaagcaatcaggaaggttaaagttgtcgtcattttacatgcagatgttcacctctttccctaattttttcttgtgctggtgtgtcaaagcccagaagttttaaaatttaaattcccaagaaagtcacgtcccctttttctgccagtgtgggaaaagagaggctacgtggctgctgatggcttgaaaaggagcctaatattccctcttaaagacaaccttccctctgtaagggctggtcagcaccctgaacctgcacctgggacatccagttcggaagtctcgctaaacttctgcaagaggaaccagctcacttcctacttcctttccctgtaacttttccttagttttccaagagagatttgtatcatccatctagtttactgtcccctaaggactgtagtcttcttcatatgcatttcttttccctgaggactaactccttgttgctttcagtagagatctgaggaaaaacagacataaacatatgatgcttttgagctactatgtttaaccacagacatataggttcataaatcctctcattttatttatgaagtaaaattggttcctcgccctcaaccagcattgagctggcccataaagtttaactggctctgcctgtgacaattagaaccaagatgctcaagtacagagaaaaccaagctggcccttccattgtgcagcaatggttctcaatgtatggtcccaagacgcattaaatcagacactgcaaagatagatgcagcactctgtattgtgtcaagccctctggctggctcagatgcccaccccaggaactataatgtcttcttgcactcattgggccacaaattcccatagacatgtatagattttgctgatatatacttttctaactcattgttaatattggatttgtgttgataaatgggttgtatatctccatacctctatatttttaagtacccaaagttttttgaaatatgtgagatattttatccctttttaaaaatatttttcatttactttccctaatgagcaaatgttggtcacctgtaccacagttcctgaaccactgctaggttattttctgtgagtgtcccttataattattcccaagtcttttggagtcttctcatttggccaattttaccaaaatttctcatgtgacagcttgtcaggtctcttatcaagcaatttaaataaccatatttacttagaattttgagtctcacgttgtgggatataagttacatgtagataaacactttttaaggattgttgttgtaattctcatagcaaaaacggattatatttttacatttattcactactgaaaaaagaaagtgttagttctatgttgcaaacactgaactagatgttgagttttaaattagaaaatgtagagaagataaattattgttaaataggcacataaggcttgtttaaaaatgtaatgtgactgccacaggtatttagtatggtcatcgtattatgttgacttatttttattcttcagggaagaaaatgacattatttaaatctgtactatttccacaaagttgttggttgtttcactgatttaatgtcgtgtcccaaatagccaatgctgaagcatagattgactcaggaggtcagaaagatatgctttttttttttttcctaaacatcattctgaacttagcctgagaacaaatacagcaaaatgaaagtaaaattatgcttttagggactttttattaatgcttttcaaaggtactgcataatcattcattatcactcatgggtcaaagagaattaggatctgtttatttcattagaattttactatcccagagaaatagtaaaaatgcccttaagagaataaaaaataactccaaagtagatgaaacatgaagaaaacaatcaggtagagatgtttttggaggtaatgtcatcctacaggataaaagcaatactagtgggatgttctgatgccagtaataatagaagttactgagcaaacctaaagaacaatggaacaaacatatgcagataaacttatagtttctacacttaggggatatcttccaaagttagattaatagaaacaactagatttttacattaaaaaatattagcttctcttttgtttggtcatttttctttcttacacacagggtcctagtgaaagacaataatgctataaaacctattttatagcacaaagagatgactgtatgtcatcgaccatattttacagcatgtgtcaaccaaagctattgctgggttcactttatgtttcttatggaacatactttaaaattaaaaaaaaagaccgttagcataaagcaatctcagagagccaagcaagcatatttgctatatttagaaagcaaactgcattgtacatgagggtacagtgtagttctctctggcgaaacatatttactctgttttcccttcgtaggtaatcctaggttagtaatggttttgagagaatttaataaccttggcaagcaccctcaagagttgggagatattaaacttgaaatggattataaggtctgctgtttttataatattattacttacctgatagctgaagcagctttttgactggcagtatagttctacatgcctattgctcttgtatttggaataatggaatcacttgaataattaaataaaaatgcttgaaaattttctatacaatttaaagagaaattccagctcctagggaagtaataatcatctagataagcatattgcattgtgcatattgtaaaacatctcaagtgacttagaggatctacctaaaaaaatgctaaaagaaaaaaatacatatatgatttaatagtctgtgagctaagtgagcatattttatttctaggcctgattgtgccattaactagctgcataacataaaatgttatttgtataaagaggaatatttacctggtgcgtgtgctctggcactagaccatggaatcagtcatgaccagctaatctccagcactggtaatattttgtttcaccttagtcaccatctatgagagccgtattctttatctttccctcccttcaaaaagcagtcaggatgctggcaggaatcagatggcatactcaaatgggagatgagagaggaggttaatcctctgattgtttaccaaggtgtggcaggctgtagggaaatcctgagagaacttgcaggctggattctgagcttctctggatgatcaccaccccaggtctgaggcagaggcaaaggcagtccttattagagggcagtggcaatgaaagaggtggggagaacgggagcaagagagagaaagagaagggagaaaaggtgtgggaatgagtactgcaatccatttgcctttctttccaaatacctaaatgtgaagcaaaaatcaaaggtgctccccacacaggtcttcctgccaattgtaaaaaggaaagacaactacctcttgtcaattgaaacttgtatgagatttgacttgtcacactccaacttctcataatggttctttcaccttcgattcaactacagcatggcaaaatcttttcgtatcttggagttcagatatttagaagtggtaatatgatatgactttttaatgacacggcagagcttgtaaagattgactgctattggaaaacaggtcaatttttcattccatgagctttcttataagacatagcttatatgaaagcaggatagggctttaactttctgtagaaataactgcacgtggggatagcaacgtgaaatccagtgttcaagagcaaaacattctattattcttctatttatcatattttgttttaaggttgtctattgtgaaaggagtaggtaaaacaaagagaaactgtcatgaaagtggcagagttaagggaaaacattaaaagtcgcttgggggaaaatgtgtcacctatttcttgaacttcaggaagacagttttcaaaaagttttagaaaacaaaggcaatgttatgatttaaagttgtgatgcatgtcaaaattctaggctttcaaaagtgaaatttgcaatgtccagcttaaaagatgactgtaagttagaaaataagcgacagaaagaagcatttattgggccgggcatggtggctcacgcctgtaatcccagcactttgggaggccgaggcgggcggatcacgaggtcaggagattgaaaccatcctggataacacggtgaaaccccgtctctactaaaaatacaaaaaaatagctgggcatggtggcaggcgcctgtagttccagctactcaggaggctgaggcaggagaatggtgtgaacccgggaggcggaatttgcagtgagcccagattgcaccactgcactccacactccagcctgggcaacagaacgagactccgtctcaaaaaaaccaaacaaacaaacaaacaaaaaaagaagcatttattttaaagggcctagcaaaaagattaaaagaaatacaggcaatcaagaatgggaagaaagtatttgcattcttaaaaatacaatatacaagaataaattgtaaaattaaaattgaggattgcaacaagggccaaagacaccagaatatagcttcctagttaagttcagtgcaaagcacaaaatgaatgaagtcagagcaaacatggtcaatagggagaagaggtcatccaaaaggaagtcaaaaccttaagtgagataaattacattcccagtaagatgaatgaattcttattgataaaaactgaggattgttgagctgtaggaattttgcaaaggaaagaaaaagtattgattttaaaattttgaaatgaatgtcttcaatcatatgattttataaaaatttacctattaaatctagtatagaaggtaattgttttgatttcaatttttgactatgtaaataatgttactatgaatttcattgacatgactcttactatgcaaacatgttgggtacaaaactaggagtgaaatttctggctaatagttacatttatatttaactttataatgtaaactaattccccaattaatggtccctccagcagtgcatgaggttgttccacagtattcctagcactcaatatcactaataaacaagaaatacacactaaaataaaaatacaatgagataccatacaaagccttcagatgccatccgaatggcaatacttttctcaccagatctgataaacaaattcagtaaattctgaggtaacaaagtcaatatacacaaataaatagcactgctatacaccaacaatggtcaagctgacaaacaaatgaagaactcaatctcttttacaacagttgcaaaaacattaaaataccaaagaatatacttaatgaaggagattaaagatctctacaagaaaaactaaaagacactgctgaaaaaaatcatagatgacacaaacaaatggaaacacattccatgctcatggatagaaggaatcaatattgtgaaaatgaccatacgacccaaaataatctacagattcaatgcaattcccatgaaaaactattattatttttcatagaaccagaaaaaataatcctaaaagtcacatggaagcaaaaagagctctcatagtcaaagcaattgtaagcaaaaagaacatatctaaggcatcacattacctgactacaaattatacaaggctataattatcaaaacagtgtagtactgatataaaactggacacttagaccaatggaacaaaatagagaatccagaaacaaagccaaatgtttacagcagactggtatttgacaaagcatgcggaaacataaattaggcaaacaacatcatattcaataaatggtgctgggaaaactgccaagccacctgtagaagaataaaattggatccccaatcctcaccttatataacagtcaacttaagatggatcaaaaacttaaatctaatacctgaaaccataaaaattctagaagataacattgggagaactcttctggatattggcttagtcaaagaattcataactaagaccccaaaagcaaatgcaacaaaaacacaaataaataaatgagacctaattaaactaaaaaaggttctgcacagcaaaagtaataatcagcagagtaaacagacaatctacaaaatgggagaagatatttgcaaactacctatgcaacaaagaactagtatccagaatctacaaacaaacggaaacaagacatcaagaaaaaaatgattccttcaaaaagtggacaaaggacatgaatagacatttcaacaaagaagatatacaaatggctaacaaatatttgaaaaaatcctcaacattactgatcatcagggaaatgcaaattaaaaccacaatgagataccaccttactcctgcaagaatggccataatttaaaagtcaaaaaataataactgttggcatggatgtagtgaaaagggaacatttttacactgctggtaggaatgtaaattagtacatcttctattcaagacagtatggagattcctttaaaaagtaaaagtagatttaccatttgatctagcaatcctactactaggtaactacccaagggaaaataagtctttataagaaaaagacacatgaacacgtttacagcagcacaactcacagttacaaaaacatgtgcccatccaccaatgaatggataaagaaaatgtgatatatatacaccatggaatactactcagcaataatgtcttttgcagcaacttggatggagctggaggccattattctatgtgaagtaactcgaatggaaaatgaaataccatacgttctcatttataagtgggagctaagatatgaggatgcaaaggcatacagaatgatataatggactttggggacccaaggtagggggacagttggagtggggtgagggaaaaaggactatgtatttggtagagtgtacacttctcagatgacatgtgcactaaaatctcggaattctctactatagaattcatccatgtaaccaaaaccacttgtatgcccaaagcaattgaaattttaaaaaattaattaaacaagaaatgaataaaattcttcattgtaaaagactccaatttggctgggcgcagtggctcatgcctgtaatcccagcactttgggaggctgaggcaggtggatcacgaggtcaggagatcgagaccagcctggctaacatggtgaaaccccatctctactaaaaatacaaaaaattcgccaggtgcagtggtgggtgcctgtagtccaagctactcgggaggctgaggcaggagaatgcgtgaacccaggaggtggagtttgcagtgagccaagatcatgccactgcactccagcctgggcaatagagagagacttcatctcaaaaaaataaataaataaaaagactccaatttatttgtcgtttatattttgtggtaatatattttctaaaaattttattattttgtctttcacctttaaattttaatgcatttataacaattttaaaacatagaatgaaggatggattaagattaattttttcctatggatatccaattgacgctaaagtttttactgaaaagctatttatttttattctgcagagctacctcttcccatatcaagggtctacatatagatatatatgtgtgtgtgtgtgtgtgtgtgtgtgtgtgtatatatatatatatatatatataggaatctatttcagagttctatatctcttaaattgtcctacttatccacatttatataactttaactactcagttatcttttgtaataagtcttgatgctgtttaagaaatgaacaataattatgtagtcaaaagatataggaacaatattataaatatatttctggtagtaaatacaaattattttttagtattttgtgatatttgtctcattaacttttaaaaatataatttactttgattacttattctaaatatatattcatttttttcttaataatttttgtatcttgtgcatttaaaacaaattttgttggttttaaaaacttattaggttgattattgaaacttagttctaattttccctcagaattttaaaagcattgtcttttgattgatatcttttttatttgaatttttatgaagtaaaccatatctaatcctgttctatctcttccacatttggttcattttatgagtctcttttttttttattatcatagtatatctgtagtttcagaaggatctttctaaacatggatcgtttttattaatcagtgtggtataccatgggccttttcaacttcgcctcaggaagacattcttgtgcatttactggattatctcctttttctcctcagttttctgtgtctcctccttacatggacatgaaacatctggaatcaattcttcatggccattatcttttctcctctattatttttgatctccttgttcttcaaatctgttattagagatttacttgacttttactatcaaagtactggcttgactattagcctcatgtaaccaatacattatctttttctttggtttcttcatgtttcttttaagaaaggaggttttcccaattctttctgttagattgctcttttttttaaccaaaagaaaaaaaatcaatgtttctccaccagcacaatagacatttgggggtcacgctttgctgttggggactatcttgtgcactacaagatgtttaggtgtatccctggcttctaccaactgaaggcccagaggaaagaatgttcccaagtgttgccaaatggctgctgggtgtggtggaaggggtgaacaacccctgcgtcccccaggttgggatccactgctctggatgtcttacacgactgagtattttaggttattaattgaaatatgtttaaaactctcttaggatgctaactatctttgtgtcctctagggtctgttggtcctgtcttgaggctcttaagtttccttttctgtctactgattcttaactgttgattcatacttgtgaatgaatactggagggagctgcacaggttatttccgtaatggggcaatcctgtctcccaacagtgcattttaaaaaaaggagagccactctagattcaaaaaagtttgtctgtcttaagcaaggcagcctttgtttgattgattttaccctttctgtctaacggggctggcctgacctgactctctactctggatccctggggacctcgcttcactaggctggccacccacctctgatgttcacagattctcctggaggaagctcagacagtggggatgaagcagaaaaggaaaaatgaaacaatgttatgggcccaaccattgtgatcatgtttgtatacaatacagaaaaaaaggtctttctgattgccctctcctgtttttcacatttgctccttgtgggcttggagcactcacttcaggatttggggctctgttttttatcttcccttttcaatttgattctattttgtatttgtgaagattttctcagaggctgtggctgtctgtatacaacttttcttatgcaccgcttctatttaccatccctgtacagtcaacaataaagttaacagaaggcttgcaacacatttagaaaaacagcaagagggagatatatacaagtaagagctgtgaccacacagggagtgcttggggtggttcggggccctgaccttgctgctccataatgaatgactcatttcatcttctctgcaataatagaaatggggaaactgagactcaaaggtcgagaaagttcacagggttgacatgacccgtaactggcagaaaggtaatttgaagactcattaataccatcctaaagctatgccaaaaagctcagtgccactctgacttggctgtttgtgtactagaaaaatttgtattgcttagtattcaggataccaaggagacgttgtgatcttgttaggcagaataactgcttatctcacctaaatctaattattttcaaaagaaatgtaggaggtaaggtttctcctccataattcagctgctgtttgcattggggtttacatctttttccactaaacaactttagacagacaagtcacagcttgggagcattcctcttagcctttattttcaaggtgatttgcatatagtttacataaatctgcataattgccatctttgagagtccagaaatggatttctctaatcaggaagcaattctcacgatctctctgttagtggctccaggtaaacgtgtaccctctgtgaaatcacttttgaaaagaaaaacacattattttgataattttaagcaatgagctacaatatgaacgtcttcatgatggagtcagtgagattccaggctaatgtgctattggaataatctgccttccctctttccctctctcactttccgtgggaactatccattatccaaaactggaactccttgatcctcacctgtgtgcttccatcctaggctttggcccaaaatgaggggacatctaaaataccctccttgtgaaataccacaggtggtcccgcacggtgttcagcaagcccttgagtctggctcgcccatccggcccagcaagagcagtcctgcctaagctctgtgtcttacgcgtttcctttgatataaacacactcaaaataagtgcactgaatgacacatcagtttccatcacgcgggctccagccctgggagctgacactggggaaccagaacacagtgtcagaagggaacagcagagaacagcttctgcatatcacttggtgcttggtcttggaaataaaaggcagctgaaagtccatcataaagggtatggctgcgcagctgctgatgttgaaggagaccactgattccaagtgcggggagaacgtgactggaggttgaagctgggtaaaaatcacttcggaaaacttgctagagctccctctcagaaagcagtcatgccacacatcccttcaggacatggcggcctttcccagacccgtggagagtccattgctgcttcttttcctattccagtgactggcgaggcagtttggggtggcgttgttgcttgtggccacagaaggccgctgtcaccttacaccgttatgcttcctcataacccccatagatgtgtgagttcagatgttacatacaggaactatggaactggttttctttgacagctagatggacacaagcattttattcttatgagttttttttttaaataaagttcaattgttttcaaaacataattgaatttcagctccatttaaatgttttgaattaaaattaatatattgattgataatttgtatttgccttttaattttaaggcaaaaagtgagggatacttgacacacaataactgcacatacttaaagcacaacttgaaagtttatatgtgtgtgtgtttatctccacagaaacatcatctttatcaagaacatatccatcaccatcaaatgcctcctcgtatgagactcattccttccacccccacacccatgaaccctgacattttccaatctggtcactggaaaaaggcactattctcgggcttgcatgagcacaagtcctgctactttcatccttctggatggtcctttcctggttttcatgtactttcttcacatttgagctgaagggaaggcagggatcctctgtggttggcttctgagccctcttgctctctcgcaggctgcttgccccagggaccctgctgatcccctcatacgggccctggtgctcacagcctggacgctgtccctgagtcggctggggcagtggcaggtgcacctcactgtccttcagctctcagggattactgtccttgctgtctggtgtcaggtgccttctggcttttctttgttttagtaggagcaattatccagtctctgctactccatcttagccagaaacagaagtctgccttttaattttagtagatagttgcaaatattttagaacaaatattaattggaaaagacataaatatttttaactttttatttctccacttagtttgatttttatggaattgtattctaatccttttcactttgaatatagttacactcactttaagaattatttagatcattactgacaataccacagggattatgtgaacactttgattataaacacaattggtgaatttgttgagagaaaagaaaaaaatcttgtggaataaagatacagtcatatgatttatgaatatctttgttttaattattgttcattcaatgattgtcagttcattgcaagatccagacataagcaatagtctagtcatctttttatattttacccattttgagtcttaacagactgtagcttaatagagattatttaattttgtcgctaagaatatgtttctggtgaacacaatgacagaacatattttatttatcagtgtattcgcttgacttctatcagtgttagacacttattatatgggtctctgtcagtttgggctgtgctcacaagataccatagactttaaaaacagggacttataaaaacagaaattgatttctcacagttacggaggctggaagtccaagatctgggtgtcagcatggtcgggatcaggtgaggtccctcttctgagttgctgacagccaatctcttattatatcctcacacgggaagggagagagaaaaagagagagagagtgagagagagagagagagagtgctgtggggtaaccttttataagcattttaatccttttttataatgggattagaatggtactaatcccattaatgatggctctagccttatgacctattcgcctcccaaaggtcccatctcataataaatcaccttgaaagttaggaattcagcatatgaatttaaggtgacacagacattcagtcatttgcagtctctatttgggcttgtgcttggtccaggcacagaagtgaggagcagtgcagcctctaaacttgtccacctaggccaaaactctattacttttggcatcagttctgaatcattcattactctttctccaaacctgagcagctaccttgcttcttgaagacaagtgtaatggttacttctattaatggcttaaaggcctccgtgattcttactttcatctgcttggatctctccataccccctgttttattctctagattgttgtttgtctctgatcatcactattccactccctggaactccccaccaccaccagccgccagtataacatggaacatccattaaccatcttccacttccattgcctaggcaaatatccttctctttgcagtaggggctaccttccaatattctgctatcttgcacaaaagtactacactctagactaggcactattattttattgaaaaccctacccataaaggatcagtattaataagataagctaaaatataaatagatcaacctagcattgtatgagcaaataaaacatgaaaacgttaaaataatcaaaattctgtaagaaaccatttcaattcagttccttcttcagtattccctatctcagtgtatctgcatttatcatggtatctgcatttatcaagacttaaacattggaattctctttacctctacttttatctgacctgagtcacctttgaatagtcttatcagtgggaccctcagttgtggtaacaaaatattttttgaatctctccatcttctctcctattccactgttatctccaagtcaacacaatttttacgcagcttttttcacacagggttattattctagtcttcaaactgtttttattaatttttctcttgttctcctataatatactttaaacagaatcagagtacagccaccaggtagcatacaggacaaccagttaaattgaaagacagaagaaaaataatatgtttttagtaaaagtatgccccaaatattgaccgggataaattgtgctatttttatttgctttagaaacatttgccgtagcaaataaaaaaactggcaatactgaaccagaatgatatgtctttattttaacagaaaacagattatgctatgcacttgttgaaaaatcctttagtcttctcattaaacttagaatcaaattactctgaccttgaaaaccctacatgatacgatctccaaatctatctcctgccattctccactcaaccactcctcttcaagcaggtctttctcattcctgaaattgcctggtctgttcttgctctaggacatctgaatttgcagttcccctatccctgccatgcccctcttttctaagaatgccatatgactgccttatttttcataatgcaggcctcagttcaaggatcacctcaccagaaagatactccaggggtcatgcttcccttgtgactctacacccttctttttagcacctatcgcaatctaaattacagttttaatttgtttgagatattatttacccttactcaaaactttattttgcttttattacccatctacattctcaccctgatcccaagcaccacagaaatgtgggtcttgtcattctggttctttgctgtatcttccatcccctttccttatcctcaggacacacatcattgtctgacccaaagggcacccaccgtcaatttggatgaatgataaattatattgagttcctaatcagaatctaaatacaaagggagtgtggtgaggtggacagaagaggataaaactaagagaaaaaaacatgcagacagaaatacctggaatcagatgtggaggcagtgataaaagattccaataaatgtgaaactacagttctggccaccaaaaccaagtctcagacaaagtaaatgagaagtctggatagtcagcagtcattttcaatgacttcaatgaatttcaatgaattcacgtacattgaaaaaaattgaaaataatgagacaaataatatctaatagtgtcagacttcccatggaaaaccaagattcacactgcaatgacttttcttcctattcccaaagggtgctttctatgacataaggaaacacagctccctctaatctctgtagccaggcttgtgagtggagtgaagtgaatggtctgagtggagtggatgctgagagacattttatagcctctcctcttatagacacaggacattgaaagggttggctagagagggtagaaaagtaagcatactcttccttctatttataaatagaagtaaggaatgaataagatggcactgtggaggaaaggtgttaaatagggcaatgatgaagacaaatgaatagatgcatttgaaaatgaactcactggatagtctcttgagatctgctatatatagttgctttccttccccaagattgcatataatgtttatttaataagtacaaaatacatgtttactggatgatgaggaaactgaaacgttgatgtctgtttgtgcaaaggattattgtgttttggaggaagaaatagagagggccaggatatcatagcttgatagaagccccccaacccacgccccctataaatctaacctgacagcagagctaagattactacaaattcccttcctaaggccttgtagaatcaattcagtggacctgatcacagtaggcctatttgtatgatggtgattactgtcaaagcgtaattttcaaaaaagttagaaagattcctgtcatacagatatggagtgaagacagcatttgaggaattggatattcttttcaaaagaatattaaaataagattgctacatttcacagatacaaaactgattaatgtcttataggtcaataaacccatagcctttggtgttatcatttctgcagaacaaaaatcaacaaggtaatgtgtaacttcacagagtctaaaatctatcaaaatagaaaataacaaagtcaaacacagagataaaataatccctggatgggcctgttaaatattgttccactttgacaaggaaaggctacactgttatttacttttacttgatttccaagtttttgaataattctcttaccctcaataccttttttatttgtatgacaagtcattttattcattattatttcataagaaaattgaagagttgggaatatcatgggagggggtcctgaggaaacttgtatgtaattcagagagattatttattagacccactgatcagtattccctaggagttgatgaaaaaatataattacttaattattaatttaaagattgttgccacagtggaaggggagaatatttgttagcatttatttatgtaaacatttttcttcatagttttaaatgcttgctaaacaactagaaattgtgagagcttgagctaaaagacaaccggttctaaaccagaatgtcagaattgtgtctcaatattttattccatgatagataaaatgatgaagtgatatccttaaagtcaggagcaaattttcctttgaatgaaacttctaaaaccttgataaaggtgatttttaaggcaaaaaaggtggttaatcagcctgtttattttagtgattaaaatctaattgaacactctacttgtccaacccaggttccatgcagcccaggatggctttgagtaaggcccaacacaaatttgtaatctttcttaaaacattatgagatttttttgtgtgactttttttagttcattagctatctttagtggtaatgtattttctgtgtagtctgagacaattcttcttccaatgtggcccaggaaagccacatgcttggatgcccctgctctacactttttcagttgttcttccctcatcttttaagtttcttacctcatcttttaagattcttaccaacaccttttaaggtgttgttggggctgagcttgaggccggcatacagaggtgaaattatgaaggggagagattggctcttattttcctgttgaatagcagaaatatagaagtgtatatggaaggtgacaagaaaggagtgaatccagcccagtaattcttgtgggatgagagtcatttgaaacataagggtgtctgtgacagtgtgtcttaactggtatctctaaaacaatactttgctgtaataatttaggatcaattatgtttaaatggttttagtcacaaaagttctgactttgtttatcacaaaataatagagcatttttacttaaatcattagtgttgaacaagctattataaaatttgaacaactgagaaaagaaataacttacaattgtttcttttttccttgttaacaacacaggcaagttgtgcaaaatgctccctaaaaataaaagtgcttatagaactttgtaactggagccctaataaaaatcctcaaagaggccgggcgtggtggctcacgcctgtaatcccagcactttgggaggccgaggtggacggattacctgaggttgggaatttgagaccagcctgacaaacatggagaaaccccatctctactaaagacacaaaatgagcttggcgtaggggcacatgcctgtaatcccagctacttgggaggctaaggcaggagaatcgcttgaacttgggaggtggaggtggttgcggttagccaagatcacgccattgcactccagtctgggcaacaagagtgaaactccatctcaaaaaaaaaaaggtcctaaaagaatacaagctttcccagcatttgcacctagaatcacagtgagccagtcctttccagactttattcctggggctccagtctaatcccatagggctgaggggacttttgcttttaagagaaaaggttttcatgtagattaaagatccaaattaaggtgtagcctccttcattaccccgttgttactggaaatgatagtggctcttgaagacataaaccagtcacattacatactaatttcatttatgtgatcattacttacctacgtattattgtacatgataatgttcatcaaagaaatacaggtttaagcagaacacactgtagtcccttcttttctctcagagtttatttccaatcacacgggggtaaaataataactaaacttgttttaatggtgatcagaaggctgaaatattaggaatgcacaacatgtgtagaaggatgaaaagggtggataacgttcagactggaaaagtgcaggtcaaagcagccatagaagctcctcatggcgttcggagcaaaaacagcaggaaaattcactaactcactcttctaactctgccgtagtatttcagtaactagacggacatcacaggaagggaaatagggaagctgggtttggacctttcatgatctttctgacattgacctaaacagtttaagccaaaacaaagaaggccctattatttgacagtccctggaatctgaacagtgcgtggaaaggaagaaagttgctgtgtcaaaaagtgagtttcttattacaataattcttcaagtggaatcataagaaacacttattaaggttgttactcaagggacatacctgtgttttgagaattaagctaaataagttttaagtcttttacctttggacatttatacttttaattttaaaatgtattatattttattatataaagaaaatgacacaaagtctagagaatgtcactaagtcttggacttagagtatccatagaacgaactttgtcaatgcacttttttctttctttgagagcgttaagaacaaataaggcttttgttttacttaattttgttattaagctattcctctaaacactggagtagctgggctattgccattctacattcttaaagactttaatttagtgtgtcacaatgtatcaagtatattacatgctttaagttatttaattatgacgaatctatagaatagatactaatagtagatactaatccttttgtgcatgaaaagaacaaggcatacagcacggaagtcatgtgaacaataacacatgagtaataaatgaagaagggggtgtgagtccacattgttgggtttcagaacctggcacttaggtcagacctacaccagctggtgctcagaggggagatgtattctttgatcaacccacgtttcctaacctctttgttctggtaacagcactgttcatccctatggaaatttttcttttccattccaagcgtatggtgtcagtgggggttcccttctcagtgccctatctccaggctactggtggtagatttttattcccatgccaccggccttggtatttgttctaagaagtggatgtgtgacccaggctgaaccaatacacttccttgaaattttatttaaagtagttacaagctagaagtttcttctctgagatatttaagcttgagtaatatgcttccaggactgtcactggacatagtctctgattctggagaaagccatctatggaagaaaatagcagatttaccaacaagtgaaagagactgagagaagcctcccgagttccatgttggagggttataggagtgtgctcatttgtacctctcttcctttgattccatgagatctaacaagttttttaccatacccttgctacacacaaatattttaaaggtaattataggacaagtgttaattatgctaaaacattttaatagctatttttaaagtattttgtagcaaaatatatgcatcagagtctccagttaatctcattttaaagagcacatattgatgaggtctgcagcttctaaaggccggcaaaaatgagcatggatggcagagtagttagttacctaattctcaacttcacatttataatgtagggttaatgatgcaaatgtaaaaacaaggctgtgaaacttgagtatatgtaaagcaccgaacagagtggcatatattcagcagactcaataaaaggaaactattattgtgaaatattatgttattaaatattttataataatcacggtcatttcttgagaccctttgtgtactaaggtctagaatattgtccataaagcactatctacctattgaatggatgttacattaattttggattataaaacctagaaaaaaactgttaagtaataaattaataaaaaatttaaattgaaaattccagaatgcacatttttaatgttattaaaaatggacacctttttctcacacattcagtttcattgtctcgcaccccatcgttttacttttcttccttcagaaaatgataaatgttggcaaatatttatgtcacaatgtgactagtgttcttctagaggtcagcataaattgctgtatagatttagatgaggaagcctatgattcttcctggtgaggtagaaatgtttatggaacaggccacattctcattgtgtcttttaggatgagatgtggcttcccaaataagtcaaaaggaagacagtactgagcagaggtaacatcataggcaaaagcacaatggtgtgagaggtcatggaatctgggagggatgtaaaaatatgatctagtggcaacttagggcacgtgacctggggagtctagaggagaatctagtaaaaacaatcaattgaaagaaaggatctttcccacctgcaggattttgatatcaactctctcatcagtgactggcattaaagatttataaagcagaagaaaagtgatcagattaaaaaaaatttgtgggcaacattcacaaaagaatggattccatgagaacagaaaaaaaaagaaaaagtctaagacataattttggaaagtttaaaagtgaatttggacaaaagtgatgtctgtaggactctgatataggtaactaacatgtgctgttgcaaggggatcctttgatctagaaaaatagatgggataaaaaaacagggaggagtggtggggtggggataacacacgctgaaaagtggcacttgacctaaaaatgttagataatttaagataaagaagttttaataataagaacaaaacgaaaaaataaaatggtggtgaaaaataactattagaaatagaaaaaagttatgtttaatttcttttttttttttgagatggagttttgctcttgttacccaagctgcagggcggtggcgggatctcggctcagtgcaacctctgcctcctggtttgaagtgattgcctcagcctccccagtagctgggattacaggcatgcaccactacgcctggctaatttttgtatttttagcagagacggggtttcgccacgttggccaggctggtctccaactcgtgacctcaggtgatccacctgcctcggcctcccaaagtgttgggattacaggtgtgagccaccatgcccggccagttatgtttaatttctttatcattatttagcggattgatgcttgtaactggatagtttgtttgtttgtttgtttgtttttactttaataaactatactttttagaacagttttggatttgtggaaaaataagaagattgaacagagaggagttcctatataacttgtatctagtttccctatcataggtatattttatacctacaatacatttatacctttaatacatttgatacaattaatgaatagatagtgttatattttatggattaaattccttactttattcagatttttaaaatttttacttaatgtttcagaatcttatctagtatataacattatgtttagtgatcatgtctccttaggcattccttagctgtgaaagtttctgagatattccttgactttgatgaccttgacaattgtgaggaggactagtcaaatgttttatagcttgcctctcaaatgatatttgtctaatgtttttcttgttgttagactttgcttatggattttgggaagaaaacaatgaggtaaaatgtgattctcgttgcactatatcaaagataaaaattagtaacattatttatcactggtgatattgaccttgatcaccttgttgaggtagtatttttcaagtttcttcattgtaaaatggatctatttccccccttttcatactatatccttagaattaagtcactttgcacaatctacaaataaggaatggcaaagtgaacttcaactcactgacaaattatatacataaattactaggatttttttttctgcataaaagtccagtgtattctctcccaattatgaattgattcaatcatttatttatgctaatatggactcatggatgtttatgttatattttggattacaatccaacgttattttgcttccttgttcaaattgatccagccatggtcactgagagctctttcagttaactctggccccactaacataactacaaatgatgtttttatttgttttgtatttttcagcacttccttgatttttggaactacaacattctcaaccctcacatgaagcctaacataagtacatactacagtaattccttacttaacatccttgaaagggtcttggatactgtagctttaagcaaaacaatatatagctggtccgtgaataatatcactttgttcaatgtaatttcgttacactactgttgagaaaaaaatgggttttgttatatattatttcccttaaagtcatgtttccaaaaatgtatttttgatgttaagtgaggaattactataccttcaattctaaatattaccacatggatgattctagcctgctctacttgttcatctgtaaactctcactccagcattgaaggtgattcccaccatccacaaaacctttatttaatgtttaatgttgttgtacatatggaagagtatcagaattgttaaccttacagttgtgaggaacaactttatcaattagactccaatgttatatacagtttctttcatcttcagtctaacagactccactgatttccaaagttacttaggtcagcaacttttgtctacctcttctgtaactaaggttaatacattttagatacattagatgtttttgtcaaattctgcatttcatcataggaaccccagtctcataaatagttttaattccattaaggttcgctttttgtgctataaatttctatggggtttgacaaatgcttaatgttatatatctaccattatggtatcatacagttttccaccctaaaatatccccgtacattgatggattctacttttcctcacttctaaaaaaatctcagtcaaacactgatccttttaccatcactgtagtttccctttattctgtgtccttgttttttgtttgtttgtttgtttgttttttcttgagatggagtttcactcttgttgctcaggctggagtgcaatggtgctatcttggctcactgcaacctccgtctcccaggttcaaacgattctcctgcctcagcctcccaagtagctgggattacaggcatgtgccaccacgcccggctaattttgtatttttagtagagatggggtttctccatattgttcaggctggccttgaactcccaacctaaggtgatcctcccacctcggcctcccaatccttgtacttttttttttttttttttttgagacagagtctctctctgttgcccaggctggagtacagtggcatggtctcagctcactgcaacctccaactttattgatacataacaaatattcatattctttattcatttaaagtatacaattagtggtttttagtatattcataaatatgtgaaaacatcaccacagtcatctttagaacatttttatcaactcaaaaagaaaacccataacctagagctatcacatccttatgcccctactcccagctctaagcaaccactaatctacttctagtttctgtagagttctcttttctagactatcatgggaataaaatatgaagtcttttgtgactggcttaattcatttagcataatattttcaaggttcatgaatgttatagcaattattatagtaattcattctttttctatggctgaatgacattccatagtatgaatataccaaattttgtttatccgtttatccatttatctattgttaaactattgttaggctacttccatcttttggcaattatgaataaagttgtaatgcaaatagattttgtgtaagttgttgtgtgtacaaattttcatttttcttggacatgtacttagagtgaattgctgggttatataaactctatgtttaaatatttaaagaattgccaggctgttttccaaactatctgctccattttacatttctactaccagagtatgaggtaggattcatgagtactcatgaggttccaatttctttacatcattcttgttattatctgacatttaggtttcagccatccttgtgggtatgaattgatatgtcattgtgtttatttttgttatctttctatataattattggttatttttgtatatccttagagaaatatctattcaactcatttgcctattttaagtgtgttttttttttaaatttcattattgagttgtaagaattgtttatatattttagatacaagtttcttatcacatatatgatctgtaaatatttttctcccattctgtgagttgtctttttactttcttaatactgttctttgcaatacagaagctttaaattttgataatcaaatatatctatttttattctattactcatgttttggtgccatatcagagtccttttcaaaatctaacgtcatgaagatttatcacaatgtttaagagtttatagatttataaagaacaaatagttctttgatccatttttgttagttttgtacatggtatgaaataacagtccaattttattattttgcagatgggtattcagttgtcccagcaccatttgttaaaaacacttttcttttctcagtaaatcgtcttggtacttctgttgaaaatcaattggccatgggtgtatgtgtttatttctggactctcaattctattccattgatctatctgtttatttttgcgccagtactacatacaactgcctggattacgttgcctgtagtaagcattgaaattgcaaagtgtgaattctcctgcttcattcttctttctcaatattcttgtggttatcttgggtctcttgcaattccatatgaattccatagtcagattttccatttctacaaagaaaacagctttaattataatagcgactgcattgaatttgtagatcatttagggagtattgtcatcttaacaataataaatctgatacataaacatggtattttttcatttatgtggatctcttttagtttatctcagcaatgctttacactttacaagattacagagtatgttttatactctttttttgagacagagtcttgctctgtcaccaggctggagtacagtggtgcgatctcagctcactgcatcttctgcctcatgggttcaagcgattctcctgcctcagcctcccacatagctggaattacaggcacgcgccaccacacccggctaatttttttgtatctttagtagagacgggtttcaccatgttggccaggctggtctcaaacccctgacctcgtgatctgccctcctcggcctcccaaagtgctgggattacaggcatgagccactgcgcctggcccacgagaggaaatttgactcatcaataaaaaagagaatgtgcaacagtattgaggaatctcacaaacataatattgagtgaaataaaccagacacaaaagaacacacattttattgttaaatttacataaatttagattgcaaactaaactaaagtgttagaattcccagtgttaatcctggagtgtgcagatgattgaaataggaagcagattgaacccctggggtgctggtatgttgtgtttgttcatttgtttttaacctgagtgctgtttacatggatgtgttcagtatgtaaaaatttattcagctttaaatttgtctgtatatctgctatacttcaagaaaacattaaaaagcattttctgtcacaacataagagcataaaacaaaaataaatgcacagctatgttaatgttagggctatattatgttaattttagacaagaaaaagacttgagatgaaggcatcatataaattactataaagcaatatccggctagtgaacgaaactgacaaatacactatcaaattgggagctttcaacctctctctaaattattgaaaattcaaagtggttaaattttagttagaaaacagataacaaaaataacaaaattagcaatacttggattattaaaataatatagatagaacccttaagcctatgagacatttatgaaatttaaatacttgccaggcaataagactagtgaaaaacatttcaaatgggatactaataagtccataatgtaattaagccagatgtctattaaagataaaacacagaaaaaaatctccatattggagagggaaaaacatgcttcaagaaaagcttagatttaaaaagagattataatagaaaagtaaatgcctacttgcagctaaaccataatgaaaatagaatacaccaatagttgtggagctcatctaaagtgatacttacgaaaagcaacagcattaaatagtatatcagaaagagaaaaagtctatgaagtaaacataaatttttaaagtttcaaaaaataacagaacaaatcttaaaacagttgataataggagaaaatgaaaagtgctaataaaaaaactagtcaaaatagggaaatcaagaaaacaaaaacttctttaaaataaagattaataacatagacaaacctcttctaaaattgaaggagatgaaaatgaggaagaggaagtggaggaggaaaaagaggttaaaaataactaactactaagaatgaaaaatagcataggcttatcagatattaatactgcaatacgaaagcatatgccaatacatttgacaattttgacagaattgtcagataatgtcctatatccattaaaaaacagaattagtagctacaaattattgccttcagaaaacactaggatcaaatattttggagctgagttttgctaactttaaggaacaggttgttttaagattgtacgttcagcaactactcaagaggagtgttgtcagcaaggttgaagaatagaagatcccccactcatatgctcctaatagcagcaataatttccgagccattcatagacaaaactgcctttgtgggagctttgggattcaggaagaaggctgtgaaaccccaggaagtccaagagctagtagggctgttttgagaggggaggcccacgctcagatggcagattcaccaaaccagcttcagacctaaaaatagccctattcttttgtgtgtttgaataaagcttcattttccttggtcctgccaccaaaatcatcaatcaaggggaatgaggaggattcatgcccacttgtgcctcaagtgacaggccttctgattttggtcccaactgtggatcctgatataaccctgagactctgctcccacccttctccactgctgtctaagagcagttcttcctgtacagagacccaaaggaagatgtgccatctgagtccctggtacaggcttgccaacctcagtcccacagcacaccctgaaatggccatgagaatcagtttctgcccctctcagctgtgatctgagagcagtgctacccccaaaagacctggaaggggacttgcttgtctgtgcccccagaggtgggcctacagacctcagtcttggctatgggccctgatgcagccctgtgactcagttccatccactctcagctcgggttaaggaccagtatggcctgcccatggaaatagaagcacttccagccctcctaaggacctggagaaagccacacctatgtgttcactagataacagtcccatcatctgccgactctgaagcataccgtcatcctaccagctgccctactgatcaagatgcagagagcagtttagtccacctgaggagcaaagaagagccacgactactagaacccctggttacaggcacattattttggactacactgtgatcccagcagcagtcacataattcggctctaacctcattcaacctttatccccaggtaaatctatcagcctagggatctaacagaagaaggtttttacctgctgcaattaagctgtaaatattgtaagtagtgttttttccttcaaatgcacagatatcaatacaagactacactgataacaggcaaacatgacaccacacacatacacacacacacacacacacacacacacacacacacacacacacaaactaataaagttccagtaactgacgccaagaaataaaggtctacaaattgcctgaataagaactcaaaacaattatcgtaaagaaactcaataaaattcaagaaaaaaatacatataaacaactaaaccaaactacaaaaactacatgaacaaaatgagaaatttaataaagaaatgaaaaccatttaaaagaaccaaacaaaaatgctagagctgtgtgtaaacaaatatagaacttcaacagcagactaaattatgcggaaggaagaattagtgaactagaagacaagttatttgaaatcagcaatgtagaggaagaaaaagaaaaaaagaacgaaaaagagcgaagaaagcttaagggacctatggaataccatcaagtgtgtaaatgtaagaattattggagtccaaaaaggaaaaagaggaagaaaagcggaggaagagagcttatttgaagtaatactaactgaacacttcccaaatattgggagcaatgtggacatccagattcatgaagataaaaggatccaagcaagatcaacccaaaggagaattgtctgatacacattgtcattacattgttagatgtcgaagacaaccataatgtcttgaaaacagcaagagaaaagagactcatcatactcaagggaacttccataaggctgtcagtaaacttctcaacagatatcttgatatcctagcaggaatagactgatatataaaaagtgctaaaacaagcaaagaaaacctgacaattaaaaatattctacctatcaaagctgtccttcagcaatgaaagagagatagacattcccagacagacaaacaaaaactgagggagataaatatataataaaattcagaatactttaatactgtaattgtgatgtgctattcatttttaactgatatggaagttaaatgacaaaagtgataaaaataactataactacaataatttgttaataaatacaaaaaatacaagatgtaaagtgtaatatcaatagcatgtgtactatcaatagcataaaataaaagttttgtatgcaatcaaatttactttgttatcagcttaaaatagagagttataaccataagttgttttatgtaagcccccctatgatatgaaaaagacaaaataactagtagatagacaaaagataaagagaggaagaaaattaaaacacatcactacaaaaatctaaacgtcaaaaagaaagacagcaagattgaaagaaagtaacaaagaaactacagaacatttaataaacaattaacaaaatgtaaatactaagtcattacatcaataattaatttaaatgtaaatggattaaattatctaatctaaaaccacaaggcatccaaatagatagtaaacaagatcaaacaatatgctggctacaaaagaaacactctagccttaacaacctacacagatcaaaagtaaagttatgaaaaaaccatattccatacatttgacaaccagaagagatcagggatggctatacttctatcaagaaaattagattttcagttgatactctcacaagagacaaagaatgtcactatatgatgataaaggggtcaacttataaagaaaatatagcaattgtaaatatacctatatacacccaacattagagtacctaaatatataaatcaaatagtaacagaacttaaaagagaaacagataggggactttaatatcccattttaacaattgatatatcatgaagagagaaaatcaacacaaaaacagctgactaaagtgacattatagcccaaatacacttaaaagtcatatacagaatattatatctgacagcagcagaatatatattctcctaaagtgtcacagaatattctccagaatagatcacatattgggtctcaaataaaagttgtaaaaaatttaagagatggaaactacctcaagtatagtttctgaccacaataatacaatactagaaatcaatatagaaggaattttggaaatctcagaaatatgtgtaaagtaaatagcacagtttttaacaaccaataggtaaaagaataaatcaaaagagctatcaaaatatatcttcagacagacaaaaataaaaacatcataccaaaattgatgtgatgcagcaaaggcaataccgcaagggaaatgtaaaacgataaaggcttatatcaataaaaaagaataatctcaaattaacaacctaaatttataacttaaaaagtagaaaaataaaaacaaactaagcacaaagtcaacagaagaacgacaataataaaaattagagcaaaaataaatcaaatggaggctagaatgacaatggaaaagactaatgggatgaaatagcttttcttgaaaaggttaaaaaatgaacaacactttagttatactaaccaacaaaaaagagtcagactcaaataaaattataagtaaaaaagagacattacaactgatattacagaaaaacaaaggatcataagagactgctgtgaagaattatttgccaacaaactagattatctagaagaaatggataagtttctagaaatatacaacttaccaagactaaatcatgaagaaatagaaaatctgggtggaataataactagtaaggaaattgaatcaataataaaaaacctcccaacaaagaaaatcctagaaacagagagcttctcagctgaagtctagctaaaattttaaaaataattcacttcaatccttctcaaactcttccaaaaaattgaagaggtagaaatgctttcaaactcattttattatcctcttacaatatccagacatgtataatacaaaataaggaaattagaagccaatatctacgatgaacacagatgcaaaaaactcaagaaaatatgaaattcagtagctcacttaaaatattactcatgatgatcaagtgggatttatccctgaaatgcaaggttatttcaacatacaaatcaataaatgtgatatatcacattaacagactgaatgataaaaatcatataatcatctcaatagatgcagaaaaatcatttgtaaaaattaaacattcttttctgattacaactgtcagcaaatatgatagagaagaatttgtctcaacataataatggacacatattacaaggccacagctagcatcatacttcatgattaaagctgaaagttttccctttaagattaggaagaaggcaaggaaattcactctcacagcttctattcaactggtattggaagccctagcttgaaagattaggcaagaaatagaaataaaaggtatccaaataggaagacaaagttaaactgtctctgaagatgcaataatcttatatagggaaaaccctaaagactccaccaaaaaactgtcagaattaacgacaaagttcagtaaaatttcagaatgcaaaatcagcgtacaaaaatcagttgcatttctttacattaacagtagattattcaaaaaataaattaataaaacaatccaatttatgatagtattgaaaattatgaaatatttaaaaatgaatttaactaaggaagtgaaaaaactgtacttaaaactagaaaatattgacaaaataaattgaagaaacaaataaataactagatcccatgtacatgaattagattaagaatgttaaaatatccataattcttaatttatagattcaatgaagttgctatcaaaattccaatgacatttttcacagaaatagaaaaaaataacaaaatttgtattggaccccaaacagtcaaagcaattttaagaaaatataacaaagtcagtgggatgacacgccctaatttcaaactatactgcaaaactatagtaatcaaaacagcgtggtacaggcataagggcagacatatagacaaatgaaacagaatacagaacccggaaataaacccatgcatatatagtaaactaatctttgaaaatgatgctacaaatacacaatgaagaaagcctcttcaataaatatttttgaaaaatggatgttcatgtggaaaagaataaatttagacccttttcttaaaccatatataaacgttaacctgaaatggattaaagacttaaatgtcagatcagaaattgtgaaattttcagggaaaatataggaaagaagttctttgccattggtcttggtaataatattttagtatatgacaccaatagcacaggaaacaatagcaaaaataaacaagttagttacttccaagatacaactgggttacaggcattggataaatgcttctattccacctgggagaaattggccaaaacaaaggctctacagggcccatgcaagtccgaaacccagaaggcagtcattaaatcttaaagctcaaaaataatctcctctgattccatgtctcacatccagggcacgttgatgcaagaggtaggctcccaaggcctttggcagctctgcctctgtggctgtacagggtacagcacccacagctgtttcatgggttggtgttgagtgcttgcagcttttccaggtgcatggtgcaagctgttggtggacctactattctggggtctggagaacagtgtccctcttctcacagctccactaggcaatgccccaggggggactatgtttggggtctccaaccccacatttcccctctgcactgccctagtagagggtctccaagagggttccacctctgccgcagacttctgcctggacatccaggtctttccatacatcctctgaaatccaagcataggtttccaagcctcaactcttgccttctgtgcacctgcaggcccaatacaacatggaagctgtcagagctttgggcttgcaccttctgaagcaatggcctgagctatataccttggccccctttagccatggatggagctggagcaactgggacacagtgtgccatgttccaaggctgcaaagagaagcagggacctgggcccggcctgcgaaaccattgttccctcctaggcctccaggcctgttatgggagagggtgctgcaaagatctcggaaatgccctggagacattttccccattgtcatggctattaacgtttagctcctcatttacttatgcaagtttctgcaggaggcttgaatttcttttcagaaaatgggtttttcttttctgaaacatactcaggctacaaactttccaaacttttatgctctgcttcccttttaaacataagttccaatttcagacatctctctgtgaatgcatatgactgtatgctgttatgagcagccagggcacattttgaatgctttgctgctcaaagatttcttccaccagacaccctaaatcatctctctcaagttcaaagttgcacagattcctggggcaggggcacaaggccaccaatctctttgctaaagcatagcaagagtgacccttactccagttctcagtaaattcctcatctccatctgaaaccacatcagcctggactttattgtccttatcaccattagcatttggtcacaatcattcaacaagtccctgggaagtttcaaactttcccacatctttctgtctttttcagagccctccaaacccttctaacctctgcccattacccagtttcacagtttcttttcacattttcaggtgtctttatagcagtgccacactcccctggtaccaattttctgtgttagtccatttttacactgctgtaaagaactacctgagactgggtaatttgtgaagaaaaatttaattcactgacagttccacaggctttccaggaaacatgactgtgaggcctcacaaaactttcaatcatggtggaaggtgaggagaggcaaggatcttcttcatatggcatcaggagagagagagagtgaagcaagaactgccacacagttttaagccatcagatcttgtgagaactcactcactatcaggagaacagcaaggctgaagtctgtccccataatccaatcacctcacacttggcccctcctccaatttgacatgagattttggcagggacacaaatccaaagcgtgtcagtcttggtaataactttttttgtatatgacaccaaaagcacaggaaacaaaagcaaaagtaaacaagtagggttacattaaactacaaagcttttatagagctaaagaaacaaacaaaattaaaaggccacctaagatatgcgagaaaatatttgcaaaccatatatctgacaagggattaatatccgaaatacatatggaactcacacaactttgtaacaaaataataataataatattttaaaatgagcaaaggtcctgaatagacagcttcccaaagaaagcaaataaatgatctggtatatgaaaaaggtactaaatatcgctaatcattaagaatatgcaaatcaaacaaaatatcacttcatacttgtcatgcttgttaggatggctattatccaaatgaaaaaaggataagtgttagcaaaagtgtggataaaagggatccttgtacacttctggtagtaatgtaaattggtacatccattatgaaacagtatagggtctgctgacaatttttaaaataggactaccatatgatcaagcaataaaaaagaaatgaaatatgtacattgaaaaggtgtgatatagttttgctctgtgtccccacccaaatttcatcttgtagctcccataattcccacatgttgtgagagggacctggtggaagatgattgaattatgagggcaggtttttcccatgttgttctcatgatagtgaataggtctcaggagatctcatggttttaaaagcaccagttgcccagcacaagctctctctttccctgctggcatccacgtaagatgtaacttgctcctccttgcctaccatcatgattgtgaggcctccccagcctcaaggaactgtgagtccaattaaacttctttcttttgtacattgcccagtctcaggtatgtctttataagcagcatgaaaatgaactaatacaaggagtctgcaccctcatgttcattgtagcattgttcacaataatcaaaatatgaaaacaagcaaagtggccatcagtggatgagtgaagaaagaaaatgcaatctatatgtatgtatgcacgcacacacacacacacacacagagagagaaaaagagagagagagaggagagagaggagagagagagagaaagggagatacaatggaatattattcagccataaaagaaatctggttatctgtgacaacataggtgaaactagaggacgttacacctagtgaaatatgacagacacagaaatacaaatataacatggtctcacttatttgtggtatctaaaaaagttaaacttatagaagcagaagtagaacaatagcttccaggggctgaggggtagggggaatggagagatgttgatcaaaggcacaacattttacttatacaatgaattagttctagggatataatgtccagtatgggtggtgatggatgtgttaattaatttgattgtgatattcaatatactatatatatatatgtgtgtgtgtgtgtgtgtgtatatcaaagcattgcattgtatactttgaatatatacaatactatttgtaaattaaatatttttacaaatgtttgcaaaaatattttaaaaatatatttaatatatttaataaatatattaaatctataatatatttacacatattaaatcagtacattaaatccagatgaggatagagaagtgaaaattatataattaatactatttacatccctgcagttttcaaattacataaaggaacataaattctcatataaggtccgaatagagattaatataaatagtagcttccactagaaagtgggatttgaggattacattaagagaatgatgcgctccaagaggctccacattcttatagtagtacttgtggggttttgagcacacaaagtatatcagcaaaatgtgtgccattgcttaaatagaaatatctgacatatgaaatagaactctttagactttgtaacacatctgtcaaatcatcttatttgttgttaaagattttctttggttctataaaagaacaggaagggaaatgtcactgtagcttttgagagagggaaagagaaagagagagagggggagaaaagtcttacatgagatcaattgccaatataaccattcagagacatttatcgtgtaaaaggtggatttgtattgatttcctattaaagctgtgaaagtatgattcaatttttaatgatactatgaattatgtattgctgtcaggctctttttaggtgatcatattgaaacaaaatagaggcattttaaagcattcaacataacatctcacttctccaagatgaaattatttattttgaagttactgcaatgatatgtttttatttttcatttttagacttcattttttcatgaatcctttcaagtttatgtcttgagattactacatcaaaatccagcaatcataccaagaaatgatgaggagtcaagtcagtacaaattagtggaaaagcagattttatacattttaaaggaaatacattgttctggtttggagccaaagtaaagctatcctcatgtcatttgttttgatgattttgaaaaatggtgagacttctaggtcaggtaatagaaacagatttctgccagttacgcttacataggtatttaggttttctcatagatgggttagagtttcacttcctgctgtttgtatagtactcagttctgcgcttgacttcagcaatcagcagatagcacctttttttttttaactcctttagccaggaaaataccaggacttgtaaaagcagaaagggaagttataattctagataatactcgtaagatattctactaaaagtagattgtcaaaaagaacagttcatttcattttggacaggctcatacaagtgcttgcctgaaggtctgccataagacgtgtgctgaattttatactctggaagtccatctcatgaatacccacaaaacagatttatgttactttaagctctctcatcactgaccagcaggatagataaaaacacacaacagtgattgatgtgtcccaaaccttcttggtaggtaaaaaataagtgaaacgcaaaaatcagacagaaaagtcagaccgttttctttgaatgcttgtgctcaatagagtaggaaggagaaaagttgcatttgaaaattatttatattaatgcaagtgaaaaacgcctcagacctgaggacttatttaacactctacataaagttattttttcctgaatcccaaactgaatgttttctttttatcttgtacgcaccatatgcttgagaaaaagaaaaagctacttgattacactagactttgtattacagcttacaattgaaaaaaaaataaagttatgtcattcatttaatttaaaataaaattatgtagtaccaactaaacagcaggcactattggctgtagagtttaaaatctaatgaaaggcatagacagttaagaaggtgatttcaatcaagtgtgataaacactttgacggagtaagtcatgagggcataacagcagggctttggtttagtcattatggaagaagttttgaggaagtgggatgagcaaatagaggtacctccaagttccttacaatggagacacatcaatggtgcctgcagaaggcaggccatgccaggaaccagcagctcaactagggccagaggaagtggtgcaggcagagcaggtcctgtcacactgagtctctgagtctctgaactgggcttgggattgagactgaggactaccatgtaccatttaaagaagggagaacaggacatttacaacctagaaatttcactctggctgagatttggaaaatgaattagaagaggctgggagggtggttaagagccgtgggtatggaagagccagatgttgagtgcatgtaatggacgaatcaactctggcaacgagcagctgcctgagccccctggggacacaagggacaatgatgagagggtctgtgcctgctgtgcctacgtgatcatcattttgaacttcagggactgagaaaagctcacctattaaaattgtgtgtgtgtgtgtgtgtgtatttgtgtgtgtatacacatatcctaaatactctcatttaatctttgcacgttctatgcatggaacaaaatatcacatgggccccacacataactacaaatattaagtatcaatgaaaaatactttaacaaaaaatgattttataatttttggatttttataagtctattcaaaattaaattatcatcaaatgttcttttccaatcatagtattatatattaaatggaattttggcttttttaacttttattttaagttcgggtgtacacgtgcaggttgttatacaggtaaatttgtgtcatgggtgtttgttgtacagattattttatcacccaggtagtaagcctagtacccattagttattttttctgatcctctccctcctgccagcctccactctctgatgagccccagtatgtgttgtgcccttctatgtgttcatgtgttgtcatcacttagcttccacttaaaagtgaaaacgcggtatttggttttctgttcctgcaataatttgctaaggataatggtcttcaactccattcatgtccctgcaaaggacacgatcttgttcttttttatggctacataacgttccatggtgtatctataccacattttctttagccagtctatcattgatggacatttaggttgactccatgtctttgctattgtgcatagtgctgcaatgagcatatgcatgcatgtgtctttataacagaatgatttacatccttcgggtatacacccagtaatgggattgctaggtcgaatggtatctctgcctttaggtctttgaggaatcaccacactgtcttccacaatggttgaactaatttacactcccactaacagtgtgtaagcattcctttttctccacaacctcaccagcatctgttatttattgactttttaataatagccattctgactgctgtaagatgatatctcatttttgttttcttttgcatttctctaatgattagtgatattgagtatttttatatgattattggccacatgtgtgtcttcttttgaaaagtgcctattcatgtcctttgcccactttttatggatttgtttgtatttttcttgtaaatataacttccatatagatgctggacataagacctttgttggatgcatagcttgcaaagattttctccctttccgtaggttgtctgttcactccaatgatcatttgtattgctgtgcagaagctctttagtttaattagatcccatttgtcaattttacttttttgcaattgcattggcatcttcctcatgaaatctttactcatgcctatgtcttgaatggtattgcctagattgtattccagggattttatagttttggttttaaatttaagtctttaatccatcttgagttaatttttgtattttgtctaaggaaggggtccagtttcaaacttctttatgtggctagccagcatattatatatgtactttgtcagtgtattataggcagaacatacatcaaacatcaaatatatagatgggtttttttggtatccaagtctagggttctgaagaagaaataacctttcttatctttgtgcattgccttgaatttaactctaagcccattttaatatttatgatctcagttgatatgattgctcctagttttattttatacagttccacattgcaatgtaatttcttgattaatcttgattccgtttcaggaaaggctgagaagagggttcttgggtaagtattttcagaaagagtatttcagagtttcaacatctctatccattcaggctcctgaattagcagtatggcctcacaccaacatgtacagaggtttttgtgtttgtttgttttttctggttctaatgggtgataattggtgaacaatcttttctctatggtggaacagttaagaatgaaaacaaatgttattcttttagctattttattagaagatatttgccatgatgataaaaaaggactccataaaatctatgagactaaacaccaggaaagcaaacacaggatgaccccgttacacacatttaaatcaaattccacttgtttgggaaaactcttgtaactaacataagtttgaatctagattgtatcactggatttataagcaaagctttctacatgtttatcatttaaaaacttggtaaatatctatttttcattcttcaatttgaacacaatctcatattatttgaaagtttgttaaaaaacaagacaggaagttaagaaatcagacagaactgtgtgtaaactttgcatttgttctctatttgctgagtaaaaccttctattacttagtctgtttgagctatttccacctttcttatcccgtcaaactcagttacatgcgagtatatcacaagctcatttcagacaggtacaatctgacaaatttctctctacatttttcagaaagctacttgagatacacttcccccaaaatcaggaattatacagagaaggaggcagacatgctaaagaacatgaaagtggaagattcaacataggagatgagaaaggaaatgtgaggggggataatgaaagaggaacatatgaagggaattgcaccaagcagagaggacaactggtccattgggagcagtgaaattcaaaagacaggctaagagttttcatcacaacctctgtcttggtgccatgtttttaacatggtagaactactggaggatacgcttcacccaaataatagagtaagccaaggaagggaagtcctggtatacaagaaataagcattcaacttaggatgatggtaaaggtagacaacagggcaacatgcctaggcaatgcaggggattaaagacctccagtagtaagacctgcaaagaaaatctggatttacagtttactgaactttattattttttagaaaatgacactgataatataataaaaactacaaaccaatctagtaaacacacaaaaatccaagcaaataaaaacaaacaagaggccaagcacagtggctcatgcttgtaatccagcactttaagaggccgaggtgacgggattacttgagcccaaaagtccaagaccagcctgggcaacatagtgagattctgtctctactaaacaaacaaacaaggaatcctaaatttcagaacaaactgaaaggagtaaatgtgatccttttatggcaaggtaataatttaaacaccatgaaccctaatgttgctttaaccccaaattttaacaagattataataagagaatgaggaacgtaaaagatacaggatagcaacataatagatgtaaatcctcatctatcataacaggaagcccatagtatctaaaattgatgagtccaatgatagcaatttattcacatgttgagaactatggaaactaaacaacgaaaagacacaaatgttttgttttggagagggagactggtcagggagggaagtgatgcagcagagagtcatttagttttaatccttttaatttactacttaactttttatgctattgtgtacatgttgctttgataaaatagaattcaattaaaataatattcatgatacaggttttaagcctcttaggtattatcaggctgacttctctaggtaacatccatctgtttcactaatgtccacttgtttccactttgacacttgtgtggaaatatgatcctcacacatagaacaggtctatactgtacattcaattatgctgctcagcaggtccaatcccacataaagattcagtagaaaacatataggatgaggcattattgacgaagtctatagagcaggaaattctgtcttttctctgcaaaaaaagaggctgcctagcaaccattatcctgcacactgaggagagactagactacaaatttatttccatttctctatgtattatgagattcaacttaacaaaaataaaaccttacatcccttattagtttggaatcattttagttctatcaaatctacctttcttatgaatcaacattatggaaaaattaaaaaaaatgtgtttaagaagaaacaagtgcattaaatttcctgcaatgtgcaaacattatttttctttctaactggttaaatagttttaaaataatatgtgcaaaacgaatgccaaacagtaagccgatgatgtaaagcattcacggtttgagagttggagatgagtgagttccattatgtttcattgcattattctttccacttgagtaaatgtactgtacccgatttggacttagtcatgctgtagtttgcctgtcagaaaatttgcatttctgtgatcaaaatgaaagttatgtttgagatttattggaaaagtgggtgtagaaaaggctttaagtgcttctgagatcatttctcttttatgatgatttgtaaagagctttggaaacaaggtgcaaagcttctaggagtgtcaggagcaaagctcctggtgggtgcaagatttgttctcaatcagtgcacactccattaactctttacccggaatgagtcacgagtgcttttctttggtataaaaatgaagggataacaagagcaagaatcttttattttcttctctctcaactttgggcatttaacaaccaataaaaatgcattaaacaattacatatctcccaatgcttttacttaagttataaagtcaatagcaatttatgtaggaaattaagcccctctcccctccagcagctgtagtaagagtgcagggaaaaaacactttatggtttgcctgtccaaagtctttggataggtatttttctgaagatgtctgacttcttttacaagagctgtggtgtgttttctagggttctgcagactcaacgtcacaattcctttcaatgaatccaaagaacagcaacagttcattctgtctctaaaaattacctggatttgggcaggagtgaattcctattttgcattaaaaaaatattctgtctcctatcattaccttcaaaattcatattgaaagcctattgtgaaaatgctgtaagacttcatataataccatgcactgtgtatgaactataaacagtaattgttaatgataacatgagctccaaaagtcccagttctttttctgggaacttgagggcaattgtgatgccagtacctttgatctgctatctaagaatcattatagcaaataagctgggaaaatgtggagatgcgatcttttgtcagagaaagaatataaaagcaacttctgtttcatgaaactggttgactgttcagaccacggtggaagtcgtccctctaggagggaggaaaatgaataccagctggaatatttaagattgccctagattttcatttccaataaggggataaaattactttccctttggcaggaacaacattttctaagctagttactgctgaaggttttgtccttccgagattccttcatgctttcgtgcagcaagcaacaggctccatattaaactgtgaccctcagtctaagaggaataaatgcacctcccctgcaacactgccttcttccccccatattctgctcacctcagtgaggatccacaataataaatcactctgtgctcaagactgccagggtgaacaatacatcataataattctcctaccgttcagaaagttctcaattcttagaagatttttaatcacagtggaaacacaagggtgttaatgaggtctataaattaagttaaagcagggtaattatgtcctatgttgcaataaaggctgggtggccaatattattaaggcaaattaaacactttctttgattgtgaagataaattgaataaaaatattactgtaaacaagggggtcttttgttatgtacacattaattatgaagtggaaactggaaatgctgcccaggctttacctgagcctatccatggctgagattcttgagatgcgtgagcagctgtgtgtggcacagggaggaaaggaggggcagcatttacaccagcgctgcaccccagaccgcagtctagcagaatacagtcacctcatctagctcagtcaccatgcctgcatctttttcagataagcatatttactttgtagatttcttatttgagattatgatgagcatgtgacacagatattctagcacgttaataaatgaagtaaagaaaaaagaaacaagaaaaggcttgaagatgctctctccccaagtaattatttaatcactttaaatattattatttactataaatatgatacaaatggtgaatatgacaaaatcttcccaatatctcatattttggatatattgataatatgctaatattgttctattgctttataccaatggcttccttgaataaaacaaccctacaaatcaagtactactattttcaacacagagaaatggagactgaggcagagattaattgcataacttgtcaaaattataactaatgctacagcatgcatttagattcaagcataaaacttttccattccaaagtctatattcataatcattgcaaaacatggcttatcaatcacttcccaccacgtgaaagaaagccccttactatactggagcaagagtaagcaacaagagagggaaagggaaagcctacaatctctgatgaaaactagaaattaaaaccacagaagttgtttaagtatcaagcaacaatatactgagaaacccagttagccaaacagggattggcaaagatttatttgtatgaaggacaaaagtgttagtattcttttttctatttctgcaatgcttttgaatacaatgtacagagaggcagtttggtaaggttagtaagaggaccaactaaacagtgccaggattccagtcctacttcccttttcacaactgtagggtgttgggcacactagtaatcttagtcttcccttcctcatatgtaaactggatacaactttgatactccacaggctggtgggaaatttcgattagttaatagatgtaaggcactgagaaggcggtgtacatatgtctgttatattagtattagatgttttaatttttaagaatcctacaagaactttttttttctggtagggctctgaagaatttcagtgcttttcctaaaattattttttttctttttctgtattttatttcattagaaatggtggaatgtccatatctccctctttttttggctataaatattaaagacaaatttgtgctcaatccatatgaggtgtgtgggctcatacttgagggccatctggcagcatttctcacaggaaaagagacagacatgacttatcctatgaatgagaggtgccccttcccttgtttactaatctcccgcatccatttggagtctgcacactgaactgaggagggtctatccgcatagagagtgacctacttctcccttctttcaatggcaattttcaaattaaatctcaagcatatcagatgagaagtatgcaattttgtacaggtctttttttctctacacttgtcccgttgtatttcctcatcaacctctcaacctctcatctatgctattgtattattcagcattctacagaaccagagaatataactagagatctatagaaagagatttattatgagcaattggctcacactcttatggagacagaaaagtcccactatccactgtctgcaagcaggagacccagaaaagtggatgttacagtgacagtccaagcccaaaagtctgaggaccagctgagctgacgttcaatgacaggggaagctggatagcccagatcaagcaaagaggaaatgtgcccttctccttgctttttgttttcttcagtccccaaaaggattgaatcatgcctgcccatgctggtgagggcaatcctcttcactctgtctactgattcaaattttcgttttttctggaaacactctcacagacacacccataaagtatgttttatcagctgtctgggcatcccttagcccagtcaagtggacacctaaaattagtcttcatagtctcccttgaatcaacatgagaatgtaagctacacgagggcaagggttatttctacttcgtttagtgctatatctccacatcctagaatggcttctcacatgtaggcttttaataatatttactaaattaatgaatgtttaatgatcatgtatttttacaacctcccttaaataattttggaaataagatgagatataaatatataaataagtaatatactgcattgcacataacagcaaatattctacatacttggcatgctcccccaattcctcccttatacacacatgcacctgtatatacctaggaactgttaactccaagtagaaaaataataattaggtcaaaactttatatctgggtattattaaggtattaatgagaagcctaaataatacaaattaataatatatttaaatcagcataaagtataagctttttaatgttttaagcttaatctatacatgagaaaattgaatgacatatacatttgatttccaaagaaaatgaaagtattcactatgttggctttgcttttagtgagtctcaggccatgcaaattaagagaaaataatctcttctctctctctgacagccaggttcatggagcttcaccgcccactggtcccataccacccactggtcccataccatgatgtagctactggggttgtgacaaatgtcttagaagatccaagttttaattagcacaattataaattgatgatttcaggtatttatgattttttcattcatattaatttttaagttcttatttcattttttccctatcagcgcttatggaaaaccaacatccaatctctctgtctgcccctcaggactggaatctggtgaggaggagtgaagacacggagagtccagcctgaagacatgaagcagaggcgtcaccaaggcaccctgttcctccagttgatagaaaacacattctgtgtttcttttatctgctttttcctgcccacatcctcacatactaactggtttgaatgcaaggggaaagagagaaaattacatctgaggtgtattttagtccatgctggggcaaggcagggatgcagaagtgtatttctctacttcatccttcatccagcagagttggacaaggattcttctggagtttaaggcaagaatcatcactgagatgtttttaattgtaacctttcttgcacttgccctaagatcatatatttcccctagataatgggtatagaggatgggtgggctagggctggactttggcttctgataatttgtgttctcttcaatttctgtaatctttatttcctggcctttcccagcattcttcttaagtactgatttgatattacccttaatattcactttttccatttgaatgcttttatttcttctgacaattttttattttataccaaatgtaaaagatgtaagaaatttaagagatctccaaatacaaatgatatcaattcctttccaagagcattatcgggttatgggtttacatgcattttacaaagtgtttggccaagttcattatattttcttgcataaaatcagtggggtagaaggcagtgtgtctggaagagcccaacaaggctctcccctttgctcttttgaattgggcaccttcattaagttccagggacatactgattagattagaggccatcattagagttttagattgcaatgcatgaaacaaattatgttggtatacagttacagtaaggcaggtttaacaagatgaatattaaatcttataaactatcttaaaggttaggtggtagccacatccacaattctatctcagtgtttaaaacaaattccaccagccgggcatggtggctcatgcctgtaatcccagcactttgtgaggccaaggtgggcggatcactaggtcaggagattgagaccaccctggctaacaaggtgaaatcccgtctctactaaaaaaatagaaaaattagccgggcgtggtggtgggcgcctgtagtcccagttactcaggaggctgaggcaggagaatggtgtgaaccccggaggcgggaggcggagtttgcagtgagccgagattgcgccacggcactccagcctgggcaacagagcgagactccgtatcaaaaaaaagaaaaaaaaaatccaccatttattatttatacagttttttgttttttggtttttttttttgagactggagtcttgcactgttacccaagctggagtgcagtggtgtgatctcagctcactgcaagctctgcctcctgggtatttacacagatttaagaggaagtatgaagaattatgaacccattatattgtctcaaaatactgggttaagaccctcacacaaaattatggcaatgaaatctgtactcgcattgactaatgtaatcagaaagtgctattcaaaacatggaaatggattatcaccctctactctgcctcagtcatacctttcctatggcatgcctatgttttctagtcaaaggccaccaggaacacacttgagggtgaataacttgagtttgttatttgttacagcaaaggaaaacacacaccgatgggagacgtagggaatttctgtaggaggatgatagcaagaacttattaactgtagtcactatgctgtccaatatatcactgaaacttatacctgtctatctgaaagtctgtaccctttgactaacatctccctttcccaacccaggccctcccagcctctggcaaccgctattctactctctacttctatgatttcaactcttttagattccacatgtaaatgacatcatgcagtatttgtatttctgtgcctgtcttattcctcttagcataatgtcctccaggttcacccatgttgtcaaaaatgatgggacttccttctcttttaaggctgaatagtattccatttagtatgtataccacatttttatccatttatttgttgatggaccctcagtttgcctcaatatcttgactgctgtgaataatgctgcagtaaacgtgagaaagcaggtatctcttttactgtatcataaagatcagggcaggtaggaaagttagacaccacttagtcaataaaactatgtcccaaattaatgccttcctcagattaccctctccctcacagttaattcctccattctcttcctttctgatgcatcttgaagaaatacccagtattacatattcccctgtgtcatcttaaattctgtatcaatccatctctcaagctaattgcaaaacccctcagggcatgtgcacaaggggtgtcatcccagcacctagtgcagtgtctgacacatggacaaacatgtctcctctttctaaattaaatgttttcttcatttattggtttttcttcctgaagccaaatgtatggatttatgtttatcattattaactattattaagatattgctctttacaacaaagtgtttatgtatttttaaatcccaccctatctaacataacagagtcatgatcaaattatcaactccaattgctttttgcaatttttcccttatacaagtggaaataaatacatcttcatagtgtaaatcaaagacaaccttaaagcaaacttcttaattttttcttgctagttgctattaatcatatcatcagaaatttttttaaattatttttcagctcacctatttttaagtgggttataagtctcttaaaataaactgaaagtctattttaccaaaaattaaaataacctatttctctggcagtacccttatattctgttaatactactctgggttttttaaaatgaggttttccttgtacaatttgctaagcagtactagctcctggaataaactgctatcatttctgtgtatctcaaagcctcatttcatagttcattctagtgagcatgagaatttgagccaaggcctttggccgttctttcccctccaactccaagcccagatacaattataatctccaaaactaggaaacaggaatactcatgggcaagaaacaaaaaagatttctcataaaggcatctggaccaagctgataaagtaaaaataataaaaaaggctaagctaagaattattgctcacttatgtgtgatgagtaatgtatttggaattttaaaaagattactgagctcttacttgtagtttctccttgtccaatggctgggaatacactgtttagtggcatctagacaagaccctgatattggaggggctgaggaactatgtaagatactgagagaaaaagaaagtaaattcctccagctgtgggaatctcctgcaatcaggagtagtggcttggggaagttgctggtgatactcagaaaaccacgaagacaccacagcccagccgtggtagtctgttccttgatggaaaagcctttttcttattatatgcagcagtatgtcaatggagatgagacacagccttactagactcttctcttggatgctgagcaaagcaaatgctgaatgaaacaaaaggtatacaaaacaaaagcagtaacctctagggtggctgtttcatccacagacaacctcactgacatgaagctagactgctggcactacccatgtttctttcttccctccaggttgcctggatgaggagtggggtatgtaaaagtttagcaaccagctttcaagtgagtgaagaccaacagcaatgggtaagttagtgaaaaatctgcaaggaaaaatctgcttaacctgttcatgggaaataaccccttgttagtcaaagatgtgaacacagaaatgaatagagaaataaacaaattaaatgtggagttatggaaagattttgcatcataaaaggggaaacgcttaaaatataatgtattaaactgaagcaaggtgttgctaacatttgcattattaaaccttaataaaattgcaggaaatacacataatcaatcaacatctccacaagtcctccaacctgttgggtaactccctgtatgataccataagagcctgagctctttctcacctcttcatagccccgggaatttgaggggcaaataaatttctcttgtaatttgcatagatgtttacataacttctaatatgtgacactgtaaacacactagaatttaatacttataaatgacctctaacattctaagatatgcaaacaaaattcaaaatttgggccaacagaggttgtttaagtagaatgttgtctttctgttgttatttatttattttactacaagattgactctagagatgctcttaattccaatattaatgattaataataaatttgcatttttaactgtaagatttcaacgtgtattacacccaaacacatatacacatgcctatacatgtgcacacacacaaacacacacacacacagtactcctagagggttcatatatcaaaaaatacaaaattaaaaaatcgaaaagaaacacaaaactaaaatatagacctaggtgatagaaaacaagactgaatttctctacaaaagacagacccataaaactaattttaaaaagacaggtgtatgctggttgtgaaagccacatgtaaaataaatgagcaaggataatgtaaaaaggtaaggtatgataaatcagggaaatgcaagagaaatgggaaagtggggaaaaatggaaaaaagattaatattatagttaaaccccaaacaaaaagcaagataaagaaaaactggagcgtatttagatagctaaaacttacattagacactgataatgtaagtgccataggtctttatgctacataagaagcatctgcattaatattttataaccaaacctctgtaagatcatcaaaaatggctgttcagcttttggtttcgtgcagaaaatgcattgatagcacaggtgggttgtggcctactgccagcaggcagaccccctctgctgtagctggcaggacataggcacttctctaccccactttgccaggggacctggggttgtaggagggcctgttgctgtcgatctggcatactgtccgtttcacttaattttttctgttctccccatgatcatgtcagctccatgatgataagattatttttgtctgttttctggcaaagtaaagaatgggccatgattatttactgagaatgaataaaagtgtgtgtttctccacaattctcttctctggtctgcccatcggacaccatccacatcagactaatcccatctaccttctggcacttgaagatagtgagcacatacacgaaaaagctctcccaccctcctttcattcaaaataaatactctgcttgtttattttaatagactttattttaaagatcagctttaggttcacagcaaaactgagtggaaggtacacagagtgtctatgcatctcctgccccacatacgggtagaatcacctgttatcaataccactttggtttcttcgtcatttggcatggatttgatttctgtccacagaatattctctatcttcttcttgtgcttcagtcagcattgacccaaatctgataacaaaacacagtagagacactgggaaatgcatgcaacaaatgcttaggtgtatggaatataagcttgattcatgcacattttatttagcaaagcatttaatgctttttaaaaaactattcaagatcatcaagtttaaaagtgaccgatgtagattatgagttgatctttgttttttctagcataatgctgtctcctgaaagctgtaagggtcctcatctctaatttttcgtgattcgtaaaacaaagattgtatcctccttcctcttagcttttaatatttcagctagaaaataacatggctcttattgtacacatgtgtctaccatcacataactagcatctgccttatcttcatataaaatagtaaactatcacttcagttcctctcctgcatgagcttttccattccatggagcctgagagtcctcctgtccctgattggcttcacttgccggatgcaagtcaagagacccttatagcaagtggatttttttactttaaaaatatatgagcacagaatatgtttagccaaatagaggaaagagacagatcaaccgtctcaacttgcagaagatgcaaaatgaacattcaccacactgatctcttattgcctctttcaggaattttatttgttggtagcctaaggcaatacacttgctgctgtttttattacttacttcaatcaacaacctgtttcactgcacattgtgtagatctcaaattgcaccccagatatggaaccatgaatgtaaccagtcccggatgcagcctccgcctccgggcagacctgttttgaggatgcctcgaatgaggtaatgcaggccctcaggaattgcttgtgttctcaaggttttcttgggaagtttcacatttttatatcagcttacagagtttttttggaagcactgggaacagttagacacagtgctgagctgagcatgttaacccccttacttttagaaataaataagcttaacactcagggaggtctctgtgcaatgttccacatgtctgcatcacatgttgcctgttattgccagacctgacaggtgggtcacagggctgcttcccatcaatttatacaaggtttaaagggatttttacataatgccaacacatgtagtttttattggatcaaaccctgatgattacatttgcaatttaattaaggcaggcttatttttagagtttgctttgaaagactggtaggaagagaggtatgttatttcctcttaccacacaggaaaaagcaacaaatcaaagtcattaagagaaggacagataggtaaatgattctagaattaaatatagcattgagtttcacttatattttcattgtttagggaaggacaacacagcctttttacccttcctttgctccctctcatgaataagttaggttttgatcgacaatagaaaactggggagagaggctgaacaggacactggatagcacagcaggctaagctgtgcttctttctgaaaaaaattttcctctcccctttaagaagcctggccctactgtccactctgactaagtgaaatctccttcttaaggagaagtatttacattcaaatgactttttaaaaattataaccactactctctataaaatacaagcctttgtctttttacaaaggctatttaacaaatcagagaaaagatttggacagagatattttctggcagtcttgaaattaaagcaattaggcagtggcctgttcttctaattaatggtggacatgactatttgggctggcctaagagaaaatcaattaaatgtccagtgaaggtgataatgaaatcgtttttctggattccttttacaggctctgcagtagagattcatcctccattttgactgcacacagtatcttttgaaaaccactcctgtattttcattttcctcacattatgagcacacctcctctctgagaaaagccaggaactacattttcagatgcttctcatcttggatgcctgatggtgagctggtctggccactcagatacaaatcactgtgacatttcagtacaaagtagaagggcatgaagaagaaggcatatcaggcaattgatcacttctatcacaggggtcagagggacttccttctctcagggcaaaggttggggagtttctggcagtagaatcagctgcttagcagagctggtgtgtaccctgttctgtgcccagcagtggctgcagtgatgtgtccatgtgggcagagcccttagagcaccactgctccacgatgacacagatgcagaagttgaaaggaaagctgagaaatctttagattttgagtaatttagtatcttcacaccatcctacgacatgactacttgaacaggacaccaactggcattttatcagactcacagggtgagcttcatgtggtgagagctgtaaacgagacatgttctatgtgggctgcgtatgtgggttctatgtgggcaggaccatgttcaatgtgggctgcattttcagataaactataatgaagaaatgtataaccatcccagaaaatgggtctttaatgaaagatagatgtttggaaaagaattgtttctacagagtgttgtaatatgttctatactttacctacaattacctgaattaggtgatgatattgatagtgtacaactgaaaaaggttattgctaggatatctaacaaaattggattaaatttttaaaacattttcatcaaaattgattaaatttttaaaaccttttcatcaaaaaatgcacttgaaatcaatttcttccattggaaaatattttaaagacaactataactttacagattaaattgaaattggctactgatgaaggactaaagttcaattttgaaactacagcattgtctcagtggtgaccaacttaataaatgaatattttgtgtttgccaaaattactctaaaatgtctttctttattctaatttacctctgtgagagacttttttctctagtatgattttcattaaaacagaatacagaaaccgtttatatataaattattcctcaagaggaagattgtcatcaaccaacctaaagtaattcatttaactagcaagaagcaagattattcatcacattaaaaacttaaatattgatatacatgatgttcattccagatgtgagtgcaggtgtttaatatgatgattgctagttccttcaaaactttttgtttaattatgattgtggaaaaacaaaaagttacaagtagagtaatgattctctaaattaatcactgatatgcacaacagcagtgaaaagatacgttttgaaattttttctgtgtgactgcattatatttattctgattatatttattgaaatgcaatatgtctgttggatctaataataaaagctttgaaattatatttttatgcttttcatattttgttttctacaaagtatttttattgtattttataaaagtatgggttcattactgatatatatgtatgccaatacatatttacatacatatataattttttggaaacatatctgtatatatgtcaccacagaaatgttgagaagccctgttctagagccctccaagaacataaatcacatatgcttcctggctagatggccccactcctgattctatgaccttctcggacatctataggttgccccatcatagcattgaatacattctctttctgctcaaagtggctagagggggctctgtgttttgtagccaaggcctcctcatggtcgctcctcattcactcctcattctttcttgcccctttcttaacctttctacacactgtggcctcagtaattattcccgttcaagtttgatcttgtcttctgttgaaacgtctttcaataacttcccattgctaataaaaaaaagaaaaacttcaatatatgacttacaagacaggaatggtgactttccttccttctttgtcactttccaacaacttcttctctttttttttttttttttttttttttttttgagacggagtctcgctctgtcacccaggctggagtgcagtggcggatctcggctcactgcaagctccacctcctgggttcacaccatcctcctgcctcagcctgctgagtggctgggactacaggcacccgccaacatgcctggctaattttgtttttgtatttttagtagagacggggtttcaccgtgttagccaggatggtctcgatctcttgacctcgtgatccaccctcctcagcctcccaaagtgctgggattacaggcgtgagccaccgcgtctgtccaacttcttttctatgttgcacctacattcgcctttttttgttttcagtttgtccaacagtccatactgctttccaccatagggctgcatttcctcaactgacagtgagcttccttttattcagtatttaaatcccattgttccttgagagctctgtcaaatccctttctttaaggaggcactctaaacagctgagtctggttcacaacttgtttcgagtttgtgtagtatcgcacatgtccatttcatattatttgaggaaagtagtttgtaaaaacacttgcatcttctaggacagcggtctcaaaactttttggcaccagaaaccagtttcatggaagacaattattccatggacagggggtcgaggttggttttgggaagaaactgttccacctcagatcatcaggcattaatgagattctcataatgagcatgcaacctagatccctcgcatgtgcaattcacaataggtttcacgctcctatgagaatctcatgctgccgctgatctgacaggaggtggacctcaggtggtaatgcttacttgctcaccactcacctcctgctgtgtggcatggttcctaacaggccacagaccagtactggtccacagcccaggggtgggagacccttgctctagagcaaaataacttacataattgatgcactgtattatccattgtgtccttagtgccaaatccagtgcaaatcacaaaaaagagcactcaaaagtctcagctgaattcccaaccacacacatgtactactgacataacagattgtcagcctctttgtatgtcaaagaatatatgttggaaaaatcatttttgaagtttacaaagtatttaattatacagatatactgagttaggagactacaaagacttgtgttctggccagaattctgccgacccaaacagggtctgttcccaaggacgaagtgaagatattagcaggaaccagaagatgcgcatgaaggctgccctcattactcattggtataagacactcccaccagtgccatgacaatttacaaatgccatggcaatgactgggaagttaccaccctttccctacaaaattctaaataaactgctcttcagtttgcattgacttgcaccttaatttgaatataattgaaagttggttaatgtgagtataaatacagtttccaagagcccataggctgatgactctgggcacactgcctatgagtttgtcctgctcctccatgcccttgaattccttcctaggggaagccaagaaccttcccaagctaagccccattttggggcttgcctgtcctgctataatgttataagttggcaaatttttaacatagttagttatttttaataatatagtcacccctagaaccactacctacaacaaaaactatggagcctattgtcccatccctctgacacatccatcagaggagatgatcatcttaaattccatgttaatcctcttcttcatttccataatttgatacatttttcccctttttttgctgaccttgatattgttaaggattactggtgagctatgttgtagaatgttcctagacttgggtttatctcgtcttctgttgaaacgtctttcaatatcttcccattgctaataaaaaaaaagaaaaacttcaatatatgacttacaagacaggaatggtgactttccttccttctttgtcactttccaacttcttttctttttctttctttctttttttttttttctcatgcttacactgggattctgcgtttagggaaggaagaccacaagcataaagtgccattcaagtgacatcacatcacatcacatcacatcacatcaaggctatgcactgtcaacatgactcaggccgggcgtcgtggctcatacctgtaatcctagcactttgagaggcagagatgggaggatcacctgaggtcaggagtttgacaccagcccagccaacatggtggaaccccatctctactaaaaatacaaaaaaattagccaggggtggtggtggacgcctgtaatcacagctacctgggaggctgaggcaggagaatcacctgaacccaggaggcagaggtttcagtgagccaagatcatgccattgcactccagcctgggtgatagagcaagactccatcttaggaaaacaaaacaaaaaagcatgactcatcatggttggtgtaaaactgatcacctggctgacatagtgattgtcagatttctccactatgaagtgattaacttccacctttccactctgtacggcagaaggaagttactgcacccaacacaaaattaagggatgatgaataatgcttcacctccttgaagggaaaatgtctacatatattatttagagtttttctgggctggtcatggtggctcagacccgtaatcccagcactttggaaggccaaggtaagtagatcacttgagcccaggagtttgaaagcagcctgggcaacatgataaaactgtagctctaccaaaaatataaaagttagccagccatggtggcttacacctgtagtcccagctacttgggaagctgaggtgggaggatcacctgagcccagaagtcgaggctacagtgagtcataattgcaccactgcactctagcttgtgtgacatagtgagaccttgtctcttaaaaactaaaataaaacaaaatcgagtttttctatatgagatttgtcttttatcattcacttactaatttagttaagcatttatttatatcaatatggacttgtggatttttatttatatacttagtgttataatccaatattacatacttttgttgctcaaactgttgcaggtgaaacctttttttcccaggctccgttattattccctcactgttatgtttgctttgtttcttttgggtacatccttatttccattgctacaaaatgcttcagaattactgtgtatgttccatgacccatatttaggatcagccatttcttcaggatctctctagttctttgactggagagggtatttagaaaccaatatctggatacagggtgtgcttattttcattgtttctaggatgtatcagccggcaacaaaaaaataaatttacacatacgaactcatgaatatgcacatatctataaatatttctatgtggatctatatatattaagttaaacatgagttcataatgatgtctctcactctaatccaatacctcattgatcattccattcttttccttttgattttatgtaagctttaactccatcagtgagaaacctggctcggattacctgccaattgtttacttatttttcaatttcattatacgagtgttagagttgttaatcaatatcccatgaaaaacaatttgatctactatactacagagtttatatttaacttattttgccactagttttacagtctctactcacttccagagttgcttgggtcagaaatcatgtctccatttctctcagtgaggttattttctacatttataatgcaatcagattattttgtcacaatctgaattctatcctagccttgctcaagctcctaaataattttctttaaatttcacacatcaatgtccattcatatgtgctataaagttctatgggttttgaaaaattcataatatcatatatttaccattttggtgtcacacagaacttcatcaccctaaaaaacaaaaatcaaaacaaaaattccttgcacttcagctattcatttttgcaaaccactggctatcactgatctctttctgtcattatagttttgcctttctcagaatgtcaaataaataaaatcatacaacatgtagtgttttcaagaatggcttctttcacttagaaacgtacatttaagattcatccatggtttttcatggctcgatagtttattcctttttatccttaaatgctatacattttcatagatgcaccatggttcatttattcattcatgtgttgaagggtgttttgattgcttcctatttttggcaattacaagtaaagtgctataagcatttgtatgcaggttcttgtgtaacccaaattaatcacatcagttagttaaatacaaaggagaagaaatagtgggtcttaaagtaagagtatgtttagctttgtaaaaactgcaaatctaaagtggcggaatcactttgcatgcctgccagtattaaacgagaattcctgtttttctgcaacttcaccagcaataggtattgtcagtttttttatttgaaccactgtaagatgtgtataatgatatctccttgttgctttaatttgcatttccttcaacataatgttgatcatcttaccatatgcttattttgtcacccatattttttatttagtgaagtatctgttcagaactttgtctatttttaattgaattatttcttgtcttgttcctaaaattttgagttgtaagttttcttctttatgtatatttggattaaatatgtattttgtgatgaatagtctttgtattgtcttaagagcatctttcacaggaaagtttttaatattaaaaaagcccaaattatctatattttctttaatgaattatgcttttagtgttgtatcttcttagcaaaattatttaggagcttgaacaaggctaggatagaatgcttttagtgttgtttttcttagcaaatccagtgttataaatattttatcccatgctttcatttagaagtcttatagtttttaattttacttttaggattataatcattttagttatttttgtgtgggatgtaaggtctgtgtctagttcagtttttgtacagaaacatgcaattgtctcagtatcatttgttaaaaaaagaatactttctgtattaaattagcatgctcttttgtcaaaaatcagtagaccatacctaattctgggattattcagtttgttgacctgtgtatctattcttttgccaataccaaactgttttgattagagtagctttaaagtaagtcttgaaataatagtaatatttaaaatagaaccacaaattgaaatatttatgcataaaatattaaccttttcattctgattatagcttctataaatacatcttttttttcaagacttgctttaaagctactctaatcaaaacagtgtggtattggaaaaataatagatacatagatcaatgtgacttctccaacttgattattctttgatatcattttgcctattctgtaccttttacctttcagaataaatttttaaatcagttagtcaatatcttcaaaatatcttgctggaattatgattgagattgcattgaatctataaatggaaaatggaaaaaattgacatgtcatcaatgttgacttttaaaatacttgaacattgaatatctcagcatttacacatattctttttgtatttattttatcagtgttttgtagttttccatacacagatcatttacaaatgagaaaaatagtatgtcctgtcaacagatgctgaaaaagcatttgacaacattcaacactcatttctgaaaaaaaaaatttaatagaaatagaaagaaactcaacacaataaaggatatatccttaaaacttacaagtaatatcataattattgtgtgaaactgacatttttctcctaagattgggaacaaggtgaagatgtcctttctcaccattcctattgaatatcaaaccagaagtgctatctagtgcaataaataagaaaatgcaatgaaaatatatacatataaaagagaaattagcaaaattttcgtgatttgaagaaaacatgattgtctagttagaaacctccaaagaatcaaacaaaatgtcctggtactaataagcaactatagcaaatcacgtgatacaaggttaatatgctttcctatatatcatcaaccaacacctgaaatgtagaattaaaaataataataataatattcaaatagaatgaaaaattgaagtatgcataaaactattaatctttccattctaattacagattccatatacatacacacacacatatatgcacacatatattttaaaatatctattaggtgcatgtataattctatatatttaaaattatatgactgtatgtgtgtgtatagatatagaaagacagaaggagacagaagtaaatttactaaatcatctagattttatgcttttaagggattatttatatcattctttagtattaaacagttttatgagtatgtattatttttattatccaagaaataataaagctattttctagttttaaaaaagtatgcttattactcctctgaaaacaaagataatactaaatgagcattatttgactcccccttttcctctacttcttatttttatgcattagttcttttcgtaattatattgaaaaccagaaaaataagcccaattctctgtttaattgcttccaatactcaccatctgtctttgaataactatttattaattcttgacatagtttgaggtgttaagaagactcagagagaatttagtagctctgagtttatgctggaacccgttatcaaataaacttctcttcttccaaagcaatcaagaacagtgtggacttgtgaaaatattctctaataaatcaaagaagaaatactatatatgcactcctgaagtaggacatatttttggggaaattattttttaaggaaaaaataaatttaattactatttgcagtgtgaatttaaattaattttatggaacagagaaagtgaaaaatgtgatgaaaagttgactttttaaagtgaaaagtaggtggctgagaaacaagagcagaatctgtttgcactagggaaacgggagcaagatcaatacgatgagaacgttatcaacaactggaagagatatgagacattcttaaaatttgaaagaagagtacagtggagctaaaacaatgaaaaacaagaaatatggaggaaaaatattaataactgaactccaaaagaagacgtgagaataataaaacagaatgaactaaggcaaaatagccccctttcttcctgaggcatggatttgcaaatagaaagcaagtgtctccagagcccccgagaaacttctctcttgtgggtatgtgtatatgtacacacaaaatactttcacttgtgcacaaaaatcctgcgaagtcatgtgctgttaaactgaacatttatttctgttagtcttaaaagaaaaaattaggatgaatagttgaatcaagtgataaaattttatcagtgaaacgagttttacataagtagtaaccactcaaagggaacttcagctgagtttgtttatgtaatgtagtttcccacgcttatcaaattagaaagaggagggttgacagagtgtgcttattggtgtgggagggatacaagaaaagcagtagagagtgggtgatctgttttttaggttcaattcaaatctgtttgatgattttttctttgtggcgtttacacaaaagcaagttccttctatcttcaaatgatttaaaaatttgaatcaaaaacccccagaaaaccaggaatatcaaagttgtttttgtcatctgtttatggtcctgatccattctgaagctgccacagaagaagtgaaggcattttcaatccacgtgacaacctttttaaggcctgtggtcaccttgcactcaaactgcacttatataaaacactctgggggtaaattagaggctaaacagtagagggcctagaaatttgtggaaagagtgtatgcctacaacaagattccagaaatgctgcacctccacctcccacatttttatgtgtgtcatgaaaatgaaaaaattaaaacttttttcatatgatttggtctcactggaaattgttagagtgagttcattggtgaatgtgtctttttgtgaaataatggccacatataacactctatttatgtatttatttattgtgttttggaatggaaaagttactatataccaaaacacagtaatatgaaaatggtataattcttcaatagctattgtgagaaaacattgtaaattacataatttttttttcaaaaaaaatctgatcttttatttacttatgtaatattaaatgtaaccacttaagatgaaatcaattctatcatgctaattcattgtttagattttaaatgggtttttttaagtcttttttgtttgttaatttgtttgttattttttgtttgaagaagcagggtcttgctctgtcaccaaggccagagtgcagcagtatgatcatggctcactgtaacttcaaacttctgggctcaagagattctcccatcccagcctcccaagcagctgggagtacaggcatgcaccaccatgcctggctaatttttaatttttttgtagagatggggtcttgctttgttgctgaggctggtctttaattcctgggcttgagccgtcctgtcacagcctcccaaatttctgggattacaggcatgagccaccacacctgcccaatttcaaatgtttatattttagttctgaaacttcctttagacataaacaacaaagttttggctatcacctctcttcctatcatcttcagatggaacagtgacacttcaagtctttgtagttcccaagatgacttcctaaggcactgcactgctttgtgcagatcctgagcaaaatacacattatatgatggaatcttcagccagttttcagctcaaatgcaagacaatgccctcctactataactttagtgctataaatgaatattttaaatgaatttaaacacccaagaggaagctgctattttcccacctttgtatatcataagtgtcaagaatatttgctttggggcccactttttcatttcgatatttagaaagagtcatgaagagaggattaagggagaatcagcactgatgtctaattaaaaccagaaatcatgtagtttggacagaaagcaggaaatggatacaggtggatgtcagaatattttagtaaattagagcaatcagcagtttttagaagtaggtttcacataccaagaaagatatgggcagcacaaatgactagagattgccagctgtgataagtctaattagcattgacacactcttgttaaaacatctgtgacatgtatattaaaaaaatataactgtgaaatacagagttctatggatctttaagtgattgtgtttcaagcagacaggtagcaatttaaaggcaatttgtgtaataataaatgataatacaataaaaatctatttaggagcatggattattccattttaaaaaagatcgattgatggataacaaagaaaattaaatagaaaataatagaaaatgtcactaactcaatagggcatgcatttttgatgttataataaaactcattcacatattttgtttaaattagggccaactgcttgattaactattcaccatgcatcatctacttaaagggttggggacctatgaacagtctctattacattgaagatgccattttttgtttctgaaatggaacactttcaacacattcaaaattgtaaaataaaaacagtaatgtgttgattaaggggaatcactttcgtatcccaaataaacactttcatagttaatttttcctttagaaaacaaaaacaacttcccataacaaaaaatagacattgtggtagctaaaattctcttaatatagaataattgtaatgattgtgtttgcacaggtaatacacatgaatttggaacaatgtttttcaattaaaaatataatcaattctgaattctaggtgggaaagcttggaagagagcagacaagtagtacagacttctggtttttacccttggaccaaatattaataaaggaatgctgagtttgaggggtgggtctttcccactcaaagattaggaacaagttgtattccatccatggagtcagatggggcccatggggcgtgtgtaggtaaggtggtcagtgagaaaccctcatagcgggtgttgactatagctagaacaaatcggaaggtcacccagtgttgggtctgggagagagacaggagcaagtatgaggaataggggcccatagggaccaatttagtggcgcattggagtgaaagggatggcccacgtgaaagcggcaaaaattacttccatgaagtataagccatcttccttttttagaatgcttctagaacccagccgccaatggtggagaggacttaatgaatcattgccctgaagaggaatggaagtaagttctacagtgacatctttgacttcacatcacttgacatagtgattgttgaggctgataaagatgattctacgttacctttcatcattttctgtccgtgttttctcaacaaatttctgattattggcttccaaaatagattttctagagaatatatttcagtcatcaatagtaatttcttataattatacattgctttgtatataatatgttgccattatagttgatgtctcagcctctgcttgtgggcactgatctacaatagacaatacacctggttgtaggggtataaagagtttattcaaggccgagatcaggccttgacttagtttgacgttaccaagccagctcaaatctgagaagacctgccaagagataaaccaattcagctgaacattcttaaattctgtatttcacaatccctaaaccaaaataaacaatcttgtatagattttcgtagcagtcaagatagtttctatttgaaatacagttctcagaaagattttaccgtgtgtaagaccatatattatctcattaatgatcttaaggcctttattgcaggacactaagccactcatctgaagaaattagttaatcaaaagatgatttatttaccaagctacagcatcccgacacacaggataactggatgtgcttttcctttatttaattctgttttcacttatcgagtacctgctctgggcagaaacctgggttagtcagtctgtggtaatgaaacataatttgccattaaacgaaggcacaaaaaaaacaagaagtggacagacctagaaactacagacttcatcagaaattaaaagtcatattttggtataacaaaaaaaaaactacctccctatccattatacactgcgcttattactgtggaaacattttattaatgtttgcaagaggcaagggtcatatgtaaaatagctaaaaacttgtaaggccagcaaatgatcagtcagaaggttaaaatttggatacctccgagctccctgccaggtgttcaagctttagttgctgggctagcgtgcgtgaagcgggtcctggactactggagtgtcagggtccctcaggcagaacctgttcaatattttaacagctgatacagctgaataacagcctggataatacctgatgcattgctttcctcatttttcaggtgaagaaacttggggcttaaagaggctaagttatttctctttggtcacagaactaaagtgttgaagctgaaatttgaataaaatactttctgattccaaagtctatgctcttaatctctcttccatatgtgttacaataagtgagcaaacactgctagttttgcttgggggaagaaatagccaagtctgactgaagatatttgaggacactgcagagagtctgggccttaaaggggtaatcagatttcagcccacatttaattcccagtgtaattgatagaagatatgtaggcacgctcatttcccagagatataatcattcaatgctttgggtgagtcatgtactcttatatttatgcctctcccatgattaaaagaaattctctttagtacttaatcctgaattagatattcctatgctcagtttctcaattttcaaggggcaattactttgttattttgatttaaacttcttcagtttgttagcctcaatccttataatatttagaagtagcttctaacatgctgaaatttctgaaaaagtgtcatatatgaatagatctcttttattaaatgagagaagattcctgatatccaactcagggatgaatgagcagggaggtgttggcctgattgatgaaccggattcacctctggatcccttctgtatatgagacacgaggcttcccgaatcctggctcttcccttcccagcctgtgcctctgtcagttactcacccttcctgagcacttttcattcgtgctccagcctacttgggggcctcatggccatcacgctcttgtaataatgaagttcctcctgttattaaaagatgttttatgtatatataatgtatgttttatgtatattaattaaatatacgtaaaaacgtcttttaataacagaaagcctgtagtgcttttagagctatgatacaagggcatgcaagggcagtaaacaaatctgtatctgacccagaagatgacaccatgtgttactggagagtgcttctgtggttgaattaaatgaagaagtgatgtcctctctctgttcaggagacctgaaaactggaatagagaagcttgtaagatgacttatttccagtgggatttctttatatgaagatatgtgagtctttcttgatcaggcactgtctgctgctgacatgtgggttggggccaggttgttctttgggccacattgttcttctctagatattgacaattatgtaaacctagggtgaggctaccagtgaccattccaacaccatcattgggcttcctggctatttctgcagactagctctactcataagtgaatttcattgattgctgttacccctggtccttccatccaaacttatggcgtataccaccgatatcctggtgttctcagcaacaaaactgatgggaggaatgtccattctgtgtgtactgagatgggcttggatgtgtgtgtggcaatacttagcgaatggaagaaagagttagtatgaaatgtattcagcaagaaatagtaaagaaatagatagcttacaaaaatccaaagtgtgcttggtaaatatgttgttgtcaaaactggtaaatatgttgatgcaaaaactaaatcttacttatctttgtaatccaggttcagtcgctgtccctagtatatagatatcattcaataattgtatactaaattaaactgatatatttgtgtaaatttgcagatagaagagaattatgccaacagagcaagaaaaactagagactagggagagataaaatgaatttggcagtgagagggtattaattaaatatggatgggcaagaaagaataagcaagctgcagataagaaaatcatggagcagtgaatgaaacaaattagaattagaattcctatgtatctagacatgcatgactttacttataccctccattcattgcactcagtgtctcgggcaggagtggagaaagaatggagctgtagaagcatgaatcaaaataaaaacataggggtatggtataattttttttgcacgtggcagtcccaaaatatgtacaaatatggcttctggagatttccaagtggatgttgcattattccttaaaatcaaaaatttaaagccctacattatgtactgtgcctcttctaacagactttctcaatcaccagaattacctctcttctagacatcatgagctaagcacgttatcaggaaaactgcatttgatcttcacagtagtcacagaattggaaatggctatgccatttcacagatggggcaagtgaagtttacagaggtttaagacgtgcagttttatccttggttccactggctcctaagccaatgattttaactgctgtgttaacaattgcttttctgatgtggtccaaagcaatttgcttgtacctgtatcttagtatatacatttgggtttgcttgagttgtcaattatttacacagttctgtgtccttttcttgcaagattcctgagggcttaaaaaatagcagggttgggggtggttatatactaattttctctgaaaatccttagttttggggactagagcatggtgatttgcacatattaggcactcatactgattagtcaataaacaaggtaaccatatttttataaggattatagtagacttccttacttgaaagcagctaaatagccaaatttgtctaaatttgtcaaagtcaattaaactatgcccaataaaatagaataaaattgagaaacaaaattcagattacctagtgattagtacttgatcctattagatttttaaaagcaaagaccagagagcttgcagcctgcttaaggacacaccaccaattggcaacaaactctattaaacaaaatgaatgctaactgtcgtctgctggaaaaacaaagctctggggcacacagactccctttagcaggagcagccctattttatctgctttaaatattatgctgccaagtttattgaaaaaactgtttcacagctaaatatattttaaaagccctgttttaggaattaggctcacagtttctgaggagagtcttaccttaaccagagactttagattatcacatgagcagacatacattcacttttttctctgtccaaaagctaaaagtaggttttctcaatctccagccccacaacatgattatagtcatcaatttcttatacctgtaattataatatgaggcatgaaatatgtgtgtgtgtgtgtgtgtgtgtgtgtgtgtgtgtgtgtgtgtttaaggagaatcgaagactattaagttggctctatagagtctaattcatcttacccccaccaaacaccttagctgtagtgccatgactcaagtctgttcttgagcatcctataacctcagagttatccttacagttgaaaaaattgggagaagcttgggccacacttggaagctggaagtagtatccaataagaacaaatttgggaaaaataaaaatgactatttttacacttttgatgattcgctgaatgttcaatagacttaaagtggctgttgggtccagttgcagtgacaatagctcactattaacttatcaattacatgaccttttaactaacatctcagagctgtcagttctcccctaaatcctagccactcttgggtggcatgtaacatgcacattagaccactgatgggttgctttctagtgtcatgtcttctataaaatgcctgcaggggccgggagtggtggctcacaactgtaatcccagcactttgggagactgaggagggcagatcacctgaggtcaagagtttgagactagcctggacaacgcggtgaaacctgtctctactaaaaataaaaaaaaattaaccaggcatggtggtgcatgcctatagtgccagctacttgggaggctgaggcaggagaattgcttgaacctgggaggtggaggttgcagtgagccgagatagtgtcactgcactccagcctgggtgacagagcgaaattctgtctcaaaaataaaaaaaaaaaataaaagtaaaaatagaaataaatgaaatgcctccagggcttagctggagaggctccatggtgttgggcacagtctattatacattgttcatgggagcctggcatttccagttcacacaagcactttccaccctaatcagtttggatatataaggttgtagcttatgacgtaaactatgaaaactactttggtttctaaaaacaggaaattttagtcccacaaatatccataaatcaagtcccatgccggaatcttagcaattacattaattgaatattgacctttaaagcaaatccttttagtgattctacccttctcatttataagagttcttcctgatttagttttatctttacttgagagaaatgttaccttaacaaattattatttttactagtattgctttctacatttacaaagataatttccttctttaagctaattttattttaaaaataatggatttttttcttccattagatctttccttaagtttatttacttctggtgtgctgtctttggagagttttgttccaaattaacactgggagggcagtgctttgcttgcaatataggtcatctattttcttatttaactactctcttcttcagggcaggattatatttaaacaatgacgggcaagtagcatcataaagaatggtccttttgaggtataaggactgctaattaatggttcttctgtataaaatgagtaaaggaactagctaacctatcttttgagaataaataaaatataaaaaatttaagactaggaaccagccctgtagatattattcttgtctgaaatgttgtaaccttgaatatttctgccattcaacaaaatgtgtgctattacatgatatgtctaaagacatcgactattaccaagcttgccatttaaacccaaatatgcttgaataatgctgcaaaagctattacaagggctgctctatgggtataattcttccactaataagcttcaccttgttaaagcaaaggtcacctctctgtgtttcactattttgtatacgatttttgctgatggctagacataatcttcaatttccatttctagtttagaaatatctgatgttggctaacatacatccacacattttagaaaaatatttccattttttaatacttccttgaataaatctctttccttagctgtttcatttcagatctctctaatctcattgcctctgtcttatcccgaaggacacgctgtcatcacctgtcatgttaactttctctgtaggcccttgcaattatcaccttatgatttcccttttgtcctaacatttatctatttttgagtcaacttatttcctactcctgttccaaattcagtttttgttttcatttttgttttgttttgtttttccttatacaagtcaactccagtgattttggttccagtaaaaattatttctgtgagatacttggcacattttttttccttttgcagtctaaaaactaatagcaacaggaggaagaaagtccatttcagaaagtatgagggattgtaaagcaaagattaagactaagactctcaagacctttaagcctggctttgccatagcattgggtatgagctgagggtcgtctgtgaactttgacttccaatattaacccagcagtttctgtataatttttaaagtttatttctgatgagaaataaataactttaattatttgaaataaaaatactcttaaatcatcatcaagaaattgacactaagtgatgcaagagacagcagtgatgagaatgagaatccaacagcccttctactctgagcctgccaatcattaaggtagatagtgacatttattaaccttagttttagcaagctgctccctgaatgtaggtttggggattaggtaagagagaaatgatgaaagagatttttttgttttttatcctctgagctcacctggctcagaggtgataaattgttattatagaaggttgtattaattcactgggtttgtcacatatttctggaggtgatttctcataagtttgccacgataaggcaaaatgcaagcattaaaatcaagtcctttaggaaaatttgtagctttaaagagagctactaatctcaaggaactttcctataaaagcacaaaatattatatcaagagtaaccaagaagcgacatcagcaaaatgggagaataagcagctccaatctcccatctcccagcagaaacattaaaaagcaagccgaaatgatcataacccacccttttagagctctgaaaaatcgcgaaaggtttacaccaaccaaatgaatggtgaatctagaaaaaagaaactttaaaatagaagatctttgtggtatttttacttgaatgtgcatctattttagtgaacatcagttatttgtaaactggagaagaaaactcaagattctcttcagcaatcagcatttttacttgccccagcttcttccctgttttggtagcagtcaggatgctgttttgaaaactgctcccagtgggagactgtgaaatgttggtccctggcatccgaggaaagtgagaaaacattacttgcaagatactgtgtactgttctaatctagctggcgaatgtctgacacaaagtgttctgttttgcttaactcagaagttatgcaagcaggaaacactgtagctgttgttctaaaacattgtaaggcagaaagaaaagtgacctgcaaatgcctgaggaaaagattgcatttgagacatagactagaccaactacagtctgagaggaaaagcctaggggagacttccttccagaagttagggtaatccaaggcactcatacataagctgaaatgcagaaagccatggacatacctaggaaaatacacttagaaaagatgtgagatgaccttatgccttcactttgggcttaactctagaatcagtgcaaatctaggtaagtattaaagaaaatatttagtacagaactaatctgcaaagagtgtgagaggtgatttattgtttatgtagcttgtgatgttttagaaaatatctgccaaaatactatcagaacacaaggtaatgaactaaatcttcaatgactacacatgacaagaaatacagtctctgcaaaaatagttggagaaagctactagataaatgccctatcatagtcgtcaacaatcaaggaaagaagaggagcttcaggatggctgagtacgggtaattggtactcctcacctcctccacaaagaaatacatctaaaagagaacacgataattcaatatagaaatgacaggaaatacccaaggcaaggacggagaggtaagcaaagcaacctgctcagccaggatctgctggaagcctgaagaggctccctaaagcagaaaaaggataggtgggccacatttccactgcagacttcagtaatctcaggcctgggagagcttctcaaccccactgggccctgagactgacagaaagagctacctggagataatgtgacagtattgctgcagaaagtgtgctcacatcagatcctacacaccctttgagtcctaagcagctacagcaagggaccattttgagagtccagcccccaacagactacatcttgacctgggacccaacagcttctgctattttcctcctccacatccctgcagctttattgacatccactgcccacagctgctgctgctgctagctgctgctgccagatgctttgagcccaccacccccagcagaggggccaatgcacatttgtacgcatcttaatgataggtttctccacctgccgctattgatggctgccaccacttggggccaaagtgcaagccactggcagtgactccagtgccctccagcagtggggctaacacttatttacaagtaccttgagatcaggcttctcctcctgcaaccactatctggagccaaagcaagtgctcctcagctgcctacctacacctgctgccactgaaaagaaccccacactccccagtagcagggcacagcacagtcattgctgccttcacctgagtactttcctgggagcacaggagtcactcactccctgtgcaccacagctagcacacacatgtgtcacaacagggcctgaggacaaacccacctggccatgtttacaccacagagtacctgaacctactgtctggagcctgggtattgccctgccctctctaccaccatcggtgcctgaagatttctaccatcggcctgaggatgggcccactcaacctgctactaccaccaaagctggtacccaagacctgggggaaaattaaataaattaaaaagtgcacaccacagtagaataagataagcttcaagagacccctgccattccaaccctataggagacagtgaacttgcccacatgcagagtatatagcaactataaccagtaagaaagctactacaatcagtgagagaatcatcacacttagactctatataaccaaggaacttagacagaatcttcacccttaaaagcactaagaaccaaattaggctataataaactatataaaagtcacgtccttaagagaggaaaaaattaaaaaacaggtgaatcaaaataaattcaagaacaattagaagaaatagtctacccaaatgagaagggaccagaaaagtaatatggcaaaacaggggccaggtgcagtggctcatgcctgtaatccctacactataggaggccgaggtgggtggatcacctgaggtcaggagtttgagaccagcctgtccaacatggcgaaaccctgtctctactaaaaatacaataattagccaggcatggtgacagatgcctgtaatcccaactacttgggaggctgagctcaggagaatcacttaaacctgagaggcagaggttacagtgagctgagatcatgttactgcactccagcctgggtgacagagcaagattctatttaaaaaaaaaaaaggcaaaacagggctctataacaccccagaaagattgtgctagcttcccagcaatagatccaaatgaaggtgaaatgtttgaaataccagataaagaatttagaagtttgattattaagctactcaaagagataccagtgaaaaccaatataaagaaaaataaaaacaaacaaaaaaaacttcagagtatgaatgaaaaatttttcaaagagatagatacttaaagaaaagccaatcagaacttctggaaatgaaagacacacttagagaaatacaaaatgcagtggaagatttcaataatagactagaataagtagaagaaagaatttcagagcttgaagacaaggcttttaaattaactcaaccaaataaagataaagataaaagaatcaaaagaaatgggaaaaaaatgtctccaagaaataagggattatgaaatggccaaacctaagaataactggtgtttctgagggagaagagaggtctaaagatttggaaaatgtatttgagggaataattgaggaagcattccctggccttgttaaagatttaggtatccaatacaagaagctcaaagaactcttgtgaaattcattgcaaaaagatcatcaccaaggcacataattatcagactatctaaaatgtacatgaaggaaaaaattctaagagctgtgggacaaaagcatcaggtaacccataaaggaaaacttatcagagtaacagcagaattctcagcagaaaccttacatgctagaagggattagggttccatcttcaatctccttaaacagaataattgtcagccaagaatctcatgtccagcaaaataagcttcataactgaaagagcaataaagtatttttcagaccaccaaaccagcactacaagaaatgctaaaagcagttctaaatcttgaaacagaagcttgatatgcaccaaagagaaccccctgaaagcatacaatgcataggccctagaaaacaataacacgataataaaaaagtatctaggtaaccactaataggatgaatggaacaggacctcacatctcaagattaacattgaatgtaaatggcctcaatattccacttaaaagatacagaatggcagaatggataaaaaaccaccaaccaaatgtctgctgtcttcaggagcctcacctgaacagaagaatttacataaactcaaggtaaatgggtggaaaaagatatttcacacaaatggaagccaaaagtgaacaggagtagctgttttgttttatgtcagacaaacagactttaaagcaacaacagtaaaaaaagacaaagaaggtcattatataataaaaaaaggataataatgataatataataaaaggatccatctaacaagaagatattagaatcttaaatttatatgaacctaagaccaaagctcccagatttataaatcaattactactggacctaagaaatgaaacagacagcaacacaataatagtgggggacttcaatactcccctgacattagacagattgtcaagacagaaagtcaacaaagaaataaaggacttcaactatactctagaataaatgtacttaacaggtatttacagaatattctacccaacaactgcagaatataccttcttctttaacagtgaaataaagatgggaattttaaaattttttgaaatgaatgataacagtgacacactttattaaaacttaaggaatactgcaaaaagcagtgctaacaggaaagttcataatgttaaatgcctacatcaaaaagtcttaaggagtacaaattgacaacataatgtcacagctcaaggaatgagagaaacaggaactaactaaccccacatccagcagcagacaagaaataacaaagatcagagaagaactgaatgaaattgaaacaaacaaaataaatgcaacagaaaggtgtttttatgaaaagataaacacaattaataggtcattagcaagattaaccaagaaaagaggagagaagatccaaattaactcaatttggaatgaaactggaggcattacaaccaataccacagaaatgcaaatgattattcaagactgctatgaacacctttatgtgcacaaactacaaagtctagaggaattggacgaattcctggaaacatacaatccttgtagattaaatcaggaagaaataggaaccctgaacataccaataacaagcagtgagattaaatcatttatttaaaaattgctaacaataaaacgtttaggacaagaggattcacagctgaattctaccagacattcaaataattaatatgaatcctactgaaagtattccaaaagatcgagacagagagaatcctccctaaatcattccatgaagccagtatcatcctataacaaattccaagaaaggccacaacaacaacaacaaaataaaattacaggccaatatccctgatgaacatagatgcaaaaatcctcaacaaaatacaagctaactgaatccaacagcacatcagaaagataatacatcattatcaagtggctttcatctcagagatgcagaaatgatttaatacacaagtgaataaatgtgatacatcacttaaacagaattaacaacaaaatccatataatcatctcaatagatgcagataaagcatttgagaaaatcaagcatccctctatgatcaaaaccctctgcaaactaggcatagaagggacttaacctcaaaataataaaagccatagatgacaagcccacagccaacatcacactgaataggaaaatgttggaagtattccccctgagaaaaggaacaagacaagggtggccactttcatcacttctattcaacatactactaaagtcctagctggagcaatcaggcaagaggaagaaataaggggatgcaaattggaaaagagaaagtcaaacattgctatacaccaatgatatgattgtgtagaaaatgctaaagactcatccgaaaggttcctagacctgatacataatttcagtcaaatctcaggttggaaaatcagtgtacagaaattagtagcactgttatacaccaccaatgatcaatctaagaataaaatcaagaattcaatcccttttacaacagctgcaaaagaaaaaaatataacctaggaatatgcttagccaaagaggtgaaagatcttccaaggaaaaatacaaaacactgctgaaagaaattatagatgacacaaacaaatggaaacacattacatgttcctgggttgtaagaatcaatattgtgaaagtaaacatactgcccaaagcaatctacagattcagtgcaagtcccatcaaaataccatcatcatttttcacagaactagtaaaaacaattctaaagttcatatggaaccaaaaaagagcctccatagccaaagcaatcgtaagcaaaggaacaaatctggaggtatcccattatcagacttcaaattatactacaaagctttatttaccaaaacagcatggtattagtataaaaatagacacatagaccaataaaacagaataaagaacccaggaataaagccaaatatggacagccaattgatctctaaccaagcatacaaaaacataaactggggaaaggacaccctattcaataaatagtgctaggaaaactggcaagccacatgtagcagaatgaaaccggatccctatctctcactttatacaaaaatcaactcaagatggatcaaagacttaaatctaagacctgaaaccataaaaattctagatgataacattgaaaaaattcttctggacaatggcctaggcaaataattcatgactaagatccccataagcaaatgcaacataaacataaataaataaatgggacctagttgaacaaaaagacttctgcataacaaaagaaataatcagcagagttaataggcaatccacagagtgggagaaagtatttgcaaactatgcatcagacaaagaactagtatccagaatcaacaaggaactcaaatcagcaagaaacaaataatgccatcaaaaagtgagcaaagacatgaatggacatttctaaaaagaagatatacaaacagccaataagcataatgaaaaaatgcacatcactaatcatcagggaaatgcaaaataaaaccatggtgagataccaccttactcctgcaagaatggccataattaaaaagtcaaaacaatagatgttggtgtggatgaggggaatgtgaaacacttttagactactggtgggaatgtaaattagtacaaactttatggaaaatggcatggagaatccttaaagaactaaaagtagatctaccattccatccagcaatcctactactggttatctacccccctgccaaaaaaaaagtcattatatgaaaaagacacatgcacacacatgtttatagcacattaattcacaaatgtaatggtacaggaccaacctaattgcccatcatccaatgagtggattaaaaaaaatgtggtatggaatactacacagccataaaaaagaatgtaattatgacttttgtagcaacttggttggagctggggttcattattctaagtgaagtaactcgagaatagaaaaccaaataccatatgttctcacttataagtgggagcttatttatgaggatgcaaagacatacagagtgatatgactttggggacttcagggggattttgggagggaggtgaggaacaaaagcctagatattgggtacagtgtacactgcttaggtgatggttgcctaaaatttcagaattcaccattatggaattcatccatgtaacaaaaaccacttagaccccccaaagcttttgaaactaaaaaaaaaaaaatcctacaagagtttaaataaattatctaatgttgcatctcaagaaactagaaaaccaagaataaacctaacctaacattagtagaaagacagaaataataaaggccagagcagaagtaaacaaaatagagacaaaaacaaaatatgaaaagttgatttttttaaaaaaagataaacacaatagataaatggctagctagattaaccagggggaaaaaagagaagacccaaacaagtaaaataaaagatgaagatgaagacattccaactgataccatagaaatacaaaaggtcatccaagaccataatgaacaaaatacacactaacacgctggaaaacctaaaggaaatgtataaattcctggaactaagaaaagtaccaagattaaatcaggaagaaatagaaaactgaacagtccaattatgaacagtgagattgaattagtaataaaaaatcttgcaccaaaattaaagcccaggaccagatggccttacaataaaactttaccaaatatgcaaagaataattaatacaaattctcctcatgctattaaaaaaaaaaaaagtgatgaggagggaattctccctaactcattctatgatgccaaagttaccctgataccaatatcagacgaggacacaacaaaaaagaaaactatagggcaatatccctgacgaacatagagacagaaattctcaacgcagtaccagcaaattgaatccaaccacacatcaaaagcatcaaacaacataatcaagtgggatttatcctggggatgcaaaaatggctcaatatatgcaaataaataaacattatatatcacatcaataaaattaagaacataaactatatgatcatctcaatagacacataaaggttttgataaaattcaacatcccttcattataaaaactcccaacaaactatgcatagaagaaatgtatattaacataataaaggccatttatgaaaacccacagctaacattatactgaatgtggaaaagctgaaagccttacctctaagaactggtacacgacaatgatgctgacttccaccactccgattctacatagatctacaagtcctatccagagcaatcaggcaagattaaaaataaataaataaataaaatgtatccaaatgtacataagggaatcaatgtgtttgctgaagatgtggtcagataactagaaaaacttacagattccacagaatcctctctgatctgataataaatttgataaagttgcaggatacataatcaacatacaaaaactagcagtgtttttatgccaataatgacctagcaaagaaaatatctagaagataatttctcttgcaatagctataaaataaatgaaatacttagaaatgaatttaaggaaggaaatgaaaatcctgtacaaagaaaactataaaacactgatgaaaagttgaaagggatgcagacaaatgaaaagatatcccatgcccatgatcaaaataaatattgttaaaacaatcacattccccaaagcaatcttcagcttcaatgaaatctctgtcaaaatatcaatgtcattttttcatataaatagaaaacaaacctaaaattttcctgaaaccaaaaaagagctcatatcgccagagcaatcctgaacaaaaaggagaaagatggatacaccacattatctaacttcaaaatatatcatcaggatatagtaacaaaaactgcatgatattggtataaaaacacacaaatagaccaatgaaacagagaagaaaactcagaaataaatccataaaatttatagctaactgattttgacaaatgcagcgagaacttaaattagggaaaggacatactcttcactaaataatatgagaaaattgaatattcatatgtgaaggaatgaaactggacccctatttctaaccatatacaaaaaccaatccaagatggattaaagccttgtatgtaaaacctgaaactataaaaatactagaagaaaatataggagaaacaagtcaggacattgttgtaggcaaaaattttttggctaagatctcaaaagctcaggcaacaaaaacaaaaattgatgaatgagactatattaaacacagcttcttcagaccaaagcaaacaatcaaagagtgaagacacaaactgttaaatagaagaaaaaaaaattgccagataggtagctgcagacattgtgtcaagcaatgtgttaatttgctcaagctctaacagctcaatatggaacagcagttgtaatcagagccatcagttggttattcttatgagaatccactgttattcaagatccatctgtttcctgcacaggacaaataggtgaattgaatggaggtgtggtaggaatcacacccctggcatctgtcaagttcctaatggtaacattgatttctgcaattccttcaggaaagcagtattgtgtttggcttactattattctaggtagagacattgctagtggcttccacttggtcttttctatcataatatccctcactccacaagtcatggtataaatgtgtagattctacaacttgctgagtatatctactccagttaagcattccaaaaatgataaattaaccacagaatgtgtttgggaaaccattagccccactgtgagatatacctgatctaaaactttactggacatttcaccttcataacacctttttctgactgatggaccttggtgatgtcttaggtctcctggaattagtgtcagaaagagcctgtatctagtagtccccagaaagtctgataattttcttttttctagtgtgtggttatcctggtaacaggctacaggcccctttggggaagagtggaagaaagacgactagtataaatatgtggctgtgtactaaagtctttcctcaaggagccttggactccacttcattccagggtttcagaatctataaactggctcaagtctgggattgagaagctgttattttgttatttctgttattttgttatacttttgttcgtatgatctcaaacttttattcttatacagattgtgtaagaattcagaagactttctatctttcacttctcgtaacaccatgaccaactagtcagtgccatgggtctgcactaggcagactatcctgattgctgctttgcctctgctgtccagtgccaccttgccttttgcagttgagtgctgccacttggcctctaccacctcaggatccaattactcccattgcatttaggtttcccaattaagtgatcaccattcttttttttttttttttttttttttttgagacagagtctcgttctgtcacccggactggagtgcagtggcatgatctcctctcgctgcaacctctacctcccaggttcagctgattcttctgcctcagcctcctgaacaggtggcattacagacacacaccaccacacccggctgatttttgtatttttagtagagccgtggtttcaccatgtcggccaggctggtcttgaactcctgacctcaagtgatccccctgccttggcctcccaaagtgcttggattacaggggtgagccagtatggctggctgtgatcaccattcttattgggtgaccttgactacagaaaagagaggctgtagagcttttcaaagatgctggggctctcctcacaaatttctttctttctttctttcttttttttttttttttttgagatggagtctttctctcttgcccaggctggagtgtagtggcgtgatcttggctcactgcaagctccgcctcccgggttcacgccattcttctgcctcagcctcccaagtagctgggactacaggtgcctgccaccaagctcggctaattttttgtatttttagtacagacggggtttcaccatgttagccaggatgatcttgatctcctgacctcgtgatccgcccacctcggactcccaaagtgctgggattacaggtgtgagccactgcaccctgcccacaaatttatttcttacattatgataacaagtatgtcttctgggccttcccagtgtggatagtcagaagtggtcctcccagagaggatgacaaatccactctaacattcccaaacccctaaactttgaatcccttcttgtacattaaaccaaggcatgcccagcatttctaacttgctcactgtaggctacctttttgttccatgcccaataaacaaacaaacaaataaacaaacaaactgttagagccttttctaactccctgaggtacaatattacatacagaatgtacgtttggtgagaccatatctatctattcagcctggcccaactttatgttcctcccaccattgtaccaaaactttaatatccattcctatatgtgctcccttgatttctatctgcatagattagaaaactcaagtagatctttagaagtatagcaattctcttcattgagttacactttaaacctcacctttagaggcctactgggacttgagtgtagatatgggtaggatgaaagtggtgggtgttagaggtgtgttctgaagagaaccagcattgtcttccatgtcaactggctcagaggaggctattacaggtttctcaggcaattcagggttagtcccctcaaatagggggttaggggtggaaaaattatttcaactgggagtggagaggatgtttccactggtgatgcagaggctgttcccactggaagtggagagactgtttccactagcaaaaatgtcttatcaaaatgtagggactcagtagtcccagcataatcagtctttccagtcatcctcatttcaacttgcaggatcccactccttccttaaaatgccttcacttcaatggcagatcctttgtatggctgggagttcaaattttgttgtaattcagcaagttacagaaagagattctgtgtttgatttttcagcaatctttgccctgtgcctacaggtaataagagtatccttcagggccatatagaagctttcaggtcatttatgcaatgcttaagctgggaattggaatctccaagctcatcctttccttccccaccttgtctggagtgaacaggctggtggttagcagttttgtattttatgatccttttataatttgttgctgtaagttgctagcaatataaacttattctagatattttagtgcaatataaatttattaagaggctactgaataaccaatatttaaagaggaaatgtatgtcactttggagatatacatacacttaattataaatgcatttctaaaacataggaattactatctctgccttaccaattagaaactgagaaatgcagagataaagtaacgtacaaatgatggcacatgcatacacaaacaataggtggtaaaggtgagatttgaatccagatgattttgtactacatacttgccccagaacagtgattttcaaacttgaagctgcatcagaattccctggaggacaggttatgttacactggtctgggctcttctccaaagctgctgattcagtaagtaggaagtgagacctgagagtttttacgaagttcccaagtgatgctaatgctagtagttctcaagtccaaaacttaagaacctccattcttgataactatttttcgagggccagagagccagactcagaggctatgaagctacttcagtggctcaaatcagaggtggaatccatcagtgaacttcagccatgaccactacttctcctaccacatcaaacactggaataagtatatgctgcagatcaacctcctgcccatccttatagcagaacattgataccatttctagcattgctcccaatgttctcctgcaatttcaattttcctaaaattactttgcctccagagattatgtttgtgaccccttgcctctttgcatctcatattgctgattcagaatccaagatagatacatatgattaggtggagcttaaatcagacacccttgtctttgcccataaggaggagttcaaagcaacttctgattccatagttgtttgtagactgatgggttgtttttacgaatgaactttgttacatagggggttcagacactaaaggataatggatgtctactacaattgccttaccaaataaggggcaaatagaatacatttttaatcgttttgcaaatttttattgaacaacaattttatggcagaatcataaggcactgagaatacagtttaatagtatctgaccttgctttttaaattctctctaaatgaaaaaaaaagaaatgtgattattttgcttaaggttgcacaatgtcacaagaatcttagtggaggccagaactctggttctaatcctccatgaattccaatccttggaacaacatttgttattatcttagtctgttctggctgctattacaaaataccatcaactgggtggcttaaacatcagaaatttgttgctcccggttttggaggctagaaatttcaagatcaaggtgcctgcagatgttgcatccagtgagagcccagttcttcatcgatgggacctgctgactctgtcttcacatggtagaagggatgagaggtttctctggggcctttttcatagggcacggatcccattcatgatggctctaccttcatgactgtatcacctcccaaaggtcccgtcttctaatcacatcatgttggggtttaggtttcaacatgaaatctgaggacaaacattcagacagatagcagtcgctgtgtattcacctgcctttttaaatgaaagcactaatttttcactatttcagtattttctgaaaaatctgaatcaaagcataagcatttcagaaggaatgatttgctttactccagtgtattattcttgattatttgattaaagacaactgaatccaactctggtaagcttaagagaaaaaagtcttgaaaggaattgggtagttgataaaatgcaacccaggcctacagggtagagaaatcagaagatatctaaactacagtcttttaagggttccattttcagaatggaattttccaactacttttgatgcaacattttactttgctcaagatttaactacaaagggaagagattcccattagcctcgcttgcccccagacaggaaagagccagtgcttcactagtaagcaacctcagacaatacagagtggggaagggatagtttctcaaaggaagatctggaggctgctactgggagaaggggaggtggatgctaggcagattaaaaacaataaatgtgtgttgcttccctaacctgtgttcttaaccaaatgcatgatgacatatgaaacctaaaaatatttccttgtaatagttatctgctccactttttttatcttgtgtttcttcttctggaaaggtctgtttagccaagaaataggcctagtaagtttcttatacaaaaattaaaaacaaatatgcctgtaaggatatttgctacaaccttaaatacttcagaagaaaaatattgcataatatcaaattttaatttgtgtagttcacaaagtatttatcagtattttatgattaatttgccttcatatttaaccttatttcatttgctttcttttccactaatagagttggcattactttgttttgaattaagattttatggcaataattaaatacattcattcttattagacaatacaatggtacacataaaaattgttagacaaatatttaaccaaatcacaaaaatgtgtaataaaattatatcccattataactccattctcgaaactatattgaaagtacttatcactgttaatgcaattattatttttggactctaaagaaatttttttctaaaggataaatcattatttattcatattattgtcttatgtattcctaagtccaaatgagcagaaaaagtgattagaattttaattgcttcaaagcaatcattccaaatgagatgagataatattactcctcacaacactttacctttcagtgttgtcatcagctttgtcagggaaagtggatgctcaatgcaaacgcaagtgctatgctatgtactcacagaagtggtgcatttactagtatttatttttaatatttaactaaatctatgtatttcacaggagatttttaatagagcatcaattagtagttgtttacacagtgtaatttaagctcaaagaataataaattaagaaatatacttgtgcatgttgtaaaataatatgaaagaaactaaataacttgattatataatatttgaaattatctttatggaggtttatttttgtatatagactattaacctgacatatttctcattattgtaaagtttttgagaatatgccaattaagttgaaacttaaaatactcacagtttaaaaatgaaaacttcttggccggttgtggtggctcacgcctgtaatctcccagcacttttggaggccaaggcgggcggatcacaaggtcaagaaatcgagaccatcctggccaacgtggtgaaaccccgtctctactaaaaatacaaaaattagctgggtgtggtggggtgcgactgtagttccaactactcgggaggctgagatgggagaatcgcttgaacccaggagatggaggttgcagtgagatgagatcatgccactgtactccagcctggcaacagagttagactcagtctcaaaaaaaaaaaaaaaaaaaaaaaaaactcctttaaagtaaatatttaggtaaataattacagtaagatttgtcagtataaccatagcctttcctaatgcgaacattgagagaaaattaaaagaccttcaactgtaggcatcgattgaacaataggagctattagcagtgccccaaagcagtttaaatgatgtgaaataagggaaagaaagcctgtgttgttacatgtgtgtgctctcagccaagtgtcctctgtaagggaaggatgcccagaagcagtctaaggtggtgcttgctctggacaagagcatcttcgtggaggaacctgtgttggaggggtagggggtggagagaaggggtcattggagattgctgcctgtagccaaagtaggaggacaattgtaaatttctcagaaggaagagggaaggtcatcaggctcattagttaagcaaggtcttttttcaggggaagctgaattgcaacaccaatcagaaaccagagctgaagcccagtctcaacaacatagaggctagagcttagtttatgaagggagcttcaggatccaccttgcatatttctggtttaaggcaatagagtaatttcaaaatgtcaacttctagacaaggtcttatattagagagccatttattttctcaatgactctgactatagtttgtcatgaacccatctaaatgaaggttcccacagtgagaaaggctggggtcaaaaagaactgataaaaggcagaaagtaaatcgatggactctattagctatattagatttggagatttacagtaaaaaatgaagacaacagttgtgtgttccttcacaccaactccattattttcccaccattattctcctcccaatgtgtttgatcaatggtaacatcatgcactgtttcatctaagctagagaactgggtatctagcaaactgccgttactcctaattcttcaaatccacctggctcctaaatcttgttaattctacttccttcagacttcaaaaattggcatacttctttttcttcattcaaattatgaaaaactcatcccatgtggacaacagaggatttgtactttggaacatgatgtctcacctatttctgatttttttatgattttagatgagactttagacttgagactttagaattgatgctggaataagacttttgtggctgttaggtaggaggaacgtattttgcatcatgtgataagggcatgtattttgggtggtcaagggtggaatgcaatgggctgacttggatccacccccaaaattcatatgttaaagtccaacatgactgatttggagacaggacctataggaaggtaattaagactaaatgagctcatcagggtggggccctaatctgatagaatcagtatcggatgccagcgagctttctctttctcactggctctgtgcatgcacacagatgagtttatgtgagcatggcacaaggtggtgaccacctgcaagccaggcaaagaggccccaaaaggggaaatcaaaccccgctgaaccacgatctgggacttctaccatccagaactgtgaaaaaatcagtatctgtagtttaagctgcctagtctctagtatttttctcatggcagccagtgctgatgcacagatttaggagacatccattccccagggtcctgtcctcacctaccacgtatccctgtgttaacacttctctgcagccactgtatcttgctcacagatcttcacataagtctttgtttctccatagctttgtatttataaactactctcttttttgattctggaattagtcttccttcattttaccctcttaataaagaattgctaatcctttaagaataagttaaagttctcttcagtctaagctaattgatcacattcttcttggttttttttttttttagataaatacattgagcatctaaggatgaaattcactaattataggcctcttttctttccattaaacagttaacttcttgaaacagtgtgctttggaattgaacagatctgtgttcaaatcctaactctgcataattgactatctaagttaaaatatccaagtaaattatctataataacaacttactatattaatatgaaatgtattcaaaaacccatatttcaagtacatgtcaatatatttagtgataatgttattttttcatttattagcaaaatagagtttagcatatcttcaggtggcaattttgttgtaaaaatttacaaatgagcaatcaaattaatgaaggattggaaacagtgataaaagtgactaaaaaaaaaaagaaagccaatataaagaagaagcttgaagtggccatgaagagtaacaggaagcagcatctcagagggcttgattgttggtagttgagttttgaagaaacttttcaagctttgaaacatttggtctgtttttccaaagccaaacgtgagtcttcgttttgcggtaaatgttggtaacgtgttctttatagcattgtatgcccttctgtctcacgtatcacactttctcaaacctcattctctctgacttaaaagacagtcaagatttcagggtgttcatgaaacagattacataattataaacaggtttcataattataaacaggtaaacaacatttgaagaaaatgccttggaggcaaattttggctgatggctatatcagaacttggagtttttatgtttgtttttaaaatatggtaaaaggtcttgaaccagagagtgctctacttacctgacaaggtacccacttaaacattcaaggatagcaaatcagtttaaaatctgtgcatgacaaaatattttaaatctttcctgactctcatgcttttgtaaaaataatacattttccttcttcctggaagaatttgctcacatctagcttactacttgaaagaaaccacttatcatacttaattttaattgactattttgcatgttggtttgggctaggctgcactacattgtttagtatttcttcccttgtatgttactggttagcatgagccacaggaaaggtttttgagccatctaggaagactgtaattgaagcagcctctgtattatcatggaaacatgctgtcacctgtctgccggctcaccttgttgacatgagccagcaaccaggcttgcaacagctccttccttccctggctcctctcgtagcttcttccaaccctggggacagttgtgtgtgtagcctcagttactgcagaacacccataccactgaagtcacggaaacaagaacatatataaattttatctccttgggctccagtccatgcttgtaaggcccagcttgttctttttctcctctcactctacatctttgtatccatcctcctctcccagctgtctgccccgtggacttcaagttccatcatcagacttgaaaatggcagcctagaagatgctgcttgatcagccctcacaatccaaaaaggcaaagtatctacaacaaatcatttcatagatggacatggatctctctctatagctatatttacatgcatgcatgtgtgcatgtgtgtgtacacacagacaggcacacacacacatacatatgtaatgtatattcatcagagacacagaacaactacacatatatgtgtatatgctcatatacatatatataaaaccattataaatatatgtctatatccacatcagtagggattctacttctctgataaacctcagcgtgggttattagcattgattcattacactataagatgctgtaagcagggactctaagggactctgcagaaaccattggattagcaaggactaacacattgacacttagtggatgctacataaaacatagcatattaaaatattttacatttcaaaatatattttaaaatttttgttcagaaagactgaacaaaagaatgggaaaattccctcgggaaaattctcacaaaataatgtaaaataatataaagtgatataaacaggatataaaaataaaaacgtaagttgaagtagctataggacaatcaattgtttacataacctctagcatgtggcacctgactttaggaaacaagtcagtgctaacgtgtacaggtataaattattagaactcatgttgtcatggaagctgtggacattaataaaaagttatatgtttcacataactgagaaataggaattgaaatttggggatgatcaatatttaggggcaggcagagaaatgtctcccaagggggcttaaaatgaaagtcagagaggttgttagagaaataaataaaagatgacagtgcagtgaaagtggagagaggagacagagttaagaatgagggtgtggcaaacagctttaaatatgacagaaacaatgaatgaaataaacaaagaaggatttccatttggcacacctttgcagatgttagaaagcaccatttcagtgggataataatggcaaaatccaaattttattgattaatgagtgaattagtggtgagccattgaaggcattatgtggatcagttattcaagaaatgtatgtttaaaaggaacatggtgggctgcagttgcagagctggggaactttattcttgatatttttagacatggaaacacctaagaagattaatgtatgtgctgggtagagataaagaaattagaagcagttgttaaagacaaaagagagcaaaagcattcaatagaagaaggtctcggaagaagaaggagattagctataaaatagtggggttttaggaggctaaataatgtgatctctctctcactttgctatcaccgtctcaaccaaatgattaaacttagcatcatccatggcagaaaaagctgacatgatacaccttttgatgtcatccaataagaaatactcaacattgacttttaatattaatatcctctgattaaagttgattaatttaaaaccaatcttgagcaaactctacaaaaaaaaaaaaaaaaaaaaaaaaaaacccagaatgtggagtggtctacaagtcaactggcttgcactcttcctaacagttgatttcatgaaaagcaatgttactagctcactaactcaaccatcaattaactaactaaatcaatcaatcaatgtgaagggattgttcttcatctaaagaaataaaggaaatatgacaaggatatttagtatgtaagccttggttggattctaaagtgaacatttcatttaaaagactataacatatttttaatttgaacattttgtgcatatttcttacatgacacaataaaacttttgctattttcaggcacaatcatggtattgtggtcagcaggagaatagacttatccttagaagatgcatactgacttgaagggtgaaatgtcatggtgtagagataggtagatggagacagagttagcaaatgtagcaaatgttaacacctagtgaattctggtaaaaagcatagtggtgtttattgtactatttgttaaaatttccttagatttctaagctttcaaaattaagcaatgcaagaagataaaattcctcttttcctttttctttctgggtttggatactaatggagacatgggggacagtgtgtggggaggagatgtattgatattcagtttaccttaattagtcatggatttggtcttttcaaattcacctacttgctaacatttatttgtaactcccaaattcatacctgtggcattttcacagtaccactctgccattcacaaagctgtggaaaatgggagtccatcatctgcatgttccctgctgaggtggagacaggtgaggtaccttctcttcatcagcttacactgtaaacacacgtcctttccatggcccaggtagtgctgtgagtttcacacttttttctttttattggtgatttcactgtttcaatgccctgtgagcctagggctgaggtgccttctagtgtccctaagcatcagtggtctgtgatgttccctatggagaaaatgcctgggatgaataacctttgtttagatgcgagttatggcgctgattgcgggagttcagtgttaatgaagcaacaatatgcagtaaccaaggtgtctttgaacagagacacacatgaagcaaggtcatgtactgaccagctaatgaaaatgtagatcagaggctcacaggaatctaagcctgtacttcccctatggacagtgagtacttcagtgttcgcgaccccttagtagaacacaattattgcgaagactgggaatcaactgtaatatatgtaagtcaatgtggctttggcattgccttcaactgggcttgctactcaccagaattcaatgttttaatccatgcagtcgtttactctccacaccctacctcacccccaaacaacaaataaacagaaaaagacaagagcagagcttgctctgctaaatggaccacacagagagaaaacaggcaagccaggacacaggctccttcagcaagggtgcagagagggcacccagcagcggagcgggctggcaggaggtgcacatctgcccagtgcaggaggaaagagccaccgcagctgatgcccttccaagggaaacgcgggatccaggagctgctgcagtttccctttaactctgcgccccgggaggaagagaatttttcttctgcaagagaaagaaagactgtggtgtgataccccacaggtctagatagtggttatgaatctgatgtccttaaggcaaagctaggaaaaaaagggcacagctgccagagaaaggccaagggtgccacagatgagtggatgcaacatagcacccctctgaacacaatgatgggctgtcaggacaaaaactggcaaacctaatgaccactccccagagtgtctgcagcccagaagccctggaggtcacacatctggaggtcccagaggctttggcctgaatcctggactttttctgtgacatcagagacttggtatttgtagacctggggttaggtggagcccttcatggggaccactcaggccttgccttagcaatagcagaatttaatagaaatgtgtccctggaacattgtttcacagcaagcatttctggggagggttttccccgttaagtttctgtgctgtgtgcaggaggaggtgcagtccaaagaagtatcaggccctcctccctgacacggggccttttcaaggatggaaaactgtgggttttattatctatgagattatttcatatttatatatacttagggcagaaagactgcaaggcttggctttaggcctagatatttaatgaaaaaaccttctaagtaggtgactttcctggggtctttgtttggtaattagtcttcagcattggtcacagattcatggctggctgctctaggcacaagctgctccttaatacataagaatgttagtgaatttctccagaaaatgctttcttggccctctcctcccagataaaatttgtatctctgtgtcctgtgatatatattattaattaaattagagagtcataattatatgttccagagtggaaagaaacaataggttgggattcaacaatggaagcataaatatcttccataaaagatgttttctgtttattcaataggggtccttgctaacccactgccaatgccacctaccccctccaaaaaaaacctcatttcatcatcatttgactttcataaaagacatacatggaaatgactaggattgacttagtccattcctctggccagggagttctttaggtctttgagtaacacatcctgatttactgacatgagaagtccattgatgagtttctaagatagattttctctttcaataaaaagttgcccaaaagtcgtgctcttccctggcactattgtgtgtatgccaagaactgccgcactttggggtccatgaggaccacatggcccaaaaaggttgcagagcagaggaaatagaagcagttggcccctaaattcatcaactctagaaccacctacttctggatttctagatacgtgagttaatgaactcttgtaatagccgttcttataactggatcttctggcacttgcagctgaaagcaattttataatacacagtttcatcttttgtgagaaagaacaaaaggaacgaaggcatgaacagataacttgctttagttgcacatttatctaactttactgaaaactgtgttgttgatatgtgatttcagttaacagagagaacccattctatttataaacttcgttgccagaaactttatattacaatcatcctgaaatattgtataacatgtttactgacactgaaaatatgtccaatagagtacggtggtcacatgccatattttgataataaattttaaaatttgttatagtaacatgttttcaaagaacaaataaccacttcattcaaggacacacacacacacacacacagagagagagagagagagagagagagaaagagagtatgtatgtaaaccatagatgggagaagtatatttttttctcttgaggtagcagaaagccagaactaaagagagaaaattgtgcagaaaaataatgctcaggattcaaaaaaaaaatgtcttttaatcacatagatgaacaaaaaccattcacagaagcacttatgcagcaagcttcacacaaaagtttaagatttttaaaagtagtttttgttatagaataatttgtaacacttgagatattaccacattatcctgagatccaccatcattttttgcccactctttcaacttgtaatatttcagttttattttgttttaatactttctgtttccagagtgttttaaaatattgtgccgtaccttcttttcactaaatttaatgattcctttcatgtttagaatctgttcttttgaaaattaactaacttgcctctttcctttctttctttcctttcttctttcttttttttccttcttctctgagttgtgtttcagggacaaaatgctaccaacttgcaaaactctaatgtgagattcctccacatgagtatgtgtgcttttcaatatccctctttccatctgccacttatatctcagtttgcaagagaagatcacattcaattctgcttcctggccttccttagaagttatttgacttggaaatgacagaactttcagtttctgattaaatgcagatctagtatcaatgcaagaaaaattattattttttcttttgagtgatttatgcataatggattaggtttcaaaaactataaaatagtctaattaattcatttctgaattctgagtatcttctaaggtcagtttatcttacctatgtctaagtatagaaatacccacctaagcttttccactggcatttgttcttgtggccatttgaaaactttattttattaaatccataatattcactgacaagaattttgatgattattcataagattaattagctatcattgtttcaagatattattccattaatgatttcattgatttttgtagcatttatttgagtctaaaatctacacatcaggggttaattttatgctgctttgcactgtttattattattaatatataccagtctgtttttttttcttcaatcactttgtaagtccttaagaacagagattgtgacaattatgtctggacccaaatgctcaggcagaaatccaaccaaaaaatgcttatatgcttagaaagcccttcactcctctccgtagaagtgtgaatgctttggcgtcccttgcaggcatttacaaacatgtttctttttgtttcttggggcttattttataccaacagatcattaatacgagtgtgtgtgtgtgcacacatgtgcattacctagttatacaactggaaagaggcagagatgaacatctcttgactgcgccagtctcaaggccgaggttttcttccttagatgtcctgcctatgtcagtaaatgaaagaatattgggtcaaaccatatgaaaagcaaatcagaccttaaatttcttctgaaagtcagtgaaagtgaaaagcaacctaatagtaaatgagccaagattataagcagagtaatcatgaaaaaaatatattagaaagcccactaaatcatgccaggtgctcatctttagcagtgaatagagacacgcagcgtatgcagtagggtcccatatcttatgtaccatgtggagacggtgagaaaggcgatcatgtgaggtgccgagtggacttggagaactgtgtctctacgactcttcatgggagtgttaactgttttgtttaatcagaatgcagtattataaaatctaggaatgtattttacaaaaaagtaaatgaaggcacagcaatttatttaaaaagctatttattgccagattgcttataatagaaataaataaattactatccaccagagtggctatggaaagcagagtgcatacttactgtgggatattatgcagttatgatgagaacaacagaggcctgtaggtatggtcttggaaacatttacaagatatgttgttgaataacaaaatcaaaaagatgtcacattctcctactcaccctcactcttctatctgaatatatttataggtttatatatgcacacacatatacaaatgcacatatatttatgatattttcatataaaaatgagccccaagaaacaaaatgaaacatgcattttttaatgcttgacagacctgccaaactgtccacacatctaagaaaaaggaatcaaagaggattttcaagttttgattgttatattatgcattatttaattctttagatgagaatacatttatatattacgtaataaaacaacaacagtgaaagtttatcagatggtctaagggagggagtttgcattcaagttaagcaaaagagaacaattaagcagaagagaatacacttatatatcaagtaataaaacagcaacagcaagagtttatcagatggtttaagggagggaatttgcatccaagttaagcagaatagaacatggaattcagagatgaggcaaccggagagaactggaagccccaagtggaaaaacagagctcagagtgaaagctgtgggcaggggcacagtggggcaggaatgtttctcacatagtgaagcatcatctcttgacttagaaaaaaaatcttatacaaaagtgtgttgatctttagaaatggataaactacatttgcttcaaaaatttgatgagatacatgcaagtgtaggcttcaaatgttctgaactgaatgaactctaggttactggctgatgaaaaactttatattcatgtatttaatattctaaatttttataaatattcatgtatttaatattctaaatttttaacttaggaaactatcctgaaggtcctttatatagtaatttgggatttttactgaggctccactttgaacaatgcacacttacaccctgaagttcagagcctgtcattacctagtgtctgcccatagaccgagtgtggtcatacactgaggaaggacagtgaggacacagacagaaggcagctgctgcctgcaggccaggaagagggctctcaccaaaatctgcctcatctagcatcttcatcttggattctgttgcctctggatttttgagaaaataaatttctcttgtttaagccacctagtccatagtatttagttatggcagcccaaagagagtaatacaatctcatatacattttatctgagaaattaaatgcaacagtgatatgaggaatacataaaaaatagattatacactactgtaagcgaaaagggttttctttcctcaaatattttaataaggagtttcaaaagcttcttaccctgtcttcataaatcattcagtgtagtgtctcccacttaagggaaaaataatgatgtcaaaaacttataattaaaacacttaattttaataatcattattactttccaaaacagtagttcaatatacatttttttttgtaaaattaagggttttaagcattataaaaaatctagtacagtgcttaagacaactatgtatattcaaagaaaattaaaccaaaatttattaaaggtgtaagataaaatattatcacattttaagtatagttttggaaaactgctcatgatctatagaatcctgtcaacagaatagtctatggcattagtatgacccacttttagacttgaacagaatctctctttgaaaaattgagaggagtgtaggatgaatttcagtggcatccaacaaaagcttcattgtatttgtttaatacattttttaagaatggtgtctagagtctttttctgcttgaaaacagaattcaggaaacaaatctatagaaaaggtgtcttattctctgtcgccatgctagtgcgttttccttatagttcacactggttatacacctgttcttagggagagacactgctgagatttctttattcagtttgttattcagttttggagaataaaagtgttctgatttttcactacagtagaaaggttggcattagtgatgtcctctaggatatgaggaggtgactggtgagtttcaaggggtgtgctataggagtttgtgttgtctgggcaccttccatctctctttcatgggtgtcctttgctctcttctaaatgaagttccagtggttgggctcctgttggctctgctggaaagaatttgaatgtacagtcatgcactacataatgatgtttttttaacatcaactacctatatgatgatggtcccataagattataatggagccaaagaatgccagtggttagacctctgtagctgttgtaacatcatagcacaacacattactcaggggttgtggtgatgctggtggaaacaaagctactgcattgccagtcctataaaagtctagcacaaggatcagatagttgtagatatgtggcgttatttctgagggctctgttctgttccatttatctatatctctgttttggtaccagtaccatgctgttttggttactgtagccttgtagtatagtttgaagtcaggtagtgtgatgcctccagctttgttcttttggcttaggattgacttggcgatgtgggctcttttttggttccatatgaactttaaagtagttttttccaattctgtgaagaaagtcattggtagcttgatggggatggcattgaatctgtaaattaccttgggcagtatggccattttcacgatattgattcttcctacccatgagcatggaatgttcttccatttgtttgtatcctcttttatttcattgagcagtggtttgtagttctccttgaagaggtccttcacatcctttgtaagttggattcctaggtattttattctctttgaagcaatcgtgaatgggagttcactcatgatttggctctctgtttgtctgttgttggtgtataagaatgcttgtgatttttgtacattgattttgtatcctgagactttgctgaagttgcttatcagcttaaggagattttgggctgagacgatggggttttctagatatacaatcatgtcgtctgcaaacagggacaatttgacttcctcttttcctaattgaataccctttatttccttctcctgcctaattgccctggccagaacttccaacactatgttgaataggagtggtgagagagggcatccctgtcttgtgccagttttcaaagggaatgcttccagtttttgcccattcagtatgatattggctgtgggtttgtcatagatagctcttataatcttgagacatgtcccatcaatacctaatttattgagagtttttagatgaagcgttgttgaattttgtcaaaggccttttctgcatctattgagataatcatgtggtttttgtctttggttctgtttatatgctggattacatttattgatttgcgtatattgaaccagccttgcatcccagggatgaagcccacttgatcatggtggataagctttttgttgtgctgctggattcggttgccagtattttattgaggatttttgcatcaatgttcatcaaggatattggtctaaaattctctttttttgttgtgtctctgccaggctttggtatcaggatgatgctggcctcataaaatgagttagggaggattccctctttttctattgattggaatagtttcagaaggaatggtaccagttcctccttgtacctctggtagaattcagctgtgaatccatctggtcctggactctttttgtttggtaagctattgattattgccacaatttcagctcctgttattggtctattcagagaatcaacttcttcctggtttagtcttgggagagtgtatgtgtcgaggaatttatccatatcttctagattttcaaacctgagaaaaacaagcaatggggaaaggattccctatttaataaatggtgctgggaaaactggctagccatatgtagaaactgaaactggatcccttccttacaccttatacaaaaatcaattcaagatggattaaagacttaaacgttagacctaaaaccataaaaaccctagaagaaaacctaggcattaccattcaggacataggcatgggcaaggacttcatgtctaaaacaccaaaagcaatggcaacaaaagccaaaattgacaaatgggatctaattaaactaaagagcttctgcacagcaaaagaaactaccatcagagtgaacaggcaacctacaaaatgggagaaaatttttgcaacctactcatctgacaaagggctaatatccagaatctacaatgaactcaaacaaatttacaagaaagaaacaaacaaccccatcaaaaagtgggctaaggacatgaacagacacttctcaaaagaagacatttatgcagccaaaaaacacatgaaaaaatgctcaccatcactggccatcagagaaatgcaaatcaaaaccacaatgagataccatctcacaccagttggaatggcaatcattaaaaagtcaggaaacaacaggtgctggagaggatgtggagaaataggaacacttttacactgttggtgggactgtaaactagttcaaccattgtggaagtcagtgtggtgattcctcagggatctagaaccagaaataccatttgacccagccatcccattactgggtatatacccaaaggactataaatcatgctgctataaagacacatgcacacgtatgtttattgtggcattattcacaatagcaaagacttggaaccaacccaaatgtccaacaatgatagactggattaagaaaatgtggcacatatacaccagggaatactatgcagccataaaaaatgatgagttcatgtcctttgtagggacatggatgaaattggaaatcatcattctcagtaaactatcataagaacaaaaaaccaaacaccgcatattctcactcatgggtgagaattgaataatgggaacacatggacacaggaaggggaacatcacactctggggtctgttgtggggtggcgtgagtggggagggatagcactgggagatatacctaatgccagatgacgagttggtgggtgcagcgcaccagcatggcacatgtatacatatgtaaataacctgcacattgtgcacatggaccctaaaacttaaagtataataataataataataataataaaaagatgtctagcacatacaattatgcacagtacctaatacttgataatggtaataaatgacgttactttttaatgtatttaccatatttttataattattttcgtgtgtactccttctacttactaaaaacaaaacttactgtaaaacagcctcaggcaggcccttcagctcccttgcctgctatttcccctgaagaccttccagtgggacaagatatggaggtggaaggcagtgatattcacgattctgaccctgtgtaggcctaggctaatgtgtgtgtttgcgtcttagtttttaataaaaaccttaaaaggtaaaaaaattagaaaaattaaaaataaggcctggtgcagtggctcacgcctataatcccagcactttgggaggcagaggcgagaggatcacgaggtcaggagatcgagaccatcctggctaacatggtgaaaccccgtctctactaaaaatataaaaaattagctgggtgtggtggcatgcacctgtattcccagctattcgggaggctgaggcaaaagaatcttttgaacccgggaagcagaggttgcagtgagcagagatcgcatcactgcacgcactccagcctgggcgatagagcaagactctatctaaaaaaaaaaaaaaataattaattgattaattaaaaataaaaataacattaaaaatatataaagaaaaaatgtttatatataggtatacattgtgcttctattttaagctgtgttattacaaaagagtaagcaagtaaaaaaaagttaaagtttattaagtagaacagttatggtaaggtaaggtcgattgattattgaagaaatggatgtttaataaattaagtgtagtctaagtgcacagtgtttatgaagtgtacggcaatgcacagtaattttctagatcttcacattcactcaccactccctcactgactcacccagagcaacctccagtcttgcaaggtccattcatggctatgccctatacaggtgtaccatgttttatcttttatagtgtatttttactgtaccttttctatgtttagatatttttagatgcacaaataattcctattgtgttacagttgctacagtattcaggatggtaacctgctgtacaggtttgtagccaagcagcaataggctgtgccatataccctggatgtgtaataggcattaccttccaggtttgtgtgagtacactatatgatgttcacacaatgacaaaatcgcctaatgacacatttctcagaacacatccctgtcattaagtgacacgtgactgtactcgtaagtgttttcaggaggcaaatagagttcctcagagccacttgattcctggatgcttatttcagactcattgttcatttcctctcctttatagaatctttgcccattgtatttgttcagaaaggaggaatattaatatccactgtcaaattgaaattgtaagcattgctaaaactaaaagaattatgcaatttttcacaaatcgttttttaagaaatttttaattgtgcttcctttataccttgatatagccttcaattttctcgctctgttagcttttctgttctctttttattcctatgtttaatgttattttttcagatttagactgaatcatctgttttagtaaacatctctgggtgcatcagctttggtcataagttttgcttcttgttccactgacagatattctgttcctcagtttcaggcatattatgtttactagcaggtctcaaaatctaattctttcaattcaaaagagttccctaccaaatgattggtgtcaaaggcattcgatgtagcacaattacatagattgttcaaacttttcaacctgaagcatacagatacagttctaggtaagacatcagtaaattaattttcccctgaactagaagatgcaaaattaaatccaagtgtgtcttgaagagtagcaaacattgcttttctatttggaatgattctccttgtcctggaatgtcagcttccagaagaagaatttgcaaatctcacaaatacaaccctagagttgttatcatcattggagtccatgccagacgaattcactaacttccctggttctgagccggttattttgttagctacaacgaaagcttgctttcttttttttttttttcaacatatctagccagtacttgagttagaaagtttatttctccgctgtaaatggatatcttgtgcttctctcacattggaatttttatttcccaagctaatgccaacattctgttgttgccctgacattttttcaggagctgaaaagtgctggtgattctctggcgtggtacagctacgagagttgtatttgccaatgtctgccagtttttattctgttctctttcatattttttttttgttaacatcttctagattgtactaaaaagacttttcaagacaactttccctcatcatcttcttccctggccaccacctctattgtcaggcccctcctgctcaccggcagtactctgctattggaaactctggccaagatccagccctggcccagccccagccacccgagtctgtggctccatctcccattacagtttccatgaccgcatttcaacttaccttctgcacttgcgcgatggtctcttggcaggctatgatcactgaacttttaacacagattacctcaatcctggtcaaggatgaaagggaaaggggtaacagtactttggcccatcagatattaccaacagtgctaatcagattcagagtgattttcttgttacatacccatgagctaactagttgagagagaaaggaggagagggagggagtgggtgggccaggaggggcagaaagaaagttgagggctgattctttgggggaaaaaatggagagatgatacaagacaccgggatgaaaaggactttctgtggttttaaatcaagccagcacctgggacagcaggttaggagggagatgttaagcatttgcacatcagctcgtcatccagtgacagaaaacacactctcctctgttcctaccaggagtccacatctttgtgctgggcaggcacatccacactcatgcctgcctttgcgtgagattgagattctgaggtccttcatcactaactccaacccttgaccatgtggagcatatcaaagaaagtaaagtaaccaagctctgccctggaattacataaagggtaagaaaataggattctttctctctctgagcatctgtttgaggaaagaaaccacagcaatgttcttatagcagtgggatctatattcttttattcaatatccagtcccataccctgaaaagtttcctgtttctcttggtagcagatgtgattcttgtaaagtggggtgggtgttacttgagatacaaagtttacctaatgctagaaattcagtgtagactcactgtaattttagacgagacggtagggcagcggaggtggcacagagttcactgaagcagaaatcatgatattgctcctgcttacccttagaacttgcctatgctctttggaagttttcaggaagctctgtgtgctagaattatcgaaagtcagcagggttttcacatgtgcacccttggaagaaaagcacaaggatggaattcatttgtggtcatgcacctgacttctcattttgatggaaaaatgaagcctctttccctgttacttttagacagctgaactttcttcagtgaggcccccttgtttatgccaggtttggatatcaataatatcagaaatttctaaagacagtgcattgcgtgcagggtatgtgcaataatgcaaggaagattgaataggtgactgtcatcagaattggaactcaagcaaaataacttgtttttgacaccacaaacatcagggaactttacacccatcacatatcttgctgttgcctgtgtaggtttgcaggccaaatgttggtccttcaagagcatttctggctttcttgaacaagaaatttcaatgtaaaatacagttatatttttaaaaaccatttatgtgaaagtaattacagttgggattgttcctaatgattcatcagcattttagtgttttataagagaatgtttgcctgcaagaaaattgactacacaacttttatattccctagacattgttgctttagttgggaaacacacacacaacacaatgttgtcttgataaaccacagcaaagtcatttctgatatggcaagatataattctacatacttagggactgatcatgttttcagagcctaattgcccagcatttaatgaatggatattcgtaagtgtaatttccaatttaattctatacaattataatttcataataattttaaaaggattgctagagatagacaagagttaggttctaatatattctgtcaaatacatccctttcagtagagtctatgtccatataattcagtaagactaatgctgaagaaagtgcttggtaacattttgggtctgtttcattcatcccatttctggctatgtttcactttgtgtttacctccattcctccctccctccctaatccatcatttccttccatccaccagcacagacctgatgcctaagctgaagagacatgtattacacaatataaaattgagtcttctagagatttattgtacaattctaattttaaattaatacatgctcttagaatcttagagaatatatcaaaatatagaataatataaatcaataagcccaacttgcacatattttcactctttacttgtttcacatttttacaataaacatttactaggcaccaataatgtacagtggtatcttgggaaaccgcaagagacaacctcccttcaagaaccatagtttaatgagaagagaagaaatggacattgctatgctaagtgacaataaagacataaaacactatgacaaaatgaaagggtacaatattttaacctaggaacattgtgaagtttgtttctttggagagagaatctgtgcaactagaatttatgggactagaggggcattcatggaattagagtagagagtcaggcagaaagatcatcaaaatgataatctccaggggagaaagcatggatttagcaggacatcattacaatccctttgagtataggtcacataaaccagtgatcaactaaagagaaaagtcaactggagaacggggagggtcctgagtcaggcagacattaagggaagaagtaatatatgccaatatttattaagattagtctgtggtgtctcacgcctgtaatcccagcactttgggaggctgaggcaggcagatcatgaggtcaggagtttgagaccagcctggccaacatggcgaaaccccatctctactaaaaatacaaaaaaaaaaaaaaaaaaatctgggtgtggtggcaggcacctgtaatcccagctactcgggaggctgaggcagggaaatcacttcaacctgggaggtagaggttgcagtgagccaagatattgttgccattgcagtccagcctgggcaacaagagcaagactccatctcaaaaaaaaaaaaaaaaaaagattagtctgtggtgtgaaaatgattaaggcaagaacagcaggtaggagcccattgcaatagtccagaaaggaaggtatgatatttgtatttagagaaatgacagaattaacacagagggtgaatacatgtaaaaaggcattgtgattatagatttgacaagaatttcaagcaatggtgacaagggagaaatgagttttgcagctaaagttacgttttttgctattgaggactaggtttagatttaaccattaacagatatggaggaacagaatggagggatcggaaatggagaaaagctaaacctttattaaaagtaacttttaaatttattttagcatagttttgcataaaagtcacaaaagagtccctatatgaaccctatgcttcatattccttgttgtttacatcttacattagcatgatacatctgccataatgtaagaactaatccattattcataagggaacctcacactttattcagacttccttagtttgagctattttttttctatcaggacaccacactatatggagccagcatgtctccccaggccccttggaactaacagattctcagattcttcttcttgacaattttgagggatgtgggtcaggtgttttgtaaaatgtctctcaactggggttgatttgattttctttctcatgaatccacagggatcaaggtttggggaggaagaccacatcggtagagagccactctggtcacagcatgtgaaggccacatactagccacaggctttaagagcctcaagcatccagctagaggagtgtgtgtcaggctattccactgcaaagtcaccctttgctcctctttgcccttttcatctggcctctttgggagaaggtcactacgcacaccctaagctttggggtggggacttaggctccactgtgtctggagggtaaatagggctttcaatatccatatttcaatataaagccctgtcctatgaaaatgtatttgttagccagatccatgctcagtcaaaattaggtcgtcatccgtgtaagccataaaattaccacaggagaaaactagaagaggcagcctttgaggctgtttttagtattttggttaacccaccactttacttttctaacaaatactgtgtaacagcctatttgaaatgaaatcatggaaacataacctatgtagaagaaaatttcaactctgtatacacacacagatatatatatctgcatttatatatcatatatattatataggcagatgtatactatatattatatcggcatattatatatgtagatatattatgtatatatctgcatatatcattgctgaatcgtaacacaaagggaaataatacaaaagcaatagctaatgaaataatgtatatactttcatatgtgaagactaaagcatcactgccctagtagacatagcaaactaatctgatccttctgccttatattaatcagggaaagcaacagcagttgctgaaataatcatgcctcaattatagcagcttcacaggccaaaggctggtttctctctggggtcggttcaagccccatgtgactgtcaggcacccaaacctcgtgcccctcctcagtgttctccagcagccttggcctctctaggagactgcaaggacagcatgctgagaaggcacctgcttttaaacacctgggtacagaggggtgctctttggtgaaaaatgttctcatggccccgcctgacttaggggaggctggaaaatgcaggtcagctgcttgacagaaaggagaaaatggagacaggatttagtaagcacagaaccctctgtctgctactgacaaccaagtgagcgggtagccaccaacacagaccaatagaggtggacctatgggcacctgcatgtttatatgctatttctgtcagtgatgtagtttttccctgcaatgcagacaaatagttgttaaagttttaaataaaacaaatataagcttcactcaatttttacagtatttggaagcatttttatagtattggaagattaagtggattaaaattgtacaagatacttcatgtttatgaatatggaaaatacagattgatcatctacagggttaattataacacaggtcacctctattatggtctggctatacaacttttatatgagatgcaagcaacaccttgtgtgcaagccttcatgttgcagacatgtagtgcttggggctctccttacaaaacactagtagcattacttcactccatgtcaattactgagacaaagcacctccagcagttttcagaagccccttggaggtgctgtctcatgattgtgagccatagaattagtagaggaggagaggagacagataaatagacaaatagcatggacaaaatgaaaagaaaatgatggttacgtggcagaaggagaaaaagtgagatagatttaaaaacataaacaatgaggctgtacagtggatatttggagagagaaaatttgagagtggggctgggaattaatttttctcagaacattgcctaggtttgaaattgtcctttatgtcaaatggcatgttgaatatttccttgctattgatggcagtaaaaaaaaaatgaccaagggatgctttcacaatgacaaaaagtcatcctaaatgccactgggcaatctaatattaatgaggtctttctacacattatgaatattatagaaactttattgccccattttggtcacagatatatttggcatagaccagattgtcctcagggatgcctttcattagccccctgtttgtataagaattaacaatttggtggtagagtgttaacaaaagcgtggaagttatctgttaaaacaccacctgctgtacacagtctaagggtctctttgcctcttccccttgagagtttgcatacagttcccttctgctcttagcttccccaatcacctgcccataaatccattctcatgacttgagatgatgactagaaattactgtgctgcaaaccaggcgagaggtcttacaagggggctgcctgcctgtgtgtcttctggagtgaatggcaaacaatggaaaagggacccaggggctgctgggggtggggaaaatgagagtgtaggataagaagctgcgctttgtgctctgaggaagctcagagaagagcccagggcacatttcaagttccagggactccagccacgcactcaaggacattgcacaggcaaaagatttctactagactgaagcctctccaaaacctctttcattctgaggattctttattggtgggactctgaccgtcttctctgggctttcctgggcttgattaactggttaacaagaaagacaactgtgcagctttctgagaaaatgctaggagttacaggagcaatagatggcagagtggggaaccttaccaattagcaaagttattccatctaaagatgagaagtctggtccctgagtcaaaattcaatgttggcattagagtacacaaaaaaatgaataaaattccagtctgcagaaggtgtttcattaagcagagcaaaatctcattatttcagactctactcattcagaatgcgtgacctccattcagggactacagatatgtttgcattattttctgtgaaagtcttactgcattttttttccaggagcacacctaacaaatgctaaggagctatttatttacaaaacagattctgagaacaacagatgattgccatctagaagccttaagtgacagcaaaacgtttgttttataaaaggagtattttaaatttaattttttaaaattgaaatacagtaaaactgaattttctgagtgcagctctatgatttgtaaaacatgcacagatggataaaatactatcacatgcagaacacggagcaatggcctcactgcaaggcctcccctcattctccatgcaatcactttgcaggcccaacccgcccctagagctgggcaactgctgatgtgttctcatggaattacacagtgtgtattcacctttagatactagcttcagtcactcagaataatgtttttgagatgcacttaagttgctgagcatattcatagtctattccattacattgctgcatgctcttcccttgtagggatttgcaacttttttttaacctattaaactgttgagggaagtaagtgttgttccaatttgagacaattatgaatagagttgctatcaataattgtgtagaaagttttgtgtgaatataagtttacgtaactctaggacacatagccaaagagtaggatgcctagttctcatggtgtgtatgtgtttaaccatatcaggagccaccaagcttcttgccaactttttggactggctgtattagttcacactctcaatgtgaagttctcattcacagcatgcaagagctccattgctccacatccacaccggcggtattgtcagcattttatgtacctgccattataatgcatgtgtagtggtagcttacagtcaccttgaattgccttgcctgtgatgttgaagagtattttttttttttttccgagacagagtcacccagggtggagtgcagtggcgtgatctcggctcactgcaacctccgcctcccaggttcaagtgattctcctgcctcggcttcctgagtagctgggactacaggcacatgccaccacacccggctaatttttttgtatttttagtagagacgggttttcacagtgctagccaggatggtatcaatctcctgaccttgagatccgcctgcctcggcctcccaaagtgctggggttacaggcatgagccactgtgcccagcctattatgtcgttgttaatatcttctttggtgaagaacctgttcaacactcttgctcatttaaaaattgagctgcttatttacttatggttgaactttagtgtttttcaaatttgtttattctaaagacaagacatttgtcatatacacaatttgcaatattttttccctcatctccaggtagtcttttcattttctcaactgtcatttcacagaataggtggctttaactttgataaaatccaatttaacattgtaatgggttgtgcttttggtggtaagtcttataatatttacctcaggtaggatgatatcttacttttattctaaaagcttgatagttttcattttaatatttgaatacatgatccgttttgagttactttgtatgatttgttgaggtttaggttaaagttttttagtgtgtgtgtgtgtatagtcctccaagggtcccaatataatttgttaaagagaatggctttctctgttaaattgtcattgcatgtttgtcaaaagtaatgggtccattcctcaacattctgttctgttccattaattgttgtgtctactgttcaccaataccatactgcattgagtaccatacctagcaacagtaatcagttttcactatctatagtgagaaaaggaaaaaagaaaagctcagagcagtctgggttatgtgagttatgcaaaatttatcatgcccagggagatcagtatggacttcaagcatgccctccacactcataggacaattgtttagaagcatgttgttcctgactagctgcctcacccattatcttcttgctcctggaatttgtgatgtaaagaacaatgtacagccaatcaacagcttatgttattttaaagtaaattatttggtaaacaacgtagaaactgtctcttctttttccttaaaaacccagttgtaactgcttaatcaaagtgtatattcagggcaacttaaatctatacttccaggtagccatcctcaggccttgaactcaaataaactttatacttaattctattttctgaatctcgatgtttaagattgacaataataagtcttaaagccaggtgaagtgactcttctaacatgatttatctttttcaatattggtttgggtatactacttccattgacttgaatccaaattttaaaatcagtttgtctatgtctgtaaaaatttatcctgcgattttgttaagaattttgttaaatctgtggtttgatttggggttatgtgacactcatattataatgagtgtcccaatccataaaaatagtatgtctttcaatttacataggttctatttattccttttattggtatttgtagtttttagcctacagattattctatgttttgataaattctaagtatttcacttttgggggaacttctgcaaatggtagtagttgtgttctaatttggttttcagtttgtattactgacaagtgaaaatataaatttaactttttatgtgttggtcttgcattccactgctttcataagctaacttattagttctagaaggcatttttgtatgttctttagaattttctacatcgacaattcacattgtttgtgaaaagcaacaacgttatttcttcttttctaagctgtaagccttttatttcttattcatattttatgtaatggctagaactttcaacacagttttgaaaagtagacatccttgccttttttccaatcttaaggtgaaagccactgagtctttcgtcattacttaagacatttgctgtgtgctattttgatgccctttacctggtttaaatttccttctatccctagtttgctgcagattttctaataaatagattccaaactctatcaaatgccttctttttgtgtcatttgatattgttgtatggtttttctcctttaaactaaaaatatgatatacaatccccattggtttttaacatggaatgagcttgcattttcaggaaacagcacattttgttgtcattatttttacatatattgctggagcagatttgccaacatgttgaagatgtttttgtctgtgttcatgaggtctatgagtatacaacttttctttatctgtctgcttgtgttatcagagtacattgatttcctttagcaacataacaaattaccacagacttagcagtaaaacaacacccatttgttagctcccagttctctgaatcagaagttcagagacagcatgcttgctttccctgttcatggtctcaagggctgaaatcaaggcgagctctcatctgtaggttctggggaaaagttcacttccaagttaattcagatggttgaactaattcagttccctgtgggtctaacactaaggtcctcacttatttgctgacaatcacctgaaggccactctcaggacctactaccttcagacaaacccgagagacattgcaggttttgctccataccactgaaataaagttttggtttcccagtgcatataaaagtgtatactatactgtagtcatttaagtgtgtaatagcattatcttttaaaagtacatatcttaagaaaaaaatgctttattgctaaaaaatgccaacaatcatctaagcattctacaagttggattttttcctggatggtcttgcctccacgttcatggccattgactgatcagggcagtggttgctgaaggttgcggtggttgtggcaatttcttcagtggctcactcctgtaatctcagcactttgggaggccgaggtgggcagatcatgaggtcaagagattgagagcatcctggccaacatggtgaaacccatctctattaaaaatacaaaaattagctgggtgtggtggcacacacctgtagtcccagctacttgggaggccaaggcaggtgaatcgcttgagcccaggaggtggaggttgcagtgagctgagatcccaccactgcactccagcctggcgagagagtgagactctgacttaaaaaaaaagaggacatatcttaagaaaaaaaaaatgctttattgctaaaatatgccaacaattgtctaagcattctacaagttggaatttttcctggatggtcttgcctccatgttcatggcaattgactgattagggcagtgattgctgaaggttgtggtggctgtggcaatttcttaaaagaagacaacagtacatctttctgcatcatttgactcttcctttcacaaaagacttctctgtagcatgtgaagctgttctttggaattttgctcacattagaaagcctttcaaaattagagacaattatttcaaactttaccactgctttatcaactaagtttatgtaatattctaaatcatttgttgccatttcaacaatgtttacagcatctgcactgggagtagaccccatctcaaaaaaaccatgttctttgctgattgttaagaagaaacttctcatcccttaaattttattatgtatttgcagcattttagtcacacctccaagctccacttctaattctagttgccttactatttccaccacatctgcaattactttctctactaaagtcttgaacagcacaaagtcatcaattatggttggaatcaacctcttccaaactcttattaatgttaaaattttggcctcctcccatgaatcacaaatgttcttagtgacatcttgaatagcaaatcctttccagaaggttttcaatttacttttcccaggtccaccagggtaatcactatctagggcagctatagccttacacaatgtgtttctaaaataataggacttgtaagtctaaactactcttggattcatgggctgcagaaaggacatgttatcagacataaaaacaacattaatctccttgtatatctccatcagaactcttacctctgaccaggtgcattgtcaaggagcagtaatattttgaaataaatttttattttttttctctgagcaatagttctcaacagtggagttaaaatatctagtaaaccatgctgtgaacacatgtgttgtcatccaggttttgttgtttcattgatacagcacaggcagactagatttaccataattcttaagggcactagcattttcagaatggtaaatgaacattggcttcaagttaaagtcaccaaattcattatcccctaacaagggaatcagcctatcctttgaagctttgaagccagatattgatttctctctagctacagaagtcttagatgacattttcttccaatgatgtcttcaccttcatcattgatcttagctagatcttctggaaagcttgctgcagcttccacatcagcacttgctgcttcaccttgcacttttatgttatgcagatgacttctttccttaaacctcgtgaacctacatctgctagtttcaagcttttcttctgcaactttctcacttctctctgcctttactgaactgaaaagagttgaggctttgctctggattaggctttggtttaaggggaggttgtggcttatttgatcttttatccaggccactcaaactatctccatctcagcaacaaagctattagtattttactttcttattatttgtgtgttcactggagcaacacttttaattttctgaaagagcttttcctttgcattcataacttggctgtttggcaccagaggcctagctttcagcctatctttgctttcaacatgccttcctcactaaacttaatcatttctaacatttgagttaaagtaagatacattggaatcttcctttcacttgaacacgtagaggtcatttagggttattaactggcctattttcaatattgttgtgtctcagagaataggaaggccagaggagaagaagaccgatggaggaacagagcagtcaaaacaaacacaacatgtattgactaagtttgccatcttatatgggcttagtttttggtacctcaaaacaattacaattggcctagtacagtggctcacacctataatcccagcattttgggaggccaaggtaggtggattgcttgagcccaggagttcaagactagtctaggcaacatagtgagaccctcccctctacaaaaaattaaaaaataagctgagcatggtggcacatgcctgtgcttccagctactccagaaaccgaggtgagaggaaaacctggggtgggtagctcctctccacagctggtcatctcatcatctctttggctctcagtagagaggagaccctggtgtgggtagctcttctctgccgctgaccatcttgtagtctctctttgagtctggccaagcctggggtatttctggccttcataggagagaaagcatgtgctgattggtctatgggaagccatgggtgggcctggagagagccccataaattcccattcagatcggcaggacaggcagcctggcccccaggcttcaggccttccttggcttgaagatggggctcttccagggaccttccctttttttccccagagtctgtctgcctcttggcactgttcatggtgccgagactgttcattcatgttcatcagtccccaaagtctggaatgggccaaggcagcaggaggttggcatgtcagtgctgccccaagtgtgtcacacccagcttggttgtgatagtgcccaggcttagctacaactttgctacaagattggagtgggcactgggagtggagagaagccaggcagtgggagcaggcacttccaagggtgagaggggagcaggggggcccttcccaggcccctgagagtgcagagatggctgggtccgcagccgtggctgggcagtggcagctgcatccgcatccgggagggaagagctccagcctgctcctggtccccaagagcacaggaattcccaagtctgcagccgtggctgggcagccacagctgtgcctggggggcacagggctcctgccctgccaacttagaagcgggcagggcatctgcctgttcccagctcacgccagctccctggagtgcacagcctggctgcacctcccccactgcagccagcatcatggcagcggctgctctagatgggccgccattgccatcattgtaacacgctctttgggactttgtggttcctggcatctccaagcttccaggcgccactgcattaccctagtccagacacaggtgcttgcaatgaaagcagcagtgcagtagatctggtccagcagcagcctcgcaaataagccagcacctgtgccgggacttggagctgcctgacacaccacagcagccagcctgcctggctgtgtgcactgaccggaccctgcacttgctcaccacacatgtttcaccgctctgcatctggcttgcccttggcagacgtgagacccgagccgaatgcagcctgctatgtagagcggaacaagctaaaataatgaacaatattcaggcagaaggtgtccccagccacagaggtttctggctggcgaagtgacaccccaaggattccatgacaccaccacaaccagtctttatattttcttctttatactttccgtccttttttctggctttaggtatatttttgctcttctatttttttatgaggtggacaattagattactggtttttgactttttttcttttctaaagcaagcaatcactgctatacatttcccactatgaatagctttagctgtatacttacttttttttttttttttgagacagagtctggctctgttgcccaggctggagtgcagtggcataatcttggctcactgcaacctctgcctcccaggttcaagtgatcttcctgcctcagcccccctagtagctgggattacaggcacacaccaccatgcctggctaatttttgtattcttagtagagacgggtttttgccatgttggccagtctggtctcgaatgcttgacctcaggtgatctgcctgcctccgcctcccaaggtgctgggattacaggaatgagccatcgtgcctggcctatacttaacaattttttatcttgtacttttcactcaattcaaaataatttcttaacttcatttgggagttcctttttgactcattagttattcaaaattaagaagtgatggctttatttccaactttctggttattgtcttgttactttctgttactcattctttgttttactctattatggagtgaatacatttcatatgatttttatcctctacaattccttgctctttgctttctttgtttgggatattatctatattggctgtgcaccaggtgcactggaaaagaatacgtattttaccatttgcaggtggagtgttacaaaaatgtaagttaaatccagtcatttcatggtggtgttcattttttctgtatacttgattttctgtctactggttctatcaattactgagggaggatatacccaaatacattattgatttgtctgttttccttttcagttctttcagtttttttctcatgtctctgaagccttgtttttaggttcatatgaggggcgcctgcaggacagtgccaagctgccttcagcaacccccttagcttccctcccgtgttcatcagtgaccaaagtctggagtcggccaaagcagcaggggattattttgacttttaggattattatgacttcatcacaatgaaatgcctctttttgtccttagtaacatttgtttctttgaagtctactttgtttaatattaatatagctgcttccagctttctttatattttgttcgtttttaaatttcttattgagattttaaggtaaatatgttgcaaatattttgttgttgtttttgagatggagtcttgctctgttgcccaggctggagtgcaatggtgcgatctcggctcactgcaacctctgcctcccaggatcaaatgattctcctgcctcagcctcctaagtagcagggattacaggcgcccaccactacacctggccaattttttgtgtgtgtttgtgtgtgtgtatttttagtagagatgaggtttcaccatgttagtcaggctggtctgaaactcatggcctcaggtgatccatctgcctcagactcccaaagtgccacatatttttaatatacttcattttctacagaagttttatttttacagcaaaattgagtagaacctgtagagcatttccatgtatgccttgactccacacactcacatctcccctcactctcaacatcccacaccacaatggcacactgtaacatggatgttcctacattgacacatgattatcacacaaagtctacagtttttgttaggattcacttactgctatgccttttatggattttaacaaatatataatgacatgtattcaccattgtagtataacacagaatagtttcaccgttgtagtataattaacacagaatagtgtcaccactgtagtataatgtggaatagtgtcactattgtagtgtaatgcagaatagtgtcactgccctgaaagtcctctgcctacttatccctttcttccccccaactgccagtaaccattgatcttttacttctgcacagttttgctttttccagaatgtcatgtagttggaatcctttttagattagcttctttcatttagtaatacgcatttctgtttccatattttttcttggttcaatactttctttccagcattgagtaatacttcattgtctgcgtgtagcatagtttgtttccctacttaaggaaatcttagttgcttctgagactggtctatataaataaagttcctataagcatttatgtgcaggtttttctgtagatataagtttacaattcatgtgggtaaatactaaagagtgtatggctgggttgtatgataaaagcatgttcagttttctaagtagtggtcaagctgtcttccaaagtgactgtaccattttgcattcccaccagcaataaatgatagttcctgttgctctatattcttaccaggatttggcgttgtcagtgttgtggattttcaccatttcaatagggtatgagtgttatgtcactgttgtttaaattcacagttccctaatgatgagatgttgaacttcttttcccatgcttattttccatcagcatagcttctttggtgagatgtatgtctatgtcctttgccatgttttacttagatttttcctgatcttatcgttgagttttaagagttccttttatattttggagaacagttctttttcagatgtgtctcttgcaaatagtttctcccagtctctggtttgtcttctcattcacctgacattgtcttttgctcagcagaagtttttaattttaatgaagtctaacttatcaatctgctttaacatgatcatacctttaatgataaatctgtaaaatcattgtcattctgaagttcataaaattttttcctaggtcatcttctagaagttttatacttttgagttttatctttagatctttgtgcacttgaaattaatttgtgtgcaggatgttaagtctattagtaaatttatttttttgcatgtggatgtccagttgtagcactgtttattgaaagactatcaagatcatcctttctctattttattgctatttattctctgttaaagatcagttgactgtatttatgtgcttctctttattattatatcaacaccacagtcttgataaagttagcttatggtaaatcttgaagttgggtagtgtcagtcctctaacttttttctttcttttttttttttttttttaagtcggactctcgctctgtctcccaggctggagtgcaatggcgcgatctcagctcactgcaacctcctcctcctgggttcacgccattctcctgcttcagcctcccgagtagctgggaccacaggtgtccacctccatgcccgggtaatttttttttttttttttttttttgtatttttagtagagacggggtttcactgtgttagccagaatggcattgatctcctgaccttgtgatctgcccgcctcagcctcccaaagtgctgggattacaggcatgagccactgctcccagccaattttgttcttttaattcaatataacgttggctattctgcatctaatatatctccatatatattttataatcagtttatcaacattcacaaaatagcccactggaattttgatggggattgcgttgaatctatagatcaattgagaagaaccagtatcttggcaatattgaatcttcctattcataaacatggaatgtctctttatttatttagttgtttcttgacttctttcaacagattttgtagttgtttttatatagatattgtacatattctgttggatttatacttatatatatttgggggtacaagtgtaaatggttgtgtgtttttaattttagagttcatttgctcattgctattatataggaaagtggtagggtgtttagatattaacctcgtatcatataatcttgctatatttgctgtttatcttttttcatacatctacttttaacctgcatataatatcacatttgaagtgaattacttctaagcaggtaattttatttgttattttgcaatatctgccttttaactgatgttttgatcatttttatttagtttatgacaggcttaaatttagttctttttaaaatgtgttttttaggtgctccctttcttttacacttttgttttccttccctttgggtttgggttacttgaacattttttagtattctattacagtctacttagaataaatattttactctttaagttgaatatagtaattttacaaccatatatgttcctgtacacttccgtactttatattttagttgccttatgctttaagttgatatacataaaaaacttttccagcaatgctaaggttttgactttaaaccttcatacatattataaaaaatctccaaaggggaataatagtttattatatttccccaggtatttaccatttctgttgctcctgcttcattcctgatattccaggacttatccattatcagttctcttctacctcaatacctttcttttttctttaccagttgtcttggagaaaatgttttgcatggaattatcttagtttttctacctctgaaaatttcacataaatctgaaaggttacttttcctggatatctagttctatgttgacagttctttttctttcaacacttaaaatgtttcctcctgcttctttctggctcttaggcaagaattccacatctatttgagtctttgtttttgaaaaacaatgtgtcattctttttctgttttcaatgtacttgcctttattattcagcagttgggggttgcttggaatcttgaattggtatgtttatgtcttttgacagatttgagaaatttgcatttatattttttttacattttgtcgaacaccacatctttcaccagttctgtaatttcagtgatgcaaatgttagatattttggtatcttcccacaggtgtctcaagttctgttcatgtaaaagtttttttctgttgttcacattgaatagtttacataggactatcttgaaattcacaggctataatcaactaaatagtgacccttaaaaaaagtatgtccatgtcctaattcccaggatttgtaaatgtgaccttacatggaaaatgggtttagatgaggtcattctgaattaatggagtggtttataaatccagtgacaagtgtgcttataaggaacacacagcaaagaggtggaggcagtgtgacaatggatccagatattgtactgttacaaccacaggcccaggaatgccagcacaactgggaagaagaaaagaatcgaatctcacatagagctttctgataaatcatagctctgccagcacattcatttcagacttctcgcttccagatctgtgagagaataaatttctgtcgttttaagtcacccaatttgtagtaatttgtgacaagagtcacgggaatcgaatgcatggactgagctaatctaaggtttgtttttgttgttgcttctcaactaatgttatcttttggttctaaatagttccccttggcttattttttgttctatttctttcctgtgattttccatgtttttatttattaaaagagtgattgcctttgtttattgggccatttttataatagttgatttaatatctttttcagaaaattctaacgtgcatcatctcagcatatatgtcaattaactgttctttcatatacgagttgtgattttcctagatttttggatgcccaataattttggatattatccaggatatttttaatatcttattatgagactgtgggtcttttaaaaaaatcctacaaataatgttgatatttttgtttaacaggcaatcagtcgggtttagaccacaagttcgaaccagtcttttatggattataaattatccaatatcagctgttttcaaagcctttgcggtgttgtttatatctgacccaggcgagcaccacccagtggccaggctgggacatgtgcagtggtttatcccatagttcagttctcaaagtctattgacactaatgagggtcaaagccacgcatatatcatttgagatgaactcagaagtacaaagtcaacattcagggatcactttctcaagctctcctctccctgcaatctccctagtatttttgcagtactcttggtcttccccttgtggttgtcataccagaaatctaaggctttgggtgtcccactctgttgttcagtgacaggtagacagagacaggcaaaagcaatagagtttcacacgacccgtaggtgatcataactcctctgatcagacagggaggtgcccttccttagagttttggctctactgccaatgctgccatgagattgcttggggactgggtcatccaagaatagaggggaaaaatgcataataattcttactctcactgagtgttaggagttatctttcttatttcttttttttttttttttttgagatggagtctcaccgtcaccctggctggagtgcagtggtgcaatctccgctcactgcaacctccacctcccggattcatgtgattctcctgcctcagcctcccaagtagctgggattacagacacacagcaccacacctggctaattttctttttttgtatttttagtagagatggggtttttccatgttggccaggctagtcttgaactcctggccacaagtgctccacccgcctctgccttccaaagcgctgggattacaggcatgagccactgcgcccagccatgtttcttgagtttgaactagaggattgctcctgtcgttttctatatcaatgctctgatgactacttctgggttggaggtgtggtcgagttcaggctagaggatattggaggcaatactgacagttcagtggtactttaaattctgatcttttcccccaaactgtctgctactatttattttcagagtccttaatagcttctccatgcattctgtcctggttttaaggcaattttaagtaagaaagacaagtgtgactatttcatcttctactaaaaaaagaattatggtagataattttaaaaatcacattgtaataattttaccaaaattactctacagtaaagtgaataatggatgtgtgatccaacagatacagtgacagattgttgatgttacagtgacccatcctgtgtaacagtgaaaagatgatgatggcgccaaccataatggactgatggataatgcttccttcaagcttcctccatttgtgaaaatctcatcaatttcaatggtcagacctcattcacttcgaagcaggaggcagtcagtagaatatgctgaaaaaaaaaactgagaccttaagaaaaatcaactaatacaaatgtatatgtgtatctttacaacagagctaatgtagtatcttctagttccaatttcaattctgatgattagtgattttgtcatactccattctctagtcctgtaaccaaatttttaaacacatgcatgcgtgattgcatagacatagtatataaacacaatgcaaacatatacatatgtgtgtctgtatatatagtatataggtacatacagatatatttacacacaaagatacacatatatctatttatctttatatatctagagatggagtcaaatattttgcaattttcaataaatataagtatacatttcattacaagtattgaccacataaatatgtgatctgtgtctgacactaagactttattattttgtcttctgttattagtttaatttaaaagtgatggactctgttagtcaatacaactcattctggcatactatatgtactgtgagtcatattatattttgtgtgctatgacattcttttcaaacacagtgactattataatcaagctatccaaatatcagtaatttaaaataggctagtcaccgtatattccttggaaaagatggtttattgtttttataagtgatatctgtttataaaataagtttccctatacatctcaactaggaaaaactttttcagatatgcatttgctacagtgcaatattagcggttgcctctatttaaaattctagactttaaaaattggatttcttcccaatcttatgtaattcagatttttaactaattcagccaaccatctcattagcctggatttccgaagttggactgtgtttgtcctgaatctcagctttgattattctatggatccaaagaattattagtgtcctaataaacattgttctgtccatttgaacccttgagcctttcttttcctactttaaagataccagttaccgctgtaacttctgcttgacttgagcaagagcttaaagatctttttcggctgcaataccctaaaattttaatcatcacctctggaaaaaaaaagaagtgagttttaaagctgggagttccgacagagctttaaaaacaataagcaagaaagagacagtttctagagatttctcccatgtaaactgctatttatgtcatctttagtgccattggcaccgagccagccacagccaggactttttttgttgcttggcgaaacgggaagggcaggaaagaagctctatactaagaaacagtttcttagtattttcatctctctgcaaatcttatttgataaagttaagctttgtcaattaaagcttataagtgttttaataccaagtttagctttttaatatatgtaccaaacttgtctaacacataggcatattaaatagtcaattatacggtttgacttaaaagagagcaagaaaatacatcaacccctcaatgaagctctgtctccaaataatctttccactgactctgctgatgtttactttaaaaactccagtgtcaactgtaacatctaagcaggtccatgcactgaggacctgcaggctcagaacgtaatggaaggtagcagttgaggatattcaattaagataaaggaccaaaaagcagagatgcaggctaatacgtaggcagagagagataagaactttgaaaggcagggagccacctagtgcaagaggcagtagaaatcagagcagttctgggaggggaaaggagtagggggatacataagtggagggtgatcaggtttagagctggacactgacaaatctgcatgaagccagacctgaatttccgcatgagtaaaattttaaagataacctctcacctctctccaaatggttatctgtgaaactatactccctccacacccgcacatgcagctctgctcacacactgctcacaagcaggctgagccaaaacccaattgtaagaaaaatttaaaacctcacctgtagcaaatgcagcacattaatataagatatgaagaacaggctgggagcggtggctcacgcctgtaatcccagcactttgggaggctgaggtgggcggatcacaaggtcagtagatcgagcccatcgtggtcaacatggtgaaaccctgtctctactaaaagtacaaaaattagctgggcgtggcagcatgtacctgtaatccgaggcaggagaatggcttgaacccaggaggcagaagttgcagtgagccgagatcgtgccactgcactccagcctgggcaacagagtgaaactccatctcaaaaaaaaaaaaaaaaagttatgaagaacaggggttactggggagctagacgagaggaggcgtgtaggaatactttgtaatttccactcattttttctgtaaacttgaaactgcctccaaaagtaaagcctgttaatttttttaaaatttaaaatctaagatagatggaacttatgatatttttccaggatgaggacttcactgcactagcattcttcagtaaagtcaacttcccatgattcaaaatccttgtcatggctgcctaatcctctggggcagacatgtccttgcgttggggtgtgaagactgctaatttgtttgggtttgcttttcattgagagtcagctgtgtgtttttctcacagctatatcttttcttctgaagtgatcagcaattacttcccggctgataattttgttatttatttatgattttttaggttgcaaaggtggtcttccaaaggaagtcctttggaaattgtatgaactttggagagggagagagggagaaaagcaagcactgagaaaaagcaaatggcaaagctatgcctcacagaggattcaggagaaagcacaggagatggagaaagaaacaggaaaaataatttttggggtggtaaatattacaaataaagaaatacagggtagtggggaaacacataacaaggtgaactcaccgaaagtgaattcaaagtacccagaaaagggtgttagatctggaaatcaatcatctctttgaagtgtgaatgcagaggctgaggtgggttctgaaggacgtgagaattacacatcccatagttaccactgttagggatcagaagccccaaattgaatcaacttagaggaataccgatatctgcccaggcctgatgcaagatgcacaggatgcgtctgcatctttaccacacgccaaaaacccagcaccaatctcaggattcaggtgtacagagggggccaggcaatgcagaacccctcattaaaagaaggcaaggacactggatgatttccaaagaaggaagagtgatagagagaagcgccataacgaatgctaaatgcaggggtggggagaggttttagtccctctctgatttcgaagagcttatttattactaggaaaataagctttggattacagatatttttctgctctttttaactttgttacaaggctgtctatgactgttacatgtctaagcataaccatgtttgcaattatggcttctgaatttgatgtcatttttggaaagatatcaatactgagcccataaaattctttaaaacaattagttcaggtgagatggcctaaagaaggcagtgatggaaggaattaggctgcatttcaggagatggaaatggcgatgaaatgattgatggctcaagagtggcattggttagtggggaggaagaccaccttttcacatatttcacatttaagggagatgagtagtaaaaagttgagaactctgagagaggagtgaataggaaggtcaggtgaaaatgagctttacctcattccatttccatggaaatagaagaaatttcaggtgaaattttttttttagatagatgataagaagaatcatgagacaaaattgaccaagtgaagagcaaccttgatgtgggaagcagtgatgtggatacaagagcaatgttcaaggaaataggtgtaaataaccaccaggagtgatgtgaagttatcagggatgaaggatttacttggatgagcgtcacagtgaaggttcacaactagatttggggagaaagttattgtagtgacaaaattccactgaaagtgaggcataaaaaggagatgagccaaattaaatgaaataagggacaatagcatttgtgaagattcactttgcaccagggttgatggagaagatagtactagcaacaaacttgacaccagtgcaatattcattcccaatactgaattgaagttcagaaacagaaatgtccacttaatcgcccaagcctatggaaccaggaagttgccatgccacagtttgtgtgatatttgtctgattctgagtactattgtgtttgtgcatattcatcctgattccctgtgtgaatgtgtgtgtacctgtgtgtgtgtatcacttagaatttgtgtgacttccagcaggtttcttcatttctcttaatatttctgaagttctcttcatccccttatacattatatatcatgcctataaaatatctaccttacagggatgctgtgaagtttagaaattatgaacataaaagccttggtatcaggtctgcaatgtagcgggtgatcattaattggtagttcaagggaaacttcttgctcttcccagtcatacatttttgtataaaggatatgtactctactttactaatccaattatttcatccatattttttggactttgtctctaatgtttgcctttattacatcattataggttaatttcccttctctataacttaaaatagactgagtgctattaattgcttgtcaagtcacttcactttctgatttggaaatgcaatacgtttttggatcttcatctgattctcaaaggagcaattatttgtgattctactactttactttgttttccccaaatgacaaacaacaattattacttaaagtgatttctatttaaataaaattttacaactctatatatgtgatatatttttcgcaagatatcttcttgaaaataccaaatatcttttaaggttaaatgttaaatgtctgttttaaaattaccttgtagggcaggtgcagtggctcacacctataatctcagcactttgggaggccaaggcaggaggatcacttgaggccaagagtttgagaccagcctgggcaatacagggaaaccctatctctataaaaaatgaaaagaaaataacttaagcatggcggtgtgcacatatattcccagctactcaggaggctgaggtaagaggactgcttgagtgcaggaggcagaggttgcagtgagccatgatcaggctagtgcactccagcctgggggacagagagaggccttgtctcaataataataataataataataataataataataataataacaaataaatacaatacaataaaattatctggctgctttagttttaccttgttagaaattagttttgatgggattagactcactgagtttaacacaatgaataaacatgtaaattcccccatgaaaatactttaaaggagaaattaatagtgtccatcttgtaaaacttatttcccctagatttttttaaaattctacatcagcatagttccatatgaaatagtgagatagttctactccattcctaagatgttctttaaacataatttttctcattattgcaatttaatatgaagaaatgtgcccaaccaaatgcctgaggaaatagtttacattttgttgttttgaaggacaagtagagtgagccctgtgtgtatatagagaaaaccatttggaagtaaacatagacttgaatcccagagctgttaatgaaactttaggcatgccgcatagcctttctgttcctcagtttccttatgtagagagattaaatgacctattatttaaatcgatgctctccagtgtcttcttgggtgatgagtgaactgtctctgtaaaactgagtgtctttttttctctcttgtgtgtgtggtggggtgaaaggctctctgcagaatgctgctagagggcgctgcagcctctcaggcactgtgggggagctgtgatgtcagtctggggcaacccagaggagcagggcaggaggcgatggagggtgatgcaccctgggcactgggagagcagcctggcgggggctcaggtgccagggagaccagtgcttgagaaatgctcctgcgaacctccctgggtcccagtctgggccacacactgctccttgtttttttgtttttgtttttaataattttatatattgtggtataatacatatgacataaaacttgctattttaatcatgtttaaagatacaattacaattgtaaagattaattgtaatcccattgttgtgcaaacctcactactatctattttcaaaagtttttgtcattccaagaagaaactgtgtacacgtcaagtgacatctctccatgtacctctcccccagacttggaaacctctaatctgctttatgtctcaatgaatagacagaaggttctaatcagaatgttctaatcagtatacctatgggatatacccataggtatacccatatccctatgggatatacccataggtgtacccatatccctatgggatatacccataggtgtacccatatccctatgggtttacctttgtggaggacttggaatcaagctttagaaaaaggtaaagaatacatgtgccatgctggtgtgctgcatccattaacctgccatttacattaggtatatctccgaatgttacatatgtatacatatgtaacaaacctgcacgttatgcacatgtaccctagaacttaaagtataataataaaaaaaaaggtaaggaatatgcgtgtgtgtgtgtgtgtctgtctgtctgtctgcattagaaagaaatagctggaattgctaatgaataaaaagaacagacacttgagaagaggaagaagaaagggggactggctgtgaagcttgttattatagttaaattactttattatgagaagtgagatatatattataaatgtattttctactttaactttttctctttctgggatgtgagcacacacatgccctatgttattagtctcttttgtttgacatatgtgcatgtatgtgtggacccgtgtgagattaaaaaagggactaagtcccatgcctgccttggttttcagccaagagatgaaaacagccaaagctgtacggagaagagatcaggagactgggaagtctacttagagtcaaatagatccaacagaaccccacatccctccccatgccaaaaaaagaaatgtaggaatcaggtggatagcaatgtgttctgaagtgtgagatacgtataaaaatgtgaatgatgatactgataaaacaataatgagaagcagatgaggtaatatctgtgaaactacaaagcaagatgactaccatatcctaagtaatcagtcacttcctctcctgccttcatttcctttatttctcccctttattttcaggtcaattaaccagcgaacactcaatacattctgcttgggtgtatgtagagataggaagctgcctataatacagaggaagcccattcaaccattatttagctcctcccagtagaatgtgtttggtggaggctgctgggttgttcatctatctctattggcttgtccttggaactgcttctctttcttcttggaaaaggtttttttgttagtttacttgattggtttttgtttttgtttgtttgaacatcaataatttactcctggcagggagtggtggctcacacctgtaatcccagcactttgggaggccgagttgggcggatcatgaggtcaggagatcgaggccatcttggccaaaatggtgaaaccctgtctctactaaaatacaaaagaaaaaaaaaattagctgggcctcgtggtatgtgcctgtaatcccagctacttgggaggctgaggcaagggaatggcttgaccagggaagcaaaggttgcagtgagctgagatcgcgccactgcactccagcctggcaacagagcaagacatcgtcacaaaataataataatgataataatttacttctaatagaggcagaaagtgtaggtacttgccacttagagtatgagtcacgacactcgaggatgtgcacaagatccagtgcaggccaacgaagtttccagaggctgctttcacaggagccagagagcattcatccctcttgttggaaaaatgttgctatatgaagcatggtggctaatgttgccacatctcccttccctatggatgaatgcggattgagagaacaaacttgtgtatgtatagagtcctggaaaaaccgaagttcctgaaagctgttttggcttttctaagatgtgtaatgagagctcaaaaatacttcctttttattgaaactccttctatttggcattctatgtttgcaacataagtatctgagcttttatcatatcgaaatatacattttccatttcggttccttgtactttgattctggcagaatgatttaagccatgcttgaatttgcaattctgttcagtagtcagtcattccaatattcctgacagtagtgacttaacctttttctcccaagctcctctaaaaattcttcatatgatatagattacaaatggttaccgtcctaggaaacctgtttttgtatttgatatgtcaatgtctcagatcttgtccacatactttcaaaggctgctccgctctagcttccccttagattttggattgtagcctttgtttcttctctaccactctccctctgtgatctcattcctggcccctgactttagcaatcataaaaaaagatccaaatttatatttagattttttaattgacttccaaaccaatacagtttggctactaaatatcatctcatgaatcttttaaattccaagtctgaaataaaatttgctgtatttatttttccaaattttctctattcctgaagtcatggggttggtaaattattacctgttatccaccaagtcacccagtatcagagcgccaaataaggctagcttttcccaaccaggttccttatctgaatcacagaacaaaggaaattatttgaatcacagatcaaaggaaatactattttagctcagtcatagccttctaaaaatttctgtttttgttgaacctaccaaggattattgttttaagagtaatgttactgtgcaaattctgagacattgaaacaatttgctcttgggtggaaagaaatcaaggtgtggtcttagaagctgtcttacgatgtttccaagtctcttttcaattcatctgaattacagaacaaaggaactattttctccattatttcaaagacggtgagtaactatactcttccagctgcacaggatatgttagttaattgcacacaataagtgtcttaagacactatgatgtaatctgttatggaaacctgactaccaatacttttattaccctaagtgttcttttattatttcacgtctccttatttccattgccaaaactttagtttggcaaatataataagtttcttgaattattgaaatgatttgcaaaataatctccctgccttatatcttgccctcatcatttatcagcatgttatgtctaaactaaaattgcctgtcccctcacaaatccttcaatagctctataaaggaataaaatgatcttgagacatgcccaccctgtggtaatgcttcatggcttgcttggtttcatcctgtgatgctatcttttaaaatattgcctgaaatgaaagcatacctcatgtgatgagaaaaacttttcacccaaaactttaaactcacaattgtaaatattctttgtcaagacttttgctttaagtttctatagtcaactaagttgatatctgtttttaggtaaatatttttaagatttaagatttccaataaagcacaaagatttacactattccatgtgatggaacaaaaatttaatggattaacaactcttgaggccataccccctatccttgatgcgaggatcagaactctgagagccgacatttcccatgccaaccccacttggggggaccacattgaagagagacttggaactgtcctagagacagcttctaagacctcaccttgatttttgtcttcccaagtgaaaagagtttcatagtgtcaaaatttaagcagtaaaacagtctgaaatcaataatcattggtaggtttaacaaaagcagaaattattagaaggctatggctgagctaaaataagtaaagggatagttgaagacttaggcttagaaaatgattaggattgcctgttcactctgatggtagtttcttttgctgtgcagaagctctttagtttaattagatcccagttgtcaattttggctttggttgccattgcttttggtgttttagacatgaagtccttgcccatgcctatgtcctgaatggtaatgcctaggttttcttctaaggtttttatggttttaggtctaacgtttaagtctttaatccatcttgaattcatttttgtgtaaggtgtaaggaagggatccagtttcagctttctacatatggctagccagttttcccagcaccatttattaaatagggaatcctttccccatttctcgtttttgtcaggtttgtcaaagatcatatggttgtagatatgcggcattatttctgagggctctgttctgttccattgatctatatctctgttttggtaccagtaccatgctgttttggttactgtagccttgtagtatagtttgaagtcaggtagcgtgatgcctccagctttgttcttttggcttaggattgacttggtgatgcgggctcttttttggtttcatatgaactttaaagtagttttttccaattctgtgaagaaagtcattggtagcttgatggggatggcattgaatctataaattaccttgggcagtacggccattttcatgatatcgattcctcctacaaaatgggagaaaattttcgcaacctactcatcttacaaagggctaatatccagaatctacaatgaactgaaacaaatttacaagaaaaaaacaaacaaccccatcaaaaagtgggcaaaggacatgaacagacacttctcaaaaaacatgcagccaaaaaacacatgaaaaaatgctcaccatcactggctatcagagaaatgcaaatcaaaaccacaatgagataccatctcacaccagttggaatggcaatcattaaaaagtcaggaaacaacaggtgctggagaggatgtggagaaataggaacacttttacactgttggtgggactgtaaactagttcaaccattgtggaagtcagtgtggcgattcctcagggatctagaaccagaaataccatttgacccagccatcccattactgggtatatacccaaaggactataaatcatgctgctataaagacacatgcacacgtatgtttattgtggcattattcacaatagcaaagacttggaaccaagccaaatgtccaacaatgatagactggattaagaaaatgtggcacatatacaccagggaatactatgcagccataaaaaatgatgagttcatgtcctttgtagggacatggatgaaattggaaatcatcattctcagtaaactatcacaagaacaaaaaaccaaacaccgcatattgtcactcataggtgggaattgaacaatgagaacacatggacacaggaaggggaacatcacactctggggactgttgtggggtgggggaggagggagggatagctttaggagatatacctaatgctaaatgatgagttaatgggtgcagcacaccagaatgacacatgtatacatatgtaactaacctgcacattgtgcacatgtaccctaaaacttaaagtataataataattaaatttaaaaaaattaaaaaaaaaaatgattaggaaaccagggaatccggcctcgggcacagaaccagcctggacaagggacaatggctgtcactgctgccccctcatcaaggatactccactaccacttgctactggacattggttactcactcctctgacaacagaaggaattccaaacaacccaagctcctttccatattagtcctggatgggatgttctatcccagaacttccattttgttcaacttcagttatgtgcccatgccctagcttccaggtatcaaggaaagctaatatttgaggggctttttcagaatgggaacaatcacccttccttctactgagtggcatacaattttggatttcgaagaaatacaggggttctattgctaaagagaaaaaaaattaaatatcctcagtagtttacctcttttaatgaaatatccacctatacagttatttccatactgaccacccactcatacatttcctccaattaacttcaaggtaacttctttccttccgtcacctcctcccaaaagcagaccctggttatcctaagtaactgtctccataaccgggcagagagtcttggagtgaccttcatttttttatctatatgtactattacctcatctcaatacccagaaaatgtttcatggtgggagttgaggaaatattatcagatttaggggacattccttcccactttgaccttcatatttctctgttactcaattcccaggaattaggacttgacttctctagtttttcctcctctccactttccttcccaaacctattccaaatcagcagcattaaccaagttcaatttaatttgcaaaatgtttaatcttaatattcttagtaatgtacagatgaattaaaacaagtttatatgtattcactccaataaagaaactcttttcttcctttgaaccctttccctttttttttcagtacaaattacagaagtgaatgttctgtgcctctttatattacattaaataagctcaatgctggcaccattcttcttccagtttggagaattaaaatgcttgtagttaatgctaaagtatgatgccccatcagacagtggagctccttcccacagctgctcaccactcagggccacgtgcctccccaagaactgtcccagtttaaaaagagccaatttgccaaagttacacatcctcttcagggacagcctccatccaatgataggtctatttgtagagtacacagactgagcctccttatcccaattctgcatttaagacagctgtggatgccatgtcagggtcaggagtccacacagacctgtttgtggccactggattcctatcagccgctctggcaaacctgttttcttcattcttttgtaggtagcgttcgttctcaagaacactaccaataggcttactgcatgctcatgtccatctcaaggtcagaaacaatcttagatcataatagaaaaggtggttgactttttataaaaatgtaaaataattgtaaggctgatgcatttctgcattgagctatacttttattatcattgatgttatattgttttaatgaaaatggtgaactccaccaaatatttaagaagataacaccaatcttacattaactttggtagataatgtaaaaagaggaaatatttcccaactcattttataaagccaacatgctttcgatactggtgcttgacaaacatgttttagaaaactaaaattgtaggccagtatttttcaaaagcacagatgcaaaaatcataaataaaacacatcaaattaaaacatataacaaccatatttttcctgtaattgtaattatcagcatatatgctccagaaataagacatatgtgaagcaaaatccatgaataacaattacagaagtattaatttgacatagtcagaaagtgaaaacaaacaaatgaccatcaacagaagaaaagataaacaaaatgtggtatatttacaagggaatagcatgcggtactgaaaataaactacagctgtgtacaacaacattgatgaatttcacgaaataattttaaatgaaagaagccagactccagagtatatacacttttgaatctccatttctgtagagttttaaaacaagcacacttaatctatgggtatagcactttggaaaaccgtgcctttgaataagaagcaaggactaatgattggaagactgttacattgcatgcaaaataaagaaaatatccctactgatggagctcatctagttggggctgacaggcaataaaagcaagaaaataaataaaatatgcaggttgtcagttaataataaggactatagggaaacatatatgtgtcaggaacccgaaagatataaagtattatggtgaagtgggatgtgaatggtgtgtaacttgcttgattccaatacaatttttagaaaggacagagacctgaaggcagtgaacaggtagaccagtgaagaggtcatggcagaccgggcgcagtggctcatgcctgtaatcccaacactttaggaggccaatgtgggtggatcacttggagttcaagactggcctggccaacacggtgaaaccctgtctctactaaaaatacgaaaattagctgggtgtggtggtgggtgccccagctactcaggaggctgaggcagcagtattgcttgaacccgggaggcggagattgcggtgagcccagatcgtgccactgcactccagcctgggcgatggtgacagattgaaaccccatctcaaaaaaagaggtcatagtggcagggtgtggtgactcatgcctgtaatcccagcactttgggaggccaaggtgggcagatcataaagtcaagagatcgagaccatcctggccaacatggtgaaacctcgtctctactaaaaataaaaaattagccgggtgtggtggtgggtgcctgtagtcccagttactcaggaggctgagacaggagaatcacttgaacctgggaggcggaagttgcagtgagccaagatcaccccactgcaatccagtctggagacacagtgagactccgtctcaaaaaaaaaaaaaaaaaaaagagatcatggcaaccattcaggctggtagtggctgtatgggcttggacagacgtgatgatgttaagggatggaataaggagaagtagacagattccaggtgtatttggaaaacataggtgatagaatttggtgatgggttggacatatagtgtgaaacagtaataaagaacgaacacaaggccaggcgcggtggcacacgcctgtgattccagcactttgggaggccaaagtggatggatagcttgagcccacgagatagagaccagcctaggcaacatggtgaaaccctgtctctacaagaaaatacaaaaaattagccaaatatggtggcatgcgcctgtagttccagctactcgaaaggctgagctgggaggatcacctgagccctggaggtctatcaaggctatagtgagccatgattgtgccactgcattccatcctaggtgttggagtgagaccctattttaaaaaacaagaagaatgaacacaagatgtgtttagcccgagaagctgaaaagatagggtttccatttcctgatgcaggattttggttatggacttgcatggttggagttgcctactactcatactaatggagatgtcagcaatgacattgtttatatgatgtgaaactcaggtgaggtctggtctgggacaaaactttggcaactatcagcaaatttatgtgttatattacactatggaggggattaccacggaaagttcaagagtgtgagatactccaatcttagagttcaaggatatggaaaaagacaagcatatgggactaagaggagcagaaggtaaagtaagaaccaaaaaaataaaaacaataaatattaaaaatccagaatgatgggctatcctggaagccaagtgaagaaaacttttcacaaagaactttcaagaagtatggagtgatcagccatgtcaaatgctgctgacagttcagtaaggtaaggattggaaagtaagcattaggcttatgagtctggaaacaactggtatacctgataggagtgaattttgtgcatttgtggggtaaaaccctaagtgtaatgcatttgagagtaaatgggggataactcattggagacagtgagaataaataatattttcacaaaactttcctgtaaaatgagcagtgagtaaaagaagtagttagaggtgggcagaaaaatctagagtttttttttttttttttcaaaatgagggaaattatactacatttgctgatgaaaattaatgaacattgaaggggaaactgaggattaagttagaaaggagataatttatatgtaatgttcctgagtaaaagaaataggatcacaacaagtatacagtttgaagggttggctttgaaaggagcacaaggaattcattcctggttacagaaagaaagtcaaaatatctgaccacagaagtaaatgggtgatacggcagcaggcttatagatattcttttctgattactctcctcctatttacttctctgtcttcatcttcctgttctctcccagtcttccttccctctttgctgtccttcaagtcactataacttcctctaatctccgtgactttttgctgattgttttccataaatacttatggggcttaatctttcagcttctgcaagtttctacacatatgtccccttctctctgagatctgctctggccaccgtacagaaaatggcaactccttcttactttcattccctgctgtattattctccttattatttaatagccatctaatatattataccctttacttatttagcttattcaatagctactttttccatcatatagttgaatgatttggccataactctattctccatttctctattgggggagcaattgctatgggctggtcatatttgggcatactatgcctggtttacaataattaaccattattaataatatacatttttgatattgatttattagctaaactatttcaggatataacagaaattgaaatgattctcaaatatccaaaagagactagcttagcattaacctcatatggaaatcagacagaaggagtacaaataaagatatagactaattatacttattaatataaatgtagaaaactaaaataaattttaataggaaaagaataatgctttataataaactagatcttacttaaagaattcaatttgcatttcctcactaacaaattaaaagagaaaaacataaagttattatcttcaccacagatcttgaaaactgtatagagcacccttgacataactcacttcatcttagaaaaagactctattttgtatgtcatagggaactttgccaacaaggatttgatattttacttaataaacaaataaaaatatagagactgtatccaaccaggtatgaacataaacaagcacactcttccactatcaaccgtcaccagatgactctgtggtcataaaaagagcaggccttcagtagctccaaatggccatcttaatccacaactgttttgctctcactcatgataagaacttggcatctgccactgaaggctctgccacatcacagactcttcctcgcaagacccacagaacatatggcccagaccagaagactctttttgtctttttcactctccttgggctggtttattaaccctttcccctatctcttttctcttgatgttaagtgttactttgtttgctgtggactgtttaatctataacatttatatgttgattaggtataacaatatgtgtggttttttatattgactaacttggggagtggtttcagcctctgtgctcatggctctgactaccaagtgaatgggaaaaaattgcgtccttaggaatgccaggtagcttgtggcttttgtgattgaaacagcatcaataaaagtctgacatttggaaaggcacaaatgtacatggatctggtgatatataatcttgcaccaacttatgagaaaaattatttgataaaattcgagatccatttcagatttaaatatacatataatcaaactagaaagataatttgataacttaaaagaaacctaccagaaacctacagcaaacattgagcttaatgttagcacattaaaggaaaccctcagaccagcatgttcaatgttgctggggcaattcagtaatgaactgatgattccagtcagtgcaataagatcaagtcaaatagtagactataaatctgaagagaagaagaaataaaatataatttaattagttaatcagagtatctccctagagacacaaaagggatggcaaaaactgtagggtacctagggataattataacaagagtctcaagttctctactaagttgatttaaaattttagtctatatctttgttttttaaagactgaggaatgttttatcatcttcaacaatggaaatacttaacacttcaatataacgattatctacaaattgatatttgaattcaatttaattcctttcaaaaaaatttttaagtctttatatagaacattggccaacaaactatggcctgtgggccaaatctgacccattgcctgatttcttaaattaagtttattggaacaaagccctggctgtttgttcaaatattgcttatggctgttttttggtacaatggcaaagttgagtagttgtaatagagaccatatggtctgaaaagtctaaatatttactacatggcctttatagaaaaagtttgctgattcctgatatagaagaacaaagaccccaaataggtgaatgtcattcataaaaaataatcatgtatttaaaactgcatatattttcaagcacttaaacaattaacactccatctagtgttaattgtttaaatgcataaaagtatatactgtttgatctcactaagagaagaaacagaagactaaatcacagatttaagcaaatctacacctacagaaaagaaggatgtggaggtagttgccattggagtacaagtacatgggaagggggtggattgaaatttctatcttaaatatgtttttactgtttgtttttttctgaacttatctctatttcaaaaggaagatgacaaaaacagaaaagttcagcctttggataagatttttgtctcttctctcttccttctggaagctgaatgatcactatgtaacctgcctctcccctttccttagtggtataatcagaattatgacagcttactagttcttcactccatgcactaaagagacaccaacactcacatctgggccacagtgcagaggcagaggcatgggtaggctcttgcatgggggcaagtcttcaggcctaatgagtttagggggcctgcatggctagctgtattctctgtcctctgggcttctaattgtatgctttgaggccaatgcctcagtgaaattttacaagttctgcttgctgttgtttctggtgtagaaattcccctaagggttctcatacagctgggtgtgtctggttcccagggccaagtatccactcagtaactcttgattatcaccacacctctaacaccatcaataaagagctctggaaacccttattttgtatcaacaagtaatataacatacacacacatatacacacacatttgtgtgtgtgtatatgtgtgtgtatgtatgtatgtgtatatgtatgtatattctgggactcacacaattcttggaagattccattgtgctttctagcttatttttgaatactttgaacgtcaagtatttccctaatctcatgagaaaatccattcaatttttaaatagttttaattataatgaaattctttcctgcagggagctgaaacctgcccatgcatgacatttacccatgggttataatttgagcttgaaatccaacacacgcatgatcttctctgcaggaaagatgttcacatgactaggtggctgctgtgtggccagagcgttctcttttcccggttcacctttctgggttcgttctgctgctcctttctgttaccccatcttcctgcacctctattctttatccatgattcgactcatcgtcttgatttatttaactctgggcacagattcctgcccttcgctttgggaaaatgactcatctcttgttctttccaacctgtggatgaacattgaagatcttggtctgtcactctggaaactcatggaacaaacactagtgcaagacaccctgcctggagatacatctccgggtggtaggtaagggcatgattccctaagaaacagttccctggcctttgaccaattagttgagaggtatgtgtacccatggccgttcaaaactttatcagaaagagaaatggttctttgtctttaaaagagacgtgcacactcctgtcctgaattggactggctgaatgattctgtagccccatccactaggctagctgtgcctgcgtgcagccagactggaaaaggctgcttctcctgctggccgcatggtctcctcccatttcatgctgtcccacattcaggcagttgccttggatgcctgtgtggctgaatagacctggcctacagttggccattttcaatgcggtccatttggttttattcccaattcattttattattgatttcttttaagaagcaacaccttactctgctgttgtctaattacttcatgatcaaagtagtgctttcctcagtttgtctgctctgttcaaagcccctgtcatcagtgaataccagtggctaagccagagggatgctgttccctataaatatgtattggagatggtcaaagtgcaacacaaagcttttttggcatgtgttgaagtgtgatagcaaccaccttccacaccacattctgtatttctattatttgccaatatgtaatacttggtaataaaaccttcactgttttaaatagtaaacagtctctagtttcacttgaattcaatatattgcttttatatttctttatttctaatcctaaatacactgtaacttttctgctgtttcacttggtaatgtagtttttctccagtagggaagcaccacatgtttaagcaataaaacttgtttcccagatgttctacttctttaaaactacagcagctaattcacttacatgtaaagacttttgaaaagtagatcttgccatcttcaaatagaaaatataattcttcctcccacttaaaaaaatggttatatatcatcccagttaaatggttgatggcaaacaatttgccttgcattcctagctattggactcagaggtgactgcatgagaaacgtgacaccatggaactgaagtgttctccaagtcaaagagaaaattagacatacatccttgtccctgacgactgccactgcaataaattgcattctgtttcttcctggaaaattgactagggttttggaacatgaaggcaaacatgtgctgaccatgccgccaaagaatgccaggaaggaggcagagaggtggctgatcatggggatccttttctgcccagctccatggttggatctatgctgtatgtgaggactgctggagaagggagttgagtccaggaggaggaacccgaggttgtactttagcagtttccatagttcccttatggccccatcgtcttggggtgcttctgttgcttcactttcattttaccctagaaaatcactgcagccttcttagaactctaccccagtggaatcctcttctctccatagtgccatcctgtctgttagctttagtgcagggagaatcagcttcaggtgtcacgaacagaagtccaggagcatcaggtgactccaaatcactgtaccctggcagaggggaaccacaggatcataaaaaagacatgcaaatgaaaacaccacactgcagttattcatcttttaagacatagtgccagtctctgtggagcaagacagagttgcaggaaagaaatagtcagaggtgtctctgtcctttccaaaatagccatgaaatttcagtagggatataaattatgaatcagatccaataaagtgtaatggctggatacttgctgtcattagaaaggaaagctgcaaatgaatacttggacatattcacaattaggtaaaagatagtagatgatttctagaccctaaactagatgagaaagaatttgtaatgtcccaccaagcctaggtaatttaaaagcaaaatgtgctgtttctagtttcatgtgttttttatctcattgacaaagcatgcttcctatacaaagaaatgaaaacagaaatcattcaggggtggcaatagtaaaagctgataacttaaaataactaaggatcactatcattattatgattgatacatccttccaaatgctttggtgatattatctcatataaccttcccaagagccacattaggcaggatactaccattaaccctattttttagcaactgaggcacacagagattaatttggccaagatctcagaaaattcagaaaataaataaaatgagtcatttaggatttcattacagggaggcactagatttaaagaaagtgcttagaatagatctctcaaagaagatgtaaagggaattttaggaaaatcaggaatcattaaaagaaacattacattagggacatgaagagagaaaaatgcctggaatgtttttgaagagtgtgttttccaatcgttttcttcaactgatgtctcctcttgataacgccttgcatgacattacgttacacttggcagtaaatttaatatcatgtctaaattaggttaatgtcttttgtggtgaaattatattttagtctagttactctgtcagcttgatggtcaggtttttctttaaatgataaggtgaaagaatgtgtagaagatgtagactatgtgaataaccaaatgtataagcttaatataattgatattaatcctgtacccaagcattactatagatttcttcaagtaactataaaacatttataaaaattaaccatgtacttcttatgagataaatctcaagatatttcaaaaattaaaataaaacataccatagtcagcaatcacaataaaattaaaattaatataaaaagtaaaaaccaatgtttgtaacctaaaaaaattctcaatggttttaggataataacatgaattataacatttaaaaaatataattagaactaaacgattaaaataaagcattgcaataatgtattaagtgaaaactgtattagatgaaactttatacccttaaaagcttattgaggtacaaaaatggtaaaaatcaaagagctgactgcctaccataaaaattagaagactagctaaagaataaattgagctaggcacgatggctcatgcctgtaatctcagcaacttgggaggccaaggcgggcagatcacttgaggtcaggagtttgagaccaatatggcgaaaccccgtttctactagaaatacaaaaattagccgggatgatggtacatgtctgtaatccctgcttcttgggaggctaaatcaggagaattgcatgaaccccgaaggcggaggttgcagtgagccgagattgcaccactgcattgcaaactgtgcacagagtgagactccgtgtcaaaaaataaaaataaataaataaataaatgtaaataaatcaattgacattaagaaagagatagtaaactaaaataaagaactaggcactaaaatagggaaataaaacataaaacattgataatgtcaaatatatatattaatgatatagataaacttgtggtaacaataacatagaaaaaagaagcatatactgaaaaagcggtggctcatgcctgtaatcccagcactttgggaggccaaggctggcggatcatgaggttaagaggttgagaccctcctggccaacatggtgaaacagcatctctactaaaaatacacaaaattagttgggcatagtggtgtgtgcctgtagtcccagttacttgggaaactgaggcaggagaatcacttgaacccgggagggggaggttgcagtgagttgagatcacgccactgcactcaagcctggcaacagagcgagactccatctcaaaaaaaataatactatgaataaaacaggccaattataggtcaatcactctcataaatataaatttaaaaatattaacataatcttgataaaccaacacaacaatatataagaaatgtattttgtttattatcaaggttgatatatctaaaacatctattactgtaatttgccatattaataggttaaaagtttacgtactatataatatatgcacacattatgtatatattaagaaatatatacatatgtcaacataacataaccatatcaatacatacaatatagccatatcaataggtggggataaaagctcgataaagttaaatgtcagtacatgatacagaggggaatttcttttatagataaagagtacttaccaaaatccaaagcaaacattatatataaaacaaggacaagacaacaaatactaagtatatctactattttttccatgtaatcctgaagaacctacctaaaacagcaacaaatttttattgcaagctgatctaatttttttccacaagcaaatcccaaataattcacaaagggattattgcaataaaaaaagagagttttgaaagtttgctgaaaataagaaacatctttaaaaataatgtatttttatataccaagagcaagaacaatataattttaaaaaactgcatttataatatcaaactacaacaaacctaaggataataaaacatagctgtagagaaaattttaaaactttcatgcacattaaaaaaactatcacaataaaatattttagcaagttcaatgatataaaattcagtatcttagtgttgttagttttttcatattgttttgtatatagtctcaaatgcaattccactcaaatcctaattagaatctcatatgaaaagatgagaaccaaacaatagttaaaagatatccctaaagaaaaattgaaaagatatttttataaaaaatattcaatctctatataaaattacagaaaataaataatgtttataaggacacaaacatagatataaatggaacataagatagagactctagaaaaaagcatatgtctatgaaatctaatattttatagatagatcattatggtcacactgaaagatgtagcactgaattaataatactcagataatttctatccatatggaaaagtaaataaatttagaactttatcacacaaaacataaaattcaattccgggtggattaaagacttaaatataaaaggtaaaaactttaaaatatttaaaagaaaatgagtatgtttctgtcatcttgaagtcactatagatttctaaataagatgcaaatatgtcaaagtatcaagggaaagaccgtcgaacatcaatctctttaaattaaaactttctgttgtaaaactgtgataaggaatgtgaaagacagtctaaagtacagaaaatatttgccacatatcaactaataaaagtctagcatacagaatacatgaatgacaatgaaaaaataaaaatgctggatgaattagtgttggctaactactagaacaaactactctaaaaatctcagtgacttaacacaatacagttgtatttgtcattcatgtttcattccaatttctcatttgacttgtggccttccaactggtgattcagacaatgagtcccttaataatgactcaccataacctggggccttaaatccttcactacatctagactttgttgcggggtgataatatatttaagatttggagaagaatgaaaggaattttagggacaaatcttgggagcagtacatgtccacccacatttcatggcccaggcaagaattcatagacagatgtatatacgcacacagacacatggaccacacctacttgttcaggaagacagagagtttggtgaacaaacaaattcaatcaggatttgtattgcaaatacttgcagcccaatggaaaagtggataagaatcatgacataaatgtttcagagaagaaaagaaaatgtccaataaaaatatttaaaatatttttaacctctttgtaatcaaataaatgtatattaaaaccataatgaattaggtaatatttaacagccactagaagaacaaaacgttttaatgttgtgttaagaatgtgaaacaacataaattcttacatactgacagtgtcagtacaaacggatatccccatactggaaaacaatttgaatgtatccagtaagttgaggccatgccccaagtcccacttattacctgtcataacaaaaataaataaatttttatttcaatattaaaaactataaatatttgaaatggttattgagaagaacttaggtaagtaaattgctgggtagtcacacaatggatttcaatgcattagtgagaatgaaaaaaaatctacccataaaaatgtgtgtgactatcagcaaaataatatggaaaaaaattggtcacaaaagcatatgtacagtcaaaattaaattgcattataccaaaacacacacattataaccccaacagaaacaaaagaatgataaacaggcatgcaaatggttatttctttttgggggcacatgtagggagcacaaccaaagaagacaagaggcttttataattttgatgttgttattccttaagctgaatgctgggtatatgctggtccattttattacacattatacatactgcacttacgtatacttccttttataagcatatggtatgtttttaagtaaatgctgttggtctagatcagaaaaaagtggccaaatatatagaaaaggaaccttgaatagccaaagcaatcttaagaaaaaaacaacaaacctgcctgcgttacattacctgatttccaaatatactgcaaagctgtaataatcaaaacagcataggtattgacatgtaaataaacgtatagactggtagaaccaatagaatagagagcccagaaataatcccatccgtttatagtcaattgacttttgacaaagatgccaagagaacaatgaataaagggcaatgtcttcaataaatgatactgggaaaattgaatatctacatgtagaagaccaaaattagacacttatctcacaccacatacaaacatcaactcaaaatgaattaaagacttaaatgtaagacctgaaactataaaactactaaaagaaaatataggggaagagctttatgacataggtctgggctatggcttttggagggcgataatataccaaaagtacaggctacaaaatcaaaaatagaaaaataagactacatcaaactaaaaagcctttgaacagcaaaggaaacagtaaagtgaattggagaaaaaatttgcaaattatgcatctaataagggattgatatccaaaatacataacaaacttaaacaactcaataataagaaaacaaataacccattaaaaaaattggcaaaggatctgaataagaatttctcaaaagaagaattacaaataaccaaatgacatatgaaagaaatgccaaaataacaaattaacacataaatgcaaattaaaaccacaataagggccaggagctcacacctgtaatcttagcactttgggaggctgaggcagagaattgcttgaacccaggaggcggaggttgcagtgagctgagatcatgccactgcactccagcctgggtgatagagcgagactccatctcaaaaaaaacccaaaaaacaaaaacaaaaacaaaacaacaaaaaaacaaaaagaaacacaataagctattacataatacatgttagaatggctattattacaaagatgagaaagataagtgttggtgatgatggggagaaaacagaactcttgtatactattggtgggaatggaaatagtatatccatatggaaaacagtatggaggtgcctcaaaaaattaaaaatagggcaatcatatgatccagcaatcccactaataagtgtttcttcaaagaaatgacatcagaatgtcaaaaagacattttttctcccaagctaattgtagcattattcacaatagctgaaatacaaaatcagtgtaagtgttcatcaaaggataagtggataaaaatgtggtatatatacacaatggaatactattcagcctttaaaaagaataaaatcctgtcatttgcaacaacatgaatgatcctggaggacattatgtttaatgaaataacacagacatagaaagacaaataccacagcctttcacttagatgtggaaggtaaaaaatgtcaaactcgtagaagcagagggtagaatggtcattaccaggggttgaaggtgtgggtaactggcaaggttttggtcaaaggatacaaaatctgagttacatagaagtaagttcaagagattgattgtacaacatggtgtctatagtattgcattcttgaaattgccaagtgagtagattttaagttttcccactataacaaaaagaaagaaaatttaaaaatgaaaaagttttcaagatattggccctaaactagagaataaaatgacacgcaaatcacaagggttggcgctagctttagacagaagaggaaagggtttctgagttgtaatcaaagggaaagaaaaggaaagagtacacataaaaacaaataactatattggataaaaaggtaagaagtaagaggtacgatgttgttgatactgagtaatgatgaggacatgatttggtaatttcaaaagcgtgaaaaccatttgaaaaagtcattttgacatctggcttccagtccaaaatgtgaagagtttggaagtcatgtcctttgattctcgcaacactaaaaatgctgaaattcaattctcttgagatccattggataactgagatctcatcacattctgcagtctctaaaaaaagctggaaagacaggaggataaggaaagtcacagctcatcaggagcaccaactagtcagaagtgctgatggagccagccctgggtgagaatgctgacagggtaatggacaaattgctgaactggggtgggctagcttgggagattaaaatctctggaggcccaggctaaataaacattagagttttagagttttacctctaggtgccctatcttgttctcattgtgaatcttatagaaaaattcccttacatttatggcaggggaaggagaaaaataggcattttaaaattagactggaacactgtgtgttcctatagaaaggactgcactcagtgggaactattttaagagtttaactgatactggagagggaattatccaactcaaggtttcagatatgggggccttcccatttccatccttcccgtttgacctgaaagttgaaataaacaaaacaaaacaaaacaaaaaactcagaagtgcttgtgaaggttgcagtccagggacataagttcaataaaatattgagacctaattacagtactatagaacactttttctacccccccacgtcttactactacgtggatgggccctacatagtaatagaggattataggagaaaaaaactgcaaagcttggcctcctacttcaaatgaagctcaaaggaaaccaaaaacagcaggggagacagcaataagactccagagggaattttagtctctgacacagttgggtgcagcaaacagtcaacacagcctaacatctaaccagataaaaagaaaacagtactctgaacacctattgaactcagctccctttaccggatatatcgtgcctgtcaattgacaaaaatttacaaggcatgtaaaaggcaaaatacacagtgtgagaagatgtagacaaatccactactatacttggagacctcagtaccccttttgtattatttgacagacccagcaggcagaaattcagtaaagttagagtgcaactgaccagaaacatcaatcaactggatataatttacatttgtagaatacttcatccaccaacaactgaaaacaaactcctcccaagttcacatggaacatccaccaagaatctgggtcacaagacacatcttaacaatataaaacaagagaaatcatgtaaagaatgctctcagccgggtgcggtggctcatgcctataatcctaggactttgggaggctgaggcgggcagatcacctgaggtcagggcttggagaccagcctggccaacatgatgaaaccctgtctcaactaaaatacaaaaattagccgggcgtggaggtgggcacctgtaatcccagctactcactaggctgaggcaggcagaatcacttgaacttgggaggcagaggttgcagtgagccgagattgcaccactgtactcaaggctgggtgacaaagcgagactccctctcaaaaaaaaaaaagaatgctctcagaccacagtgaaattaaactaggtatcagtacatgaaagatagctggaaaatgcccaaatatttgtcaattaaacaatacacttctacataacacatggatgaaaactgacacaagagattatacgaatatgtattgaactcaagaaataaatatacaacctataaaaatatacaagctataaataataaacaaaataaaaataagtatacaatttataaaaatttgtgagatgcagtgaaggcagaacttagagggaaattgataacattgaatgcatatatgagaaaacattaatgtaaacattctaagctttcaccttaaaacattagaaaaagaagagcaaagtaaatgccaaataagcaaaagacaagaaataataaaaatttggaacagaaatcaatgaggtagaaaacagaaaattaacagaaaaacagagaaatcaaagtaattgtaaccaagagctctttcttagaaaagattaataatattgataaatctctaaccagaatcatttaaggggggagggaaaaaaaggaaggatagagatcgctaatttcagaaatgaatgaagagccattcgaactgatctcatggactttaaaaaataataaagaaatactattaccaacttgatgcctataaatttgataactggaatgaaatagaccaattacttgaagagtcaatatactaaaactcacaccaggagaacagataatctaaatgggtctacatctgttaaagaaattttgttaacaatcattaaccttccaaaacagaaaacagtcacatagatggtttcatttgtgaattctataaaatgtttaaggaagaaattgtaccaattctgtataatcttttctaggaaatgaagaggacactttctaactcattctgagaccagcatcaccataataccaaaaccagaaaataacactactaggaaagggaattatagctgattacagaactgagagattatctctcatgaatatagaggcaaaatcctcaataaaattttagcaaatcaaatcaattcatggattaataaattaatggatgaatgggttattgtgggagtggaactggtggctaagaagaggaagagagacccgagcaggcacgctcagccccctcaccatgtgataccccatgcgtcttcaagacactgcagtccccaccagtgacaaggctctcatcagatgtgccccctcaaccatggacttcctagtgtcttaagaaataaattcattttctttataaattacccagtttcaagttttctgttgtaagcaacagaaaaagaaaaacaaacaaacaaacaaaaaactaagatacacaacatatctaactgggatttattcaggtatgtaagcctgggtcaacacttgaagattaattaattcatcacatcatcaggctaaagaagaaaatcatatgatcagattacatcaatcaatgcagaaaaattatgtgacaaaacctagcacctattcatgaaaaaaaaattagaattagaggggaactcccacaacttcataaagaacatctacaaaaacctctagctaacattattcataatagtgaaaaactatatttgtttcacctaaaaccaaaagcaagcaagactgtcccctctcaccaaccaatcatattcgattattaaaaatacaagctaatacaataagttaaaaaaggaaataaaatatatacagattggaaagggaaaaataaaattatatcacagaggatataattgtattaatttagaaaataccaaaaggtgaccaaaaagccctcctggaaataaaaagcaattataacaaggtcatagaacataatgttaatatgtaatatttaattgcttcccatataccagaaatagatatttgaaataacatgatttacattagcatagaaaacatataagcctaacatcatatcaatagggtccatattcataaaactgcataactctgatgaaagaaatcaagtgagatctaaatagatggatgttttatcatgttcttggatagatttattatatttattgtataaaatatcaattctcctctaattgagctataaattcaagctaatactattcaaaatcctagcaagttattttgtcaatattaacaaattgattctaaagtttataaggaaaagtaaaagaccaagaatagccaacataatacttcagaacaaagttgaggaactacctacttcaagacttactataaagttacagtgatcaaaacagtgtgttgttatctaagtaatagacaaattgttcaatggacagaagagcaagctcagaaataaacccacacaaatacagtcaatgaatgtttgacaaaataggtgattcagtggaaaaaaagaacattcttttcaatatttggtgctagaacaattgtacatccacatgaatctataaacagctcttacacttttcacaaaaatggatcatagacctaaatgtaaaatgccaaattaaacaacttttagaagatatcataaaagaaagtctagatgacatagggttgggtgatgactttttagatatagcaccaaaaacatgatctctgggaaaaaggttgatcatatgaatttcattaaaattaaaaacttatgctcttcaaaagacactgtaaaaataatgaaaagacaaatcacagactgaaataaaatctttgcaaaaatatatacctaataaaagattggtataaaagtacacaaaaactattttaaattaagcaacaaaacccaattaccaaatgggcaaaagatctgaacagacatcacatcaaagaagatatgtagatggcaaagaaacatatgaaaagatgcacatagcatatgtcatcagggaattgtaaactcaagtaacagtgagatgccagtacactcattagaatgactaaaatcccaaacactgacatcaaatgctgatgaggacagaaagcaatggcaactcccatttatgttgctaggtatttattaaatgaaacgaaagcttaggaccacacaaaagcctgctgacaattgtttatagcactttattcataactgccaagaattaggtgcaaacaagctgcccatcaataggtaaactgataaacaaactaaagtacgtttatataattgattatcattcagtgataaagaggaatacactatcaagctacaaaatgacatagagaaatcttaaatgcattttgctaggtgaaaaaagccagcccgaaaagactaaatgagtgattctaactacagtttacccttgaacaatatgggtttgaacaggttcaaaaaatacatgtatcttttacaaacgaacttggacgtaaaacacattattgtgaaatgcaaaacgcacatatatgggagccagcttttcatcacacaggtttgaaggggctgactgcgagacctgagtatggttggattttgctatataccagggtcctggaaccaatcccttgcatataccaagggatgcctgtatatgacttctgaaaaaggcacaactctgaaggcaataaaaagatctatccatgccagaagtttagggagagggataaaacaatgtgaataggtgaagtacagggactattttggacactgaaactattttgtataatactgttatggtgaatacatgataatatgcatttggcaaacccacagaactgtacaacactctgtaagctatggacctttgttaataataatacaacaatattcgttcatcaattgtagcaaatttaccacagtaatgcaagaaagcaataataggagaaattctgtgagagatgaaaggggagatgatatgtgaagtcttcacattttttatacaagttattgtaagcctaaaatttctctaaaaatatgcctatttgttttaaaacagtgattgcttgggtcaaattagagtaacttagtaggattattcacaaattttgacagtccatttttgtttggtaataatttctggcatttttcagtatcttcttatataattctttatttatttgctgtgagtgaggtttaacacaatgaaagaagatagaaatcatttaggcctgtgactataacagatagaggtaacacaaaagatatatagtaagaggaattgagatgcttgtaaaaatttagtgaagtaatggaccatagaatctaagccagaaaagggagacagtttatagattaaagacaaaagtaaaagattcaatggattggaaggatccattatattaaagaatggtagtatttggcatagttaaaaatgtagctaagagggttatagccctaagtgtaaaaaataatacatgggtttataatgtctataattttataaaaacatacatcatacacacatacatacagaaatgggggaatatagactaaaatttcttgcaaaaaattttaaataatatacaaaatactctattctactagaggtgctgcttaatttcaaacccgctaaatgtggactgaatttagttacttaatcccaaagaacacagtatgggaagggaaagacaataactttgcagtgcagacaaatactactttatgaccttatgccagtaataattattaccttcaccagtattgtcatgtagatgccatgtacctccagacatgatgtggtagaagggcatttcagctctacaatattctttgcagaattccacaaaacttgtctaatcataagaaaaatgtttatacaactcaaatgatggaacattctacaaaattccttgccagcactcaaaattgctaagatcatgaacgacaacaacaaaaaagaaaaacaaacaaacaaaaagactgaaacagtgtcacagtctcctggagactaaggaaatgatgagtaaatgcaatatggtaagtggactgcatcctagaagagaagatggacattaatgaaaaaccggtggaatccaaagattggaatttaattagtaacaaagtgccagtgtgggtttcttagttttgacagattatcacaacgtcttaagataataacattatataaaccaaaattgagtgtggcatatatggaaattttctgtaatacttttaccacatttttgtaaatgtaaaattaccccaaaataaaaactagtttgtatatttttaaataagagcaaatggggagaatactggctgattttggaattctgagttgtcatgtgaattggttgcttaagtaaaatggattcactcatttggagacgagaaagttaaagtagtgagaagggagaagattgtttgctgtcttcagacaaaatggtagtaaggttgatgtggaatgaaagactgtattgcagatgacagaaattgatgaaagatggggtgtgactgacatgtcagttgatgacaagagctagaatagctttgttctttttgtaaggacgtgagagaggtagttgtctggaagcagaaatgaagagcagggacttgtacctgctaatcaactttgtaattggtccaagttttgaaaaaggaattaaaagtggactgggagtggtgtcaccatttggaaaggttgcaatggaggtaatggctgtggaaggaatcaggaaagttggagaagtaaaggaaacatctggaaaacatgactcaaattgtggttcccagattcacaatagctctgcgatacttgcctgttggtattcatgactttttatgtagtcttctcccataataactagtgctgacttgtgtcactgtaaaagaaaactaaatttcagggccctctaaatgtatttagagggaagttaaccttggcgactgagtcagtagcatatctgcaattttgcttgtcaaattacagcttcactgtcctgctcattgctctagttctgtgactagatgaaccagagaccagacttccttgcttccagtcactgatctttgttacagattagctgcctcctttattgtcttataccaaactaacatcagatggcacaaaataccccatgacagttacaacttcaatgtggaattgagacagagcagggactcccatttttaggcacctggagcacccaagcatgagaaatcctgagtttcttcgagagaaattctaggcacctagctagtcctgaaaagtaactaaccaacttgttaaataagaaatagtagcctaaaacaattgttaaataagttagaatccaggagatgtttgctttcctcttagaaactaaagataatatcttaatctatgtcactgaattgtctgtcagaagctcagaccaccactgaggaccccctgaatcgatccactggcacacagaccctggatagggtggaaattaggactaaattttaaatattgccctttgttctgtttcttcctaaggagcttggagaaagccaccccctagaagttcacatttttctactgatccccacatttttaaataaagcttctcttattcagtcaattgcaaatcagaggatttttaaatctgtctacaacctgtaagctcctgcttcaaggattgagaggagggaccggctgggcttcctgggtcgagtaagggctcagaaagctgtgaaactcactcatttcctgcatcaggacttacttcggtcctggatgaataatatcgaagatacatgcttaaaatattcataacaccaggatttgtgcatgtgttttctttcccaaggaagctatcaacagagaaaattttgctgtaagttttcctgtgtttttgtctccctctctcccttccccatcccctgaaactaaagtaaaaggaatgttaactgcttgtttttctgtaaccggcggaacttatctatgctcccaattccagttccttgtaaacatattttgtaaagtcctgtgagctcctgtctcctttgccatgcggctgcaaggtcataaagtagataaaacctaagttgcaattccggttttcctcaggatctaagacatgtcataaatggctagttgtctttgtttctccctctcgtaacatcttcccgcagcacgtatttcccaccttaaaaagtttaaaaggcaattgtgtaatctaactctgtctacccattcgggaccctttccaagctgtggaagctttgtactttcactctgctcaataaagcctacagctttttctcaccctcggtccatgtctctatttggcgtggctagtaaagaaccttaggcgttacagtatcccattcttttaggccaaaaccaacgtattacttccatgtatcgatttaagatttttacctatagcttccgctttctgaaatttacctcacctttaaaaacccttcctcgcaagccatcggggaggtcaggttttaggcacaagctgcccgactcttcttgcttggcgccctgcaataaatgccttcttttctattgttgcaaaaactcattgtgggtatctggttttactatgctgggtgagcagaccccagttcgcctttataacagaatgttaattacatctttcctgaaagaaaaagactacctcgactaataagatttttgtacctatgcatgaagtcctgcatagaaaaattttgaaattctgttaaacttccttaagctttgtctggataagcaatcccaagcctctacactttgtaatactgatttcctttctttggaatctgtgcttcctgggtggcttgtcctcgaaatttgtgcttaaataactctctttaaactagattctgacctttttgattattttaggttcacagtcaccagtaaagtattagagaaaaaaatgtgtgacttctgctaggcctaaaagattatggcttctacctcactctagcttgggtcactcacgactgaggcagctagctgatgggccaaaggccctgtggaaaggcaccgtggaggagttgctactcccttcagcagccaccaccgcttcccagaatcaaaacgagccactgggaagcggagtctgcacccggcccagccttcagagaactgtagcctcctgcaactcacccagggaagctgctcccttagtaactgtgatgtactaaatgattattctttatacaagccactccattttctgtgtaatagatgaagattcgctgaaaaattgactggcaaaaggcagtgaataggagaaaagatattaaaattttttaactagcatggtttagtcatagagtgactaccccataacccagtggaagcttatacaccccttttcataaggaagtggagagatgaagagtgtaggcaactttttggaggggcaggagatgattgattgttagggagaatgaacgggccagggcgacagaaatcagcttgtaatgattctctctggaatttcaatgagcccaagaggcagatattgtcttatgaacagtccattcaagttggttgtattctggggataaacaaaaggatttcagagaggagatgaatgatgactggtgttttggggaagaagatttcttgatcacctcaggaaattccagagagagtccctcctgctggtgccttgagaaagaggatccgagagatagggaggtggggaaacttcagagacagaccttggttccgaggcttatttctgagaccttcccattttcaaagcactcagcgtgctaaagcccgtaatttggggcattgttttctgcaccctaatagtgctacgtaggcatagagagctcatggccagtgtaaggaatgcgttcattggactcatggcacagttggaagattccagagttggggagagtttggaaatggagtttcttgaactacaaagtaaggtgattgtttcagtaacttgaaatattgctttccactctaacactttgtgatccaatttgcttttattcgtgggaaatgcactccctctggggtttactgtacagagagttggcctttgatgccgcaggttggtgcgataattgatgataaaataatctttgacttaagcttttgttgtcaacaaacctcatggaatgtttttgtttttttccttttatttaggcctcattgtaatttaaatcagctactcattctgcgctgcagaaacattgttatattgtatttttttgtgtgagaactaaactttggtttcattgtactgataagacctacaagtgttatgaatatgtaactcccaggcagaatctggatgaggttcagtgagggcagaaagattaggccagaaaggcttttacaactatgtggttagaaaaactataaaatcaatagtttactttctgacttattttaatgctaatagcaaatagaatcacaagatttttaggaggttgagaaatcctttgttccatttagttttccttcttccagcaaattggtgagaatctgacctgtttaaaagcaccttaagtggaaactctattcaagtttaagaactgaaaagtattactggactggccaagctcgggtcaggctcctgaaccttctcctagcctatctgtggacttccttaagaattagtttcagcaaagaactttgtgagccgattcctccagacagaggaattgcatagagaaagtttaatacacatacagccagctaaatgggagactggagttttattactcaaaccagcctcccaaaaagtatgagagcagggttttttaaagacagttaggtgggtacagcctaggaaatgggaatgctgattggttggagataaaaatcatagggagttgaagctgtcctcttgcattgagtcatttcctgcgtaggggccacaggaccagatgagccagtttactagtctggatggtgacagctgatccattagaaagcagggtctgaaaaatagctaaaacaccagtcttaggttgtataacagtgatgttatccataggagcaattggtgggatttgagatcttgtggcctctggctgcatgattcctaaaccatactttctaatcttgtgactaactcgttagttttacaagggatgtctgctcccctctttggggcaaggagggtgtttgtttcaggaaaggctgttataatttttgtttcaaaattaaactataactaaattcctcctataatcagctcagcctatgcccaggaatgaatgagggcaattaggaggttaaaggcaagatggagtggattaggtcaaatctctttcactgtcataattttctcactgttataacttttgcaaaggcagtttcaacactgctaagtcaatttggcaagaagccctcaccctcaatatctgattactccctcggatatttgatgggtttcctcatcctccccaagtgatatctgatcaccctggactaccttcagcaggagtcctgttaggtcagataagtagaatcctccttatcccttgttctgtatggtgaaaacaaggagatggggaaagtatgatttcaagagtcacacagtttcttttcatccaaagagaatttttcttaggtttgcaatgattaaagagggggagtacagcatgaacaaacttcacagggaatacctttagagatgagatgcattaaccacatagggagtgaacttcaaagtcattaaaatactgttgctcagtgacgacacaagcaggtctttgtgcaaagattcctgatgatgcagaaggcccctcatgtaagacagaggtgctggtgctggcaggcaggctcccaggcctgcagctgtctaaagtctgggcattctggaggcagccgacaaaggacagcctgccttacctaagctctcagagtggctgtcactctcttaagtttatatatatttttaaaattttggattgtataaatttatggggcacaaacgtaattttgctgcatgaatatattgcatagtggtgaagttggggctgttagtgtattcatcactagaataatgtgcatggtacccagtaattaacttatcatccctcactcccatccccacccctctgagtctccagcatctgtaatcccacactatatatacgggtacacattatttagctcccacttatgagttagaacatgcagcatttgtctttctgtgtctgacttgttttatttaagataatggtctccagttccatccgtgtcgctgcaacaaaaacccataattttattcttttttatagttgaatagcattccatggtgtgtgtgtgtgtatatatatatatacacacactgcattttctttatccgatcatctgtttatgaacacgtaggtgcagctaagtatatttatagtgctgctataaatatacgagtgcatatatctttttgatgcaatgatttcttttcctttgagtaggtactcagtagtggaatgctgaatcaattggtagttctattttggagtccagtagttgaggtcagtatttcacatatagagtctgataaggtgtgacataacattcctgaggggagggaggctttgctcaaagttcttgcatacagaatctgataagacatcacattctccaagggaaagggaataagttccaagtacttactataataagacatgtcattcatgtagcaaactatgtgtctggaattatttcagagctacgtaacaccctggctgtttcctcttagtatttttctgtctattgagcccacatcatgatccttggctatgaatttacacttgcccttgctgcattgtgagttgaacccaatccatctcccctactgcaaaaccccactgtgctatcactgtacctattgcaatagtcctgaataaagcctcctctattgtacataaccagtatcactgaataatatttttctttaacagaaccaaccctgtcatgacctgatagcataggttagagtgtaactgtaaaattaattttattaacaatgtgcaactaagagagataaaaatagttgtatattatttttagtaggagcctttacaaatgtatagtttatgtaacacttttgttagtattattattggcaccattacacctcaacagtcctagagataaatttgatattttcagtaccagtttatgaaggagggaccagaggtatgcagaattgaagtagagattatttaaataagaagaaatgaaaaattctcccttcaaatgcagcacttgcctgtgtcaatctgtaggtatttctgtgtccacaaagtgacaacaactgtgcaatccactggcaatgtaaagacgtagaaggcacgtcctctgccctcttaagaatgttagggagatccaccagcaataaaagcatagaattctgagtgagaggcacttgcaaagggagcacgtgaaagcacttaaggagtctctcaatcaaaaatctccaataagaggtagtattggagctgaagtttgaaggctgtgtgttagttacataaatataaaagcaagttcatttggggcaagagtatgcacatagtcaccctggtttaggctcatgtgcagaggcacagatgtctacatagcatagcatgctcacaatttacaaagaagaaagtaaagtggcagttatagagtggggctcaagccatccaagagggcaaatgccaattcatgaaaagctttatgagccaaaacatggacttggaattttaccctagaagctctgagaacccagtgaagcatttaaaagtggagaataaaccgtcatgcaatgcctccttggaagcagtacagaggatagatttcctgagaatcatactagaggttttggaaaataattccagtgtagggataagaattcaggccagaggagactgtgggactgaaaggtcacgaacactgagtgccagtaggtgtgttctgaagtcatcagtttcctgtgggcagtccttctccccctgcgttccttgcagactccacctacgtccaacttgagctgggtacactggaggacttagacttgccaagtgaaaaatcccacaatttataaatttgcaaaggagatttttatttcctagaaaagtgtacagcctgcagggaggacatcctgacaggctgggaggcttagcctgtggcatggtgtgttagcaggtgcttcaagggaggggagggcagaacaggaatttatgctgaactggttgcgaaacgtacatattcaacagatgacaggaggagccatgaatactcatggaggtggccctgatacatgcatattgaacaagcatgcatgcaatatatgatccgtgttcagctggctgtgcagacttactgtttaaatgtattgcaatcaggcccacacatcaaaagggaaagtggggacatgaaggcacccagtgtgcagcctctgtaaaccatccagaaccagtccatggtcagtggtctcttaccaggagaaagctactgaaatcagttccttatccaatcaaagctgtggtaagcctgtggaacaagggctggaagtcagtcagtcagtcagcagctggcagtggatgaactgcaattgtttaaatagcacttatttcaaggccactgcttgttgtttggttccacaagaagaacaaaaacctcatggcagttagaacagggtttattcttttaagtgtagaggtgagcgacttaacccttgcctggcatggtcttagattctgtttataatttggtatcttattgccacaaagagtctatcctgtcagccttatgacctctattttaacactaatgctggtcagttgttgtgtctgaacagcaaaagggaagcgggtagaatgagacgcgttcaacctcctgtcccgtcatggctgggaactcagtctgtaatgtttttctggggtcccctgtgccaagttagggtccattcggttggttgaggggcttaggattttacttttccttctcagactcttactctaaatctatgacaggtcttccttgactgggcagttgagtgtttcaagagatgctcatgaatggggctgtgtacttcaattcggcaagaggtgttttcacaagggcttgcaccagctcttcccgcaggcctgggacccactgccctattcttgagagctgttgtttggctcccctcgcttggtccttgtgaatggggaattgcctgggatgccctcaggatcaatttgcactcattaaactcaaactttcccacatgatctaatttgcatgtaattagagaaattcaatttaagctttctctttcctcttctcttccttatagagttatctgaattcattaatgatactgtggtgaacaccagtgtcctgtgaaatgtgttctcctgtctcccacctcagaatccctggctgtgtctactttcaaaacatggttcatttataaggggaaaatgtgagataacctgccaagttcagatgtcagtcctctgagatccaccagttgagttagaaaataatgagtggatatatactaaaaaacagtgacaacaggtagggcgtggtggctcacgcttgtagtcccagcactttgggaggcctaggcgggcagatcacgaggtcaggagatcgagaccatcctggccaatatggtgaaaccctcactctactaaaaatacaaaaattagctgggcgtggtagtgggcacctgtagtctcagctaccccggaggctgaggcaggagaatcacttgaacccgggaggcagcagttacaatgagccgagatcacgccactgcactccaaactggtgacagagcgagactctgtctcaaaacaaaaacaaacaaacaaacaacaccaaaaaaaaacagtaatagcagaatgaatttcaagaataagaacagaatgacccgatactgcagtaaataaaaatcagtgaagtccactgttgtagatagaataatgtcccccagtgatgtccatgtcgtacttctcagagcctacgaatgtattatgtggcaagtgggaattaatgttgtgacttacctaatcagccaaccttaagataaggcgaggccgttggactttctcagtaggcccagtaaaatcaccagcatccttaaatgaggaaggaggtccgaatcagagaaggcctcctctggccactgctggcctccaagatggaagaaggccacaagccaaggaatgcagacagcctctcggggctggaaaaggcaaggcaaggatcctcccaaggctccacgaggagggcagctctggccagtggggcccgtgtcacacttctcacttccaggattgtaggaaaagaaattggtgttgtcttaagctaagtttgtggtaatttggtacaatagccataggaaacatgttggattctctactgatgtatttgctcatgttcatttatttattcatgttgggcatgagaggttacacatttacttgagattcagaaatcacaggatacaaataatttattccctgatagttataaggttcaacaaatccaaaagcacaatatattttaggtgataggatctgttgggatttaggacgtgctaccccaaaatatggcaccctggcatttgagaaaacagtagaagcagaaggcgactttcttctttcccttgtccttctcccatgaagtagaccatacaaccatcatttgagaggtgcccccattcccgaaagaaagggacatctttatctctgaagacacagggacacagagaagaatctgaacatagaagccttgctgtcccctccatatatcaccattagatcagaccctttgtccttaattatatatctccaggactgttcactcttcatcaaacctgagaataataatgtaaaagtttgctggtttctttgggtcttcttcactcctgaaggctcctgtttaacataaaactttaacttctattaaataaatgtgtatgcttttctcttgtcagtttgtcttttgttttagaggcttcagctctgaacttggtgatgggtgaggagagaagatttctccttccctacgctcttcaatccctaaactttccttccctatattcctataatcccattcttctggattctctcatttctttcttgagtgtctcttcacctcacctcctcccacaacaaaaacctcctacaaatactagcacacccagcatctactgaggatagtcagatcttttaggatactctgggtagttcagaatcagatattttctcaggtgctgaacttgctgccatatttgttgaaagccacttttccaccttatacaacattcttttctctctttttcttttccttccttacttccttccttcatctctctctttctctctctctttctgccttccattctttctcttctcttttctttctttttatttatttatttctctctctctctctctctctgtctctctctctctccctccctccctcccttccttctttccttttttcttactttctttcttttttttttggacagagtctagatctgtcgcccaggctggagtgcagtaacctgatcacaagttgctgcagcctcaacctccctggcccaaggaatcttcccatctcagcctccagagtagctgggattacaggctcacaccaccactcccagctaattttttaaaaattatttttagtagaggggagatcttgctacattgcccagattggcctcaaactcctgagctcaagcaacgctcccacctcagtctcccaaagtgctcacattgaagatgtgagccaccccactcagcctatctgaaagacttaatgatatttcatcattgcaataattccatcttatagtagaatctcgtagaaaaaaacagaggtaattttaatgcaggtgttacattttagtattatttttaaaatattgtttgttttctcttagtgagttataaattcttcctttgaaactgttagctgctcagaagaaatgagctagaaattgcttgtcaattgtcaatagttactaatagttactttaatatttgcataataaatgagtcaacagtaattggtcctgcaaattcatttttgtcagaccctgtaaatgtttacaaatacccacacatacattgtaaattctgttattgaacaataatactcggctgctcattattcactttactgatacaataaaggcaactggatgtgagacctgaatggaaacacatataaagagaaaataagcaaggttgtttaatgcctgattgtctagggcaaggagattcagcagagacagcagagaataaggagagaacaaggactcaaaaatggctcctcagggaccgggtgtggcagctgatgcctgtaatcccagcactttgggaggccaagggtggcggatcagttgaggtcaggagttcgagaccagcctggccaacatggagaaaccctgcttctactaaaactacaaaaattagctgggtgtggtggtgggcagctgtagtaccagctacttgggaggctgaggcaggagaatagtgtgaactgggaggcagaggctgcagtgagctgagatcaccgcactgcactccagcctgggcgatgacacttcgtctcaaaaaaataaaaaaaaaaagtgctgccacaaatgtgtcctgctctactttatggtggcagagtttaaggggggagaaaaaaaggtttgttaagagtataaactaatagttttagataaagtgtgtttgagtttaagtgatgtaacttgctatgaatgctagaaatattgttgtaaatgtggagctagaatacagaaggtaggggctggatatattttagaattaagaaaggtcaacatcatttcctacaaagaaaacaacaggaaagcgggaagacagagtgtaaaaagaagcaacaaatgaagaaatggcaacatcttctagaaaaaaaaaatctttaccttcctcttataaaatttatctatgaccttctatcaaacaccctcccccgccacacacacatgcatctgtatgtatgtatgtgtgagtcagctagggtggccatcacaaaataacagactggggagcttaaacgacagagatttatttttatctcagatctggaggcgggaagtctaagtccaagatgtcagcaggctgagttctcctgtgcctctctccttggcttgccaacgccccccttccctgtatccccacatggcctttcctccttgcacgggtcaccccagcttctggctggataaggatgactagttcagaatcaaatatttgacttgtggagagtccattgattttttagcctaatttttctgtctacattttcaattgagacatagaaggtaggtacttagagaagatacttgctatgtctatttgactttgccagctgaggctcctatgatttgaagggtgtttggggctgtgtgtgttgatgagcatgtttgtgcagacatgcaggggaatgacacagagaaacagtgaaaaccggcagaatgagcagctgtgttaattctcaattgctcttcaggtcctagaagacaaagcctttaccagggaacttcaggtgtagcaaatgctttaaaatattttcttatggccagatgcagtggctcacgcctgtaatcctagcactttggaaggtcgaggcaggcagatcacttgaggtcaggagttcaaaaccagcctggccaacatggcgaaccccattgctactaaaaatacaaaattagccaggtgtggtagtggatgcctgtaattccagctactggggaggctgaggcaggagaatcgcttgaacctgggaggtggaggctgcagacagctaagatcgcaccactgcactccagcctgtgccacagagtgagactctttctcaataaaaaaaaaataagtaaaaataaaatattttcttcttttgcttaaagtcactcctgggcgttagttaatgtcaaccaacataaatttaggtaaaaaatcaaggatgggagagggagtgaatacacacttctggggaaagcacagcagagttttcagtttctcttcccttcaagggaagaaacctttttctgcatacaatacaatcttaggtcacacaatatacatttttcctcagatactaggcattggcagattgctgaagatgcaatacctatttattcattatctattttaattacttcattctctctattttcactgggaataaagactaggaaagtaaactaggcaaacaaaattcacttttaatattctttaaatattactaatagagtaaaaaattagttcatggggaatataaactcaattttccacctattcttcaaacctatacaagccttcaaaaagcaactaagaaattatatatataaatatgtttttgtatatattcatgtgtatatatgtgttatatacacacacacccacacacacacgttctatacagtgtgtatttaacttaatgaaaagttaaaaaccaaccacctaaattaaagtaaaagttctttaaagtctgtcattcgttagggaaaagaaatgatggacaaccttgttcagtggatttgaattaggtacaatcacaccactgatgaacacagaactggcggagaagaggcatataaaatgcacaagcttggacattagcagatcctcactctctgactctgtacacgctatgaccttcctgcttagggaagactttctgtcatgtaaggataatcagtattgcttcctcactgtgtctggaacattaagaatgcattccccctaaatggtagatactatcataactattatatcatgtctcttagcttgactggggacccctaccagatcccctctatcccaactggacatttcaatgcttatgtcctgaagtttctgctcacttaggctttgggcaaagagctagacccagtgcatcctaagaaaactcctctcttctatcacaaagggtgtagacagctctttgcttgctacatctggtgtccagtgatagatacatttttttgggtttcctgaatgcgatcttagatgcaggacgctgaattagagttgaaaatgggggcaggaaaagcgtcacagtgaagttgagacatccttaggctgattccagcagaattgaaagaataagccagaataaagtgtgcgtttcaattagcaaatttacaccatcagtgaaacacaatcttatggggtgcagtgaggaactacaataaatgcagtattggggagcctggagaaaaagagaaagtaggccaaagcaactgaagttggagaggtaagcagaggtttgattacttacgtccttgtacaaatttgaagaagctctgactactctgtaattcttactatttggtgttttgtttcctcatttgataaccaagctatttttgagctaaggggagggtctccatgcagggtaacatattttctcaaagcgaaatattacttttttttgttgcaaataaggcacatataatgggaaatattggaggtcaaagcaaagtttgtattatccattgagaaaaggcacttgactcattttttttaattaaaatgtttaaaatttctatctcattttcaaatgtgtgacaagcaatctgcactgaaggtttacagatctcagatgcatctctgagctgggggaatagcccatagaatgataaagtgccaagttttttctataagggagtaaattatcttctgataattgggctaattgcctaaagttaattattttctcccttgtcctatggtcattcaagtattaatcaaagttgtaagtaaatcataatatagaatattagctggctgcttggtggctcacacctgtaatcccagcactttgggagaccaaggctggaggattacctgaggtcaggagtttgagaccagcctgaccaatgtggcgaaaccccgtgtctacaaaaaatacaaaaattagcccggcgtggtggcgggtgcctgtaattccagttacttaggaggctgagacaggagaaaggcttgaaccctgaggcggaggttgcagtgagccaagataatgccacctcactccagcctgggtggcagcaagactctgtttcaaaaaaaaaaaaagaatgttagctaatagaatgctttgtttattattttatttctcctggaattggattttatgtgcctggacactgtatgacctcttgcttcacattgtgaagatataaacgtgcttttagatgttattcttgctggctgagttcagctagcaccatcgttctttgtggttcttgttgagggaagtgctcactgcagagtgttatcagcatagactctcattgactgcactcaaaacagggaacttagtcgtcgcggtcatttgtccctgtttctgtgttcacatccctcttcactttccacttcagaatagtttcctaatatttcttatttacttatttatttatttagaggcagggtctcacactgtcgcccaggtcggagtgcagtggtgcgatctctgctcactgcaacctcctcctcatggggttcaagcgattctcccgcctcagcccgccaagtagctgggactacaggggcccgccaccacgcccggctaatttttgtattttcaatagaggggttttcaccatgttggccaggctggtctcgaactcctgacctcaggtgatccgcctgcctctgcctcccaaagtgctgggattacaggcgtgaaccactgtgcccggccccataatatttctaataaacaaaacatctgttgagtctttaaatgttgtattatcttttcaattagtcatttgaaaacatgagtattccgaatgaaaataatgagactatttttgtcactaataaagttacaaaacatattgaaatatggatgatgatacagcattctgcctagcatattcttttgaaatgtcttaataaaatataagtagaaatatcagttcactaaatgagacaacagagtaattcatgtggtataataaggctttaatacactaattacatagtttgctctttagtataatatgctacttttcatatttagatgggtaatattttctgtgaacactagattcattaataattataaattgctgtagcttaggataacaaaaggtctttggctccaaaataatactctaattgtcagtgtgattatttcatttgcagtgattaatgatgttggcatttggttcataatataattgtattactttgtatttctacagcattctttttctaagaacttaaaagtacttctcttttcttataccatcgagaagtagtgtagtgtacaagtactgtataataattttagttttataatggtaaagtcactagctatttttataatatttattattttaaataattcaaaatacaaaagtaacacttttatattttttagctcaaaccaaataattcagaactttttgtatgttgacagttgattttgtaatgcctccacttatatttaagtaactgtatttgttctacttatgtgtgaactttattacattgcaaactgaaattattcttttaatgaagaatactaatatttgtcctaggaagcttagagataaaattctagctattttatatcaagtctatgtaatacatttctgcattaaatacacacctggcatttagtgaatttttataattttaagttgcctcagcattcattttgaatataaatgactctcacacgagaagcagggctcagtcacccttgacacagtttctaattcgacattgccgtgcccctaggtcctcagtggggttgatgcagctgtctgccttatacaactgccctctggtgaccaccatcctatgggagatgcagcctgcttaactcgcccaccgaccctcacacccgacatggcctgtagagatatgacacagtgactgcctctccatcatggggtgacctcctaaacttaagcctgtgtgcttgaaacccaccaattaaaatccctgtgggaaaccttcttggatacagccctagatccaataaggaccttggctcactggtccctttctctttctctctgtctgcactccttaatccccatgtgtgtggtttccagatatgccaggtacccccagacctgaaagtcttggaagtcataaagtatttatttacattttgtgcctttcctaagatcctaaattaaacatggcaaaattctatattcatagttaaaaaacaagcaaatgactatttctttgtcaatactgtgattttacattcacaatacatcatataaacaagcacaactaatcttttacaaatgttgaatgtgtaacatataaattaaaaaataaacacatttttcagaaccatttccagatgtgttagcagcaaaataaagaaaaaaataattcctagctacctacaaatgaatgaagctatttgatagaagagtaatgatataacagtagcaattagaactaaaagaaaggcatccaatggtatatacaacatgtaaaagtgttaccagagagaattgtattagttaagccaagaatatggttggagattcctggatactggcataataggtagtcaatcaatatgaagtgaattcattgactgaaaattgttgaagagtagggagactttacttacagactacaaaagatccagaagagatatttaaaaggattgtcagaatgagcagcaggaaactaaaattcaagtagaattatgggaagggatggaagagaatgcatttcagacattaagagtgacagatatagaagtgtgaggaagtgttttgaatgcatctctgcccagcaatttacataatctttttcagtttttcccaccttcaagcatcaaaagaacaaagaatggatatttattgatgttttctggaaaaggaacacacaaaatttatcaatagtagcattaatgttttcttatctcatttctcactcctgatgccaaagtaggttgctattataatcaggtcagtttttggaagatgaactttggtggtgaaattatgtgctgttagttctagatcttggaatgtaacttttctgcttctggccctgagttgtattgcctggcatatgagatgaggtaagctgagtgtccatatgatcaacatgaaaggctaggtgtgtgtagtggcagacctgccatctgtgccttccactcccaactccaggccatattcatggagcaaagctaaactctcacaagcacttccaccccatgtgtcttaaccccaaataactttgagatgggcccacagagaacatggtgtcaggggttacaggaggtagagagaggaataaggtgttcgtctttagttgacttgcctacattattatttatctgggaacattctaataggtaataaaaaactatctctggaatattgcacaatttaaaattatattttgctaattttttttttttgagacagagtttcactcttgtttcccaggctagagtgcaatggcatgatctcagctcaacacaacctctgcctcccgagttcaagcaattctcctgcctcagcctcccgagtagctgggattacaggcatgtgccaccacgccaggctaattttgtattttcagtagagacagggtttcaccatgttggtaaggctggtctcaaactcctgacctcaggtgatctgcccacctcggcctcccaaagtgctgggattacaggtgagagccactgcacccggcccaaacaataattattagtagttcctgcacattaatttttccccaaagtcagagaaaatatagcaattttttaaggaaaaaaatgcaaatctgacaataaacttatcattctcttctaaactaaagctattaaatcacattatagtaattatattcttcataaaactgagtggcttccagatcccagaaagatgtgagacttaaggtatcagagcattcaatatgctgagaatctgtcacctgcctttgttgtctcattctagtgaagacattcgtctagtgaggactttgtctcagaattctgctggattgttgcatggaaagagtgtaggatccctctgccagtgaggagtttttcatattaaagcagaattcagaccaaacactttgtgaaaattttcagtagctttgaatgaacagacatcttcactaaattatcagatgacatgcagttgacatacagttcacttcacacagttaaaatacaagacattaaagcattcatgaaaaaagattatagaaattaggaaaaataataatgcgaagtgcaagaaaaatcgatgacacacaatagagaatattaaaaatataggggattttgaaaatgaaagtaatgcatagttacatataaaatatggggtatttcccattcaataaagacagaattcacttatcaaaaggtgatatatataatggttaattactggaatttgaagataagtaattatttaggcatggaagaagaaactgtaattctcctgcaagggaaaaaaatttagactggcatcaggttaaacaaaatgaatgctcatgatgaaaagatagtgaaagttctataaaattctaagaattaagtgcacttcaaattgtttttaaaatgctgccaaactcaaacattttttaaacaaactctaaccatccaagaggtcaatcagaacaaagaggaaggagtaatttgtgaaaccaatatcagtaatgataaaggctacatcatttcagatttagtatatattaagattatattatgaactaatttacttatttgtaaaaatattgactatgttatgatctattgtttgacaagtatgataaaattaaccaatatgttaaaaaatgtaacttatcaaagatgtgggagaaccaaattaaaaatttgatcatgtcaatttaaagaccttctctaaaataaattaattagtgaattttaaataaatatttatgaaggtaattacagaaatattgctcaaactcttctagagaataaagcaaaaacatttctcaactcttttaatgaggccaacatatatttgataccaaaatctgatgaagacattgtgataaaataacatggatacaaaatttttaaacatagatgcaaaaatgcctcaataaaatattctcaaaatgaattcatcaatatataaaaggaccaaataagattcatttcagaagtgtaaagattattttatattctaaaataaattaatataagtaataaatttatcagtaaacaaaagagaagaaaaaatctcagaagtttaaaaaacacttttttttacaaaagtcaacatctttgaatgattgtaagaaagaactattattaaaagagccataagaaaacttcttgagtcttaagtttattacaaaacctacagcttaccttattctcaagaaatattgaaacatttttcctgtaagcaagaaaaagataaggataccattattgaaattaaatatatatattttgatatctcaacaaattaggaacaaaggggaatttcctagacttggtaaaaaaattacaaaaaccatacagctaacactgcaatgctgagaaacttgaagctttcctactatggtcaggaagaaggcaaaaatatacccttttaccactccttttctagattgtactaagaaacctacctaatctgatgagacaagaaaaggaaataaatacgaagactgggaggaaataaataaatctgttgtacttgcagatggcatgattagctatgcagaaaacatgaaagaatcaacaaaaaaaccctcctggaattaataagtgactatagcaaagttgcatttacaagtttaatataatatacacagatcaattgctttccaacatactagcaatgaacaagtggaatttcaggttaaaaacacaataccatttacattagcacagtaaaaatgacatacttagctataaatctaacgaaatacatacaaaatcaacacaaggaaaactataaaaatctgatgaaataaatcaaagaactaaataaatgaagagatattctatgctcatggatagaaagattcaatattgccaatctgtcagttctcctcaactttatagatacaataaaatctcaatcaaaatcttagcaagttactttgtgaatactgacaggctgattctaaagtttatatagagacaccaaagactcagaatagccaatacaacattgaatcagaataacaaagttggagaactgagactaccggacttcaacacttactgcaaagctacaataattaagacagtgtgttattggaaacaaacaaacaccaagtacaaatagatcaatggaacagaatagagagcccagaaattgacccacagaaatataatcgactcagctttgacaaaggaagaaagacaattcaacagagaaaggaaagtctttttaaccaatggtgccagaacaacagaacatccacatattaaaaaagaaacaaattgaaactagacacagagcttgcacactccacaaaatttaagtcaatataggttatataacaaaacataaaacacaaaactgtatgtatatgccatgccacgtatacagcacgtgatgtttatagaaatagtattattaattgttgtgtagaaatagtttatagactggaatcaagtgaaagtattgtttataaaattggaaaataaaaaaattaggaaatattatcagaaaagtataggtataactatagtagatgatactatattctgaattataaataggaaagccaaaaaactaaaaaataaagaaatcataaaaagtattatgccctgtctgctgggcgcggtggctcacgcccgtaatcccagcactttgggaggccaaggcaggcggatcatgaggtcaggatacccagactctcctggctaacacagtgaaaccccgtctctactaaaaatacaaaaaataaaccgggcgtgatggcaggcgcctgtagtcccagctactcaggaggctgaggcaggagaatggtgtgaacccaggaggtggagttgcagtgagcagagatcgtgccactgcactccagcctgggcaacagagtgagactctgtctcaaaaaaaaaaaaataaaaataaaaataaaaaaaattatgccctgtcaaaagtttttttgaattcttagctaattcttaacagatgtaagtacaacaaaagaacatggtatgatccttgacctcttggatccaataaactattgaaaagtgttgtaaatgtaaataacagaagcagatgagagaacatctagtttttccagatgacagttttcatgaagagcagaaaaaactgctctaagatccaagaaacaagcagcattgtagatgaagttgaaattttcagcaattagatgaatgcatatgaaattgcatttaaagcggattatcttaaaaacaaagaagagactttcaagaaaaagaaaatgagtgaatggtattgcaaatgctcatgttccttaaatccaattttactcaatatgaaaacaatgaaaagtaaacagtttgggtaaaattaagaaaaacaacaacagatgatttattcacaacttttcctgtttgatatctgagtagttagttcttgtacatgccatgctgttaaggtctgaaatggagaggaagcttgttggatggaagctcagtggcagatagaattgatggtctatcctgttgccattcttcctcttccctccctggcagatgttggaacttttcttctcatgttcatcttctcatgtactcatgggcattggtcccttcctagccacaatatgtagtttttgcccagtctaaataaaattatgataattctctttatcttgacagagaatggttttgccaaggtttgtcaatgtaattagcacagtggccaacaaaatatataaaggttggccagtcatagtggctcacacatgtaatcctagcactttgggaaccgaaggcaggaggatcactgaagataggagttcaagaccagcctaggcaacatagtgagacctcatttctgcaaaaatacaaaaattagccaggcatgttggcacatgcctgtaaacccagctactcagaagactgaagcaggaggactgcttgaacctaggagtttgaggctacaatgacctatgatcatgacacagcctgtgtgacacaaagacaccctgtcttttaaaaataaaaattatacattttatatatatatatatatatatatatatatatattcaggtatttgtgtaagaaaaatattctcttccctgattaaaaaaaattgtgcttggagatactgttctttttgtattttgattgagattgtgagaatcagatgcctggaggtgtagaaatgatcttttagtcatcagagggcaagactgaagacacatttcaactgctgaggacacaagacagaaatatcaatggcacttaggtccttggtggtattgggtggtacttaattaactgatcctagaatcacattttccaggatgtcttgttgttcatgatattaaactcttcattgtttaagacattgaattctgcttcaggtaatctattacttgcagccaaggcactccgactgacagaacaacaacaatacaaacagtcaacatttaatatgccaatagggtaagataaggtacaaagaaaatatttacatttaaatagacattttatgcttttaatattatgcaataaaaaagataagacaccccctcaacaagatcaacacagaatattcccaatatttccagactgttgaaaaaggggccttacagattcgttctttcatacgcaggtttataaattatgattttaagaggtgtctttatttattattatttatttatttatttattatctcaaagtagttagaagaaaagcaaaaatatctatcctagaatcaaatggattaaatataccgttgaaataacataaagtaaagctgcgtagaaggtagcaatttgatatagtgagacagctggtgttgttctagacaaaatcaataaaagcttagaatgtagatatgttcaggaactccaagaccagcttcagatcctgtgattgtccagaactcacaggacccagcatacagcatacccatggctaggatttactacagcaaaaggatgtaaaataaattcaacaaaggaaaaacgtgtagggggtgaagtctggaagaaatcaggctcaggctttgagtcctatcccagtggagacaccagggttggtagaagttcacaagggacttggtgcccagggtttttaccaggggctggttacataggcattgtctgcctggcacataccagaatgccaggaatccatgaggcaagtgtgttcagcagaaaccatacgatttgtttggttaggcatagcaagccactccaatctgttctgagagtagcaggaactcccctgaaatccaagttcctggacaccatcagagggccaaccttgtaagcaggacattttaagaataagcagttaggcctggtaggttaactcttgtgatggttaattttatgttaagtctactgagccacaggtgtgtagattagagttcatttctgtgtgtgtctgtgagggtgtttccacaagaaattagcatttgaattggtggattcagaaattagattgccctcctcaatggagtgggcctctttcaatcagttcaagtcataaatataacaaaaggcagaagggagaattcactccctgtctgcttgctgcttgacctggaacttcagtcttctcttactcttggactgggatttatatatttgtcaccctggctctcaggccttcagattcagattggaactacaccaccaattttcctggatctccagtttgcagacaacagatcatgggactgtatatatcttattggttctagttctcgggagaacactgactaatacaattcttttacatacagtagggaaagaagtaatagaacctcagtaatttgtaggaggctaaacctcagcagtgtcttgattcattttgggttttctatatttaaaggaataatgatatcatagagatattccagatttgagcatacaagctataacgtgcattgaaaacatgataaatgaagaagtcatgatgtttttgcaatgcgtgctctttagaaaagaagaaagaagacaagtgtatgctaagggcaaagaaaaatatattgatcatttcaaaaggccagatatagaggcaatataagcaaggcatttacaaggatttgtgagtagctaaaatattctgttgtgattcttaacaaattctccagttaaccaattaagcatacgtgctaggatctaaatgaaatttctactatctgaggaaggcagtgcttccattttcatttataattcacgtctccaaatttttgaaaagcttcttactgatgtccctttgtgacattttctcaagctcaaactctctttattcctaacattgtgttagttatatatccctgtaaatgagcatggccaattcgctgggtgacaagggtgtaaaggtacgaacctgttcatttagaaaagctttaaacttccaattctgctgagaattacacatgtaagaaacaaaaaccaaaaagtaatagccttatatcattttgttttctcagtttagaaaagcctttgatctcccacatgtatttacaagcatgtgaaattagaaacaccttggctaaaatatactgtgtgatggatagtttcagaatgcagaactttgcatagttattctatagtcgttgctgtttttaaatttggatgaagcaacaaattattatcaaacaggtatgtctaaacgctacattatttgatgacttttttctattcaaataaaagcgcttcttttatttctgagagatgattttatataattgtattttaggggatgatgtttacttttctctgctgaatgcttaacacgtagcccttttacttttgtttctctctagggcacatgcacaaaatgataatgcatgtccacaagttatttggcagcttgtgagagaatatttaagtccagtaaatgaagaagtcattcaccaagaccccgagcccaaatctcaccataaaaataagactaacagttcataaatcatgcttctgcatacaaacaattagattcaaaatttgaggccttaatgcacataattaaattattctttttcgttctgcttcacaacaggaagttgttattgtggggaaaatgtgcccacattaaaactgcaaattgatttttgatgaaataaagctacccgtaacctagagaaaatttgatgccttactaaatacagtgttaagcagaaaattgtaacacctgtgataaatacaattaaaaagactgcctttagagatataaatttgttattgtgaaatatgtgaatcttgcatatcactagggttttttttgaatggtgaaataaagacaaaatgaaaggaattattatttaataaaaagcaatgttcctattatagagttacagtgatgcaaataatccttgaaactttttgcacaaaaattgtagtctcctggtttcagctttgacatttaaagagactgaaaggtgacaccacatcctcataacatcaatcaataagtgaacaaacaaacaaacaaatgtgaataagaagataatcaacaacgcttcttgggcccgttggggaaatgatgttgtagagcaaatcatccttccacaatctggggagagggatgaatgaagagaatcatagctgagattgctgacctggagctgctagagttgaatgataatgaaggattactggagccgaacatggaatagtgtggtggagaacaaaactggagtccaaagtctgagggaggtcctcacactgtgggttcaaccaccaggcattccatcagattttcacagtaaagctctaagaaagacatctactggctcttgccaggggaatagtaatcactgtgaaatgtgcccagagttttttctataacaaaggactactcttcaggggaaaggactttacaagaagtcctttatctcatctgcaggaactccagccctactccttcccaattagccttaaggtctggcctagaggtaaatggaatacaccactgcaggaccttttatgaaggttcgatcactcaaaggcttggatggcatcgtaagattacagagtgataactctttccacgccttactgccacaccaatagggctcagaatagcaatggattgcagtggaaagagctgtcattctcagatgctttatgaggaggaggagttgggaaagcccaacgtcaaaagaggaaacaaaaacaaaaacatggccaggagcactggctcacacctataatcccagcattttgggaggctgaggcaggtggatcacaaggtcaggagattgagaccaccctggctaatatgatgaaaccccgtctctactaaaaatacaaaaaattagccaggcatggtggtgggcacctgtagtcccagctactcgggaggctgaggcagaatgacgtgaatccgggaggcagagctttcagtgagctgagattgcaccactgcactccagcctgggtgactgagcgagactctgtctcaaaaaaaaaaaaaaaaaaaaaaaactagaagaatctgagtcctctggcacatactgttacagaacgtattgtactcagcaaattgacaggaaagattaatataaaaacttgcattaagtgctatagtccattcaacatcataaggcatgcaataaaggcagaagaaactatttgtcaagaggaaaaaaattcactagaaccaggctcagatgtagcatgttagaattatcagacagagaaattaacgttggtatgattaatatattaagggatctaatggagaaagaaccaatgggttataaaaaagggaaatcaaaaaatgaaacaaaagacaatactagaaatcaaactcattgtaacagagttggagaatgcctttgatgggttcctctgaagactgggcatgggcaagggaaaaatcactaagcttaaaatttctcaatggaaacttttcaaaccaaaatgaaaagagtaaaaaaaaattaaaagaaaaaacaacacaacatccaagaaaagcagagcaactttaaaaggtttaatatacacataatatgaatattaggagaagaaacagaagacagagcagaaaaaaatatttgaatcaatagtgttcaaaaatttttcaaaattaataactcacactgtcttagtctgttttcacactgccataaagaactgccagagactgggtaatatatgaggaaaataggtttaattggttcacagttccacctgcatgggaaggcctcaggaaacttacaatcacggcataaggggaagtaggcatgtcttacattgtgtcaggcaggagagagtgagtgtgaaggatgaactgtcaaatacttataaaaccatcagatctcatgataactcactcactatcatgagaacagtatgtaagaaacaatccccatgatccaatcacctgcttcccttaaaacttgaggattataggtccctccctggacatgtggggattacaactgagataaaatttgggtggggaccaaggggcaaaccatatgaaacactaatatggtttgactgtgtgtccccacccaaatctcatcttgaattcccacatgttgtgggagagagccagcgggaagtaactgaatcatgagggcaggtctttttcatgctgttctcctgatagtgaataagtgtcatgagatttaatggttttataagggggagtttccctgcacaagctctctctttgcctgctcccaaccatgtaagacatgacttgcttctctttgcctcccgccatgattgtgaggcttccccacacaattcccagccacatggaactgtaagtccattaaaacttttttctatgtaaattactgagtctcatgtatgtatttattagtagcatgaaagataactaatatagtaaattggcaccactacagtggggctctgtgaaaagatacccaaaaatgtggaagcaactttggaactgggtaataggcagaggttaggacagtttggagggctcagaagacagaaaaatgtcaaaaagtttggaacttcctagagacttgttgaatgcctttgcccaaaatgctgataatgatatggacaatgaaatccaggctgaggtggtctcagatggacataaggaagttgttgggaactagagcaaaggtaactcttgttatgttttagcaaagaaaccggcagcatttagccccttccctggagatgtgtggaactatgaacttgaaagagatgatttaggatatctggcagaagaaatttctaagcaggaaagcattaaagagctgactcaggtgctgttaaaggcattcagttttaaaatggaaacagagcataaaagttcagaaaagttgcagcctgacaatgcaatagaaaagaaaatcccatttcctgaggagaaattcaagccagctgcagacatttgaataagtaatgaagaagcaaatgttaattgcccagatgatgcagaaaatgtctccagggcatgtcagagacctttgtggcagcccctcccctcacagaactggaggcctaggaggaaaaaatggttttgtagaccaggcccaggcccctgcctgctttgtgcagcctagggacttggtgtcccatgtcccagccactaaagccatggctaaaaggaaccaatgtatagcttgggccatagcttcagagagtgcaagccccaagccttggcagcttccatgtggtgttgagcacgtaggtgcacagtcaagaattgaggtgtgggaacctctgtctagatttcagaggattaatggcaattcctggatgtccaggcagaagtttgcttcagggatggagccctcaaggagaacctctgctaaggcagtgtggaagggaaaagtggtgtgtgagcccccacacagaatccccacttggatactgcctagcagagctgtaagaagagggtcaccatcctccagaccccagaatagtagatccaccaacagcttgaactgtgcacctgaaaaatccatagactctgaatgccatcccatgaaagcagccaggagggagactgtaccctgcatagccacaggggtggagatgcccaagaccatgggaacccacctcttgcatcagcatgacccggatgtgagacgtggagtcaaaggagatcgttttggagctttatgatttgacttccctgctggatttcagacttgcatgggtcctgtcgtccctttcttttgggcaaattcttccatttggaattgctatatctatccaatacctgtacccccattgtatctaggaagtaactaacctgcttttgattttactggctcatagatgaaagggacctgcctttccttggatgaaacttttgactgtggacttttgagttaatgctgaaatgagtgaagactttgggggactgttgggaagtcatggttggttttgagatgtgaagacatgagatttgggagcagccaggggtggaatgtcatggtttggctgtgtccccactcaaatctcatcttgaattcccatgtgttgtggaagggatgctgtgggaggtaattgattaatgggggcaggtctttcccatgttgctctcatgatattgaataagtctcacaagatctgatggttttataaggggagtttccctgcacaagctctctttttgcctgcttgcatccatgtaagatgtgacttcctcttccttggcttctgccatgattgtgaggttttcccagccacatggaacagtaagtccattaaacctttttcctgtatgaattacctcgtcttgggtatgtctttattaccagcatgaaaatggactaatacagacaccaaaccaaagtttaaaagaaaaaaaactcagaatagaccaagcttgctaagaagaacagcaaaaatctctacacctagacatattattttcaaactgcagaaaacaaaatacagaaaaagagaaaatcttgaaagaaaccagaaagttagagaagcaaacaccttagctataggagaaaaaagataagaactagaataaaattatcctctgaaaccattcaaccaggaggtgaatgaaatgaaatatttgaagcattgaaagaaaataaagccaccaacataaaaattatatatccactgaaataatccttcaaatgtgaagaagaaacatcctattagcttcaagatataaacagattaaaaggcatcactcctgccctcaaataaggaaagagctgagcgaactgaaaatcaatgacttctcagatccatcagaaatcgaggtcataagacaaactgccactccaaagtctggagagacagatgaacacagagaagtatagtgaagatctgcttccagcagtgaagaaaaatatgctaaaaccaataagtgataggaaaaaagaatgataattgtgatgaattattgacaactgaatgtggattagcttgaggtaaaaactctctgagggcctagactgaggccccacattttcatgagttttaccaaacgtagttctcacagccttactcaatgaagaatagacaaaaatccacttgtgttttgggcaggaaggggagaaaaaacattctgaaatacactcagagcattctcaataacagaaacctctgtagagaaactattttaccagaaccttatctgagctggaagaacatcaattaggcaattccaatatcttctagtattgtatctcacagaagtggagaaaaattaaaaaaaaaaaaactatagtaaaataaaacctctgtcacttgcagttagagcagacattcaactcagaccaactcctagtctgatgtacagaaagtatcacattcaaaacctgatgacctgacacattgtgtcaggctttcaacacacactgaaagctgaaaggcaagaaaacacaggctggaaagacaagcaagcatcagaaccagcatcaggtatggaagagactttggaaatattagaccaggaatttaaaataacttagaataatatattaaggagtctaatagaaaaagtcatcaatacacaagaacatatgggtaacacgtgcatacagatggaaaatttaagaaacaaacaaaagaaaatgccagataacaaaaacactgtaacacagaaaaagactttctgtaatggactcgttcttagactggacacagctgaggaaatatcactgagtctgaacatatgtaatagaaacttcccaaattgaaatacagaaaccaaaaaaattaaaaatataccagaataccccaaactgagggatcattacaaaagctataaatgcatataataggaatagtagaaaaagaataaagaaacaaaaggaatatttgaattaataatgactgagaatttttaaaaataaatgacatacaataaaccacagatccaggaggcacagagaaaaccatgcagggtgaaaaaccagaaagtcttcatctaggcatatcatagtcaaactgcatgaaacaaaggacaaagagaaagtcttgaaggaagtcacatggggagaatggggcagttcctccatagaagaacaggaataagagttatatatgacttcccatctgaaaccacacaagtcagaagaaagtgaagtgaaatactaaaaattgttgaatgagaaaagaaaaaaacacaaaaaacccaagacgccaatttagaattctgtactctgttattatccttcaaaagtgaagaagaaataaaaactttctcagaaaagtaaaaattcagggaaagtgttgtcagtagacatgcctatctctcaccgcatctctccaacattgtactcgaagtctcagtgcatgcaataagacaaacagagggcatgaaagttatgctaattagaaagaaaaaaacttgtctttgttctcagatgatctaattatggttataattataatcatctatccagaaaatcccaaagaattcacaaaaaaattgctagaacttataagtgattatagcaaggtcataagatgcaaggttaatatgcaaaagttaattgctttcaaatataataacaatgaataattgacatttgaaattaaaagtatcatttaatatagctccaaaatttaaatacctataattaaattaataaaaatttgtgtagaatccctatgtataaaactacaatactctgatgaaagaaaacaaagaaattcagttatgtgagggatactgtttgctcattgacaagaacgctaaatattattaagatgtcaactcctctcaagttgatatatagattctacgacttcccactcagtatctcagccagttgttttgcagatattgacacactaattgttaaatttatatgggaagtcacaagactcagatttgccaatacaatactgaagaagaacaaagttgaaagactgtcactaccctaattcaagataaattataaagctactgtaattgagtcatgtggtattggtgaaaaatagatacataaataaatataacagaatacataatacaaaaatgaaaccacacaaacccagtgaagcaatctttgaaaagggagggaaggtaatttaatagaaaaaataatagtcttttcaaaaaacagtgttgaaacagctggatctgtatatccaaaataatataatcagacgcaaaccttacacaaccttacatcaaaattaactcaaaaaagaccatagacctaaatatataatgcaaaactgtaaatcttgtaggagaaaaagtaaggaaaaacattctatgtgactttgaactgggtgggagttcttaacagcataatccaaaaagaaaaatgtaataataataatatagactacattaaaattaaaaacttctgctctgtgaaaatatttaactgtatgcattaacatacgcattttgtgctatgggcacttaggaaatacttggtgtcatgagcccaccattactgggctcatcaaaaactgaaaataatttcatcaccctaaaactaccatcattcactcattcaatacttctctgccgtagtctctggaaaccactgatcttattgtctctataatttttattttttcagaataccatataattggtgtatggtacataggcttttcagattttttttcacttaataatgtgcatttaccattcatctactaattttcatgacttgatagctcattactttttattggtgaataatattccatcatatatttgtaagaaaattgtttatccatttctctctctctctctcttttttttttttttaagacagtgtcttgttctgtcacccaggctggagtgcagtggtgcaatcttggctcactgcaacctccacctctagggttcaagcaattctcatgcctcaacttcctgaggagctgggcttacagacacgtgccagcatgcctggctaatttttgtattttttgtagagagggagttttgccatgctggccaggctggtctcgaactcttagcctcaagtgatctgcccatctcggcctcccaaagtgctgggattacaggcgtgagccaccgcaccaggcccattcatctcttgaagactatcttgattgcttcgaagttttggcaattataaataaagctactgtaaaaattcatatacaggcttgggtgtggaaataggttttgaaatcagttgggtaaatatataggagttcaactgctggataacatggtaagactgtgtttaatgtttttagaaactctctgccttccaaagtgactgtcccattctgcatttccaccagaaaagaattagagttcctattgccctgaattctccacagcagttggtagtgtcagttgtttttttttagattgtaggcattataatagattgtaggggtttctcattatggttttattttgccattccctaatgacaagtcattttaagtttcatctttatattcattcagtctatttataatttttcttcattatgtaattgggctgtttgattttaattgttaatatttaagacttcttgcatattttgatacaaaccctttctcaaatgtgtgatttgaaaatattttctccttgtttttgcttgctttttgattctcttaatattttctggaaaaacatctcatacgagcacagaaagaaaaaaaaacaaataaaatcaccctttcttcattcgtaagcttaaatataactgcactgaaaaatttcctctttctataaaacaaaaataatctgataaactcattcaaaataagaaataaaaaaatgaatttcaacttgttactctgcaaaggtaaatttgcatttcagcagtgtctaaaacatattacaaatattattattaagaaaaaaaatccaatacagagttgttccactgaaagagagccttcttagaagcggatcatggggtcaggagatcgagaccatcctggccaacatggtgaaaccccatctctaccaaaaaatacagacaattagccgggcgtggtggcaggcacctgtagtcccagctacttgggaggctgaggcaggagaatggggtgaacccaggtggtggagcttgcagtgagccgagatcacgccactgcactccagtgtgggtgacacagtgagactccatctcaaaaaaaaaaaaaaaaagaccccatcatacttaacttatgcattgaattaatttacatcaaacaaatgcatattttactttcattctacctacaggtgtccacacatcatcatgtaagataaaggcatggaaaatgaataataaagaggtcttattcacagtgaaaaagatatagctaggtaacgttaaaaggatgtagaaactgatggctctcatgacacctgaatagtagtactcctgacaaattatgcaggtcaagatattgcagagaagacaaaagcaccaaagaaagaaaaatcacttttcagtatggaaattcatgaaggttcacattgacctattatcaaaatctaatagtaaaccagcagaaaaatgaagatggccaactacgaatagacaagcagtaggaagaagacacagagttcttagggaaaattcattgagaggtctacctgtggctattatggattaattagctgtgggaaaatatttctgctaagacataaacataatgttacatatatatatatatatatatatatatatatatatatatacacacacacacacacacacacacacacacactagaaggcagtggggaccagtttgcttttggagccttgagggaccaagatctttgagacctggggagagatgaggctatattttgtagccattttccctgagtatattttctaattctgagcctataaatccaggcaaaacatatagctagaggatcatctttctgaaacaaagaaaccaactaaaattttggcagtctaggaggcttcacagacaaatttagtgattttggaagagaaggacagagaaatcagtccaatcctcagttgctacttgccaaaatttaaaactggatggcataggatgataaaaagcaaagcagaaaaatctaaagaacactggaatttatagcagtcttgtggtactggggaaacaaatatcagagtttgggaggtccagcagtggggttaaggactggaagcaccccatgatctcagttggaaaattgaggaaaccgcacaatagcaggagaggaggcacaggtgaaaaaaaaaaaaaaagacaaaaaacaaacaaaaaaaaccttttaccagaattgcagcacaaccttaaattagttctatctagcctaatctttctaccaggcagaggacaagtaaaacatctttggggaaagatgagagctttttcaatttgtaaacaatgtctatcactgtacaaattgtacacaagggacatgacattgtgaaaattgtggtttagcatgagcaaaagtcaggatctggcttgagatactgtagctatgtggagaattagccaagcaaaggaagagagtgtcctgagggaggtaggaataattttattgtaaaatgtttctaaatagttaagcagctgttaaatgagtgcaagttaataaagaagccacagaactatatataaagtctgtcctcattattcatgaattttatgtgtaaattcacctacttgctgaaattgagttgttactccaaaatcaatattttcagtgcttttgaggtcatttgtgaacatgtgcagaggagcgaaaaatttggagccattcaatatgcacattctcagctgagcctgaataaagtggacactgtgttcttgtctcaactttcatactataaacaagcatctatgccaggcgcaagcggctcacacctgtaatcccaacactttgggaggtcaaggcgggcagatcacttgaggtcaggagtttgaaaccagccttgccaacatggtgaaaccctgtttctacaaaaagaaatgcaaaaatattagctgggcatggtggcgggcacctgtaatcccagctacttgggaggctgaggcaggagaattgcttgaatccaggaggtgaatgatgcagtgagccaagactgggccactgcacttcagcctgggtgacagagggagactccatttcaaaaataaaaaataaataagaataataaacaaaccaacaaatgtccgcttcaagtccatttagtgttacatttttaaatttttgtgcttcttcttcgtcattttgccatttaaaatgttcctatgtgtagtgctgaagtgttgtctaatgttcctaagtgcaagaaggctgtgatgtgccttatggagaaaattcctgtgttagaaaacacttcatttaagtataacttataggactgttggctgttaagtccagagttaatgaattatcaatatatattagataaggtgtctgtaaacagaaaaacacaaagagcaagataatatcttgattagttgataaaaatgtagtgaccagaggctcacaggagctcaatcccaaattttccccaggagcatgactgtgtttttggaaggctggattcagtagcaatgaagaggctgtgggtaaggtatgtaaggctgagtaacactctggagaattgagtggcctgtggcccaaagtgcagctggtccccacataattttaattcaatggcaaccacactaaacctatttttatcaaaatggctcagaatctccatttgcatgttgtccagaaagatagaccctgtgctttgaatacatagtcaatgtttaatgacaggaatatgttctaggaaatatatcattaagcaatttcatcattgtgtgaacaccatggagtgtacttatataaccataagatgcgagagtgtgctacacacctaggctgtatcctacaacctattgctcccagggtacaaactagtacagcaattgtaacacaatgcgaagtagttgtgtgtctaaacatacctaatcatagaaaaggtacagtaaaagtatgtatcataatcttatgggatcatcatcatgtatgtgacaaaatgttgtcaggcagcacatgactgtaattgctagcaggacatttaaatttaaatggtcaccaggtgatgggttcaaagaataaaacatgtagaagaagggagaagacaaagggagtgaacagaatgtcagtctatggctcattctaacatttgggtggaggatctctttagctaagaacacttgggctttacagtttgttaagaatagagagcttgaggatcatggctgcagagcgtgttttgaaccacaaataaggaaagcaatctcactagaagagtaatggcagatatgagattgtcattagttaaagatcaaattagtaatgaaaagggatatacagggagagtttagaattgtgggggcagggctgggcacggtggctcacacctgtaatcccagcactttgggaggccgaggtgggcagatcacgaggtcagaagatcaagaccatcctggctaacacggtgaaaccccgtctctactaaaaatacaaaaaaattagccgggcatggtggcgagtgcctgtagtcctagctactcgggaggctgaggcaggagaatggcgtgaacccaggaggtggagcttgcagtgagccgagatcgtgccactgcactgtagcctgggcaacagagcaagattccatctcaaaaaaagaattgtgggggcagtgcagagatatttgaaaggaaagcatgggaaagataattttacctggaagcagtgttaagaaaatatgttttctcaacatgaaaagaagggaaaatatttttagacaaaaaatataaagtagaatgatatggtacattattccagaggtggaagaggattaaatcaaaagcaaattgcactgctatagcaatgattaaagattttccatttctaccaatgagaaagagggaaaaatgcatgggggataaaaaggaaatggataaaagaagaaagaaaaagataaatgtgacagaaataaaagaagtgagatattctgtaaaacaatccagaaatttcaaggtggctgtcagttacgttcagaacatttatttttgaaaatatgtttgtaacaatctactaggcatcttatcatatgttaagcagtgtgactggcttggagaaaaaagttattaaatggatactagtcttggctctcaagttgcttaaagcacattcgacagaaatgtaacagacgtatgttcaaggtggttttgccacaaaagggctggtgttatagggagctacccttaaactagcttggggaaggagtccaaagaaggtgagtcttaaaatgtgttcagaagagagagaaatgaagaaaagggcaaataaaattctaggcagagggtaggcagaggcaaggaagtatgagaaagcaaggataagttgagacattgaagaagttaaaaaaaaaaagactagaatccatgtgtgtctaaaaaatgtaagctgggaagataagctgaagccagataatggcactggagtgtgatatgatggattttgtttttattttagaaacatcatacagatggtagattgcagaatgtcatttatctccagaatgacaaaggaaccagagccttcacccaagagtggagtgtggaagtaggttggggatatgaaggcaatggaaaatattttgaacagctgctaaaagaagagttataatgagtcaatcagagatgaggaaaatcattcctaagcatctctaagaccctgaccaaagttgcttagcacgaaattgtggtgaagctagtcatcacaattatggcaacaacagcttaggctgagcagcaaaataataagaaagataaaatgttgttgaataattgtgagtgagatatgtctcactgtcctttgtggacaaagaacaatgaaagacataaactcagggcacaattaaattggtaaacctctaattctattatgggtatgggtgcaaaaataaaaccttgagtggactcagaacacaggagagaagagaagatgatctgatgggataactgtataagaagtgcagaatgaaataaaagggagagagatatgaaagaatatatatcagccagttaagagaatcatagagttcaaaaaactcagaggtggattaattcctggtaataataaggcttagggtgtaagtcactgacagtcaattaagtatgctggagttgaaggtcaaaagaaatgagtcagaaaagttggataattaaactcagaatgggggagataactcaatagtgcaattattgattagaacaccagagtgatgtcacctatcacaagaccacatcgacaaacgttttttctttcctttttaaaatgagaggctacttgaaaaagtgtttaatggatcgaaatttgactcagtaagaaagtaatatggcagaacttggggataatttttgacttttgagttttggtaagttggagacattgtagatttagtatgaagtttattctttacattttctgcagagaaattgttaaaagtgtgaatgaaagtaaaagaaaggcctcccctcatttttcccatttgtgttttttctattatattaaatatcattggaattatttataagctttaagcttaagaagcatcacccatagattgttgtctgttcaaaactgaaatctcattttctgatgtggaccaatcaatgcttgtggaataaatgaattagtcttagaattaaacttaagtaatatggaattaaatctctattattttcttttccaaccttgtgttcattgacaaattgtttatattattttcagttttgactctttacatataatattgattatataataactaaacataaggctatattgggaagatagtaaaataaaatattaaaatgcctcgtaattataattattaaataagctcacctgaatttaacacttcttttgttgtgatgtatagtgttaagtaagctgtttagagataactaagatctgatatttttaatgtgataggtttctcttccacaccagtaattggtgatgcaaatccttttccagttttaatcataaccaatctcttttttgttcattgcctttaaaaaagaaaacagttttcaagtagtcagagtacaaattgtaagcatgtatctcttaaaatttttacatatatttctaggaccatcactgagattataatatagaacatttttatctccccagaaaagtttgccctgtgcttttctagccaacggcacctcagccagaatagtataaccctgtagttacttttaatgcctttgagatccatcccagttgttaaatttatcagtagtttgttctgttaaaattgttctttagtattgcattgtacaaataacagacctttaggtattctattgttgatggatatctcagtagtttcccacagtatttgttgtaagaatgcgctttcaccagtcattttgtaaacatatttacaaagtaagtagaaaatattttaaacacaatggtaatgaaattaagacttgctaaaaattgagtgttccatctaaactatgccgagagttaatttatagccttaaatgcaaatgtaaaaaaaatcaaagcctagaagtaaataaatatctacccaaagaaacaaaaatcaacaatcagggcattaaatctacaagaagtagtattaatagggttgccaaataaaatacaggctattctggtccaattgaatttcagataaacatatatattagtgtaagcaagtgtcaaatattggaaaggaatatactgatactaaaaaaaaaatggcatacctgaattcatatttacctgtgcatcctgttctcttttgttcccctgtcttacattcctaagtggaaagctggtcactatgtgagaatattattattaagaataatgataatgaaatgagaaacaagtctataataaaggcatcaataaagataaaaatttgttctttgaaaacactaataatatttttaacacctgagaatatcagagacagcacacacaaaagtacacaatataagacataaaaaacagaacttcactatagatattaatgacatagaaattagaagagaatactatggtctactttatgcccataaattcaaaatcttagataaaataccaaattgctagaaaaaattataataagaaacaaaaaatataaatgaaaaatttgtatttctttttaacataaaacattaaaactcaaaccataattaaataacattactcaaaatgtaaagcacagatgaatcttatgaaatatttaaaacagaaataacacaaatcttaggcaaaccctttcataaactagaaaaaaaagacattctaacttattttctgacgaaaaagagaacttgatactaaaatcagacatgaatacaagaaagactatttctatttctggctcttttatggacttggataaaaacataaaaaaaagcaaacagaatcaatatatcaatgaaaagaatactgcattataatcaagttcatttggctttagggatttagtttagccacaggatattagtgtaacaaaacaaagggaaacaggtgatacaagttttttggttttttttttagacatggtctgttgcccaggctggagctcagtggcgccatcttggctcactgtaacctccacctccctggttcaagcgattctcctgcctcagcctcctgagtagctgggactgcagaagcctgccaccacacctggctaatttttgtacttttagtagagacggggtttcaccatgttggccaggctggtctggaactcctgacctcacatgaggtctgcctaccttggcctctcaaagtgctgggattacagatgtgagccatcgcgccccaccacaagtgatacaattatctcaataggtgttaataaaactgtctgcacaactagaatggtagaaagaaatatttaatatacaaaaaaataagagtaaacactttatgttaaaaatttcaatatatttctgttgagagcaaaataatgttccttacaattattggatggcctgaaaaatatcataaggcacaaaaaggagcacaacaggattgaaaatgaaacaatggtatcctattacacagaacatatatttacctattgacaaaataatccgtacataaattttagacaagtgacttcatccaatgtgcttcctgatgggattggataaaaactacataatatcacttcatttttagattttccaaatatttttcagctgcatctaatcacagacaaatctagaacatagggcattctacagataaacatgtctgcatactttttcaatgtcaggaaaaaggaaaaaaaaagcagttggagtaacccattttagacttttaaaaaagcataaaaatcatggaaacccaatgaaacgaatgaaccaatattgagtgttggctaaaaaaaaaacagtcctaaaacatttttggaacacatgaagctatattaggcgatgtaattaatactaacacacttaggtgtaaaagtcatcacgtggctaagtaggaggagatacttgttcttaatagctttttgagaattccttctaaacaattttggcaaaaataattctatctttctacctgtctactcagagagcagatatagcaaaatattacctattgataacttaggagaattgagcttttttccaacttttctaaacataatgttttaagaactcttaggaatgtttatgtgatcataacaaaaataataacaaaacataaggctatattgggaagatagtaaaatattaaaataattaaatgttaaatattaaataatattaattaaaatatgatcacataaaaattctttatgattgttatagggcatttataccataatgttatcaaacatatgtgacctttttttttctgtgtcctctattgacacaactaccatattagtagattgacaaaaatctatcaagagttttgtgaataatttaaactagctcaaaagatttaaaatattagggccaatttcccaaaagaaaaaaaatatataacatatattacatgtaaaatatataagatgatatataataaaatatatataatgtttattatacacatatcaatttatgtatatcaggtttatacataaaaatcacatttatatctatatagaagtacaaaacaatacaaaacaatatcttaaacgataccatttgtaatagtttcagaaacatctttcaaggaacagatatataaaacatggacaagattccactcaaaaagctataaaaatatattgatagaaactaaattgaacctaatatacatatcaaatttcattgattaaaaggttcagtattacacaccataccaaagcggatatacagatggaaaataagcgtaggaaaagatgtttcacatcacatcatatggcatcagggatgtggaaattaaagtaaaaatgagataccactatgcacctattagaaaggcaaaatccagaacactgactgcaccaagttctcatgaggatgtggagcaacagaaactttcattcagtgcaggtgggaatacaaaatggcatgaccactttagaagacaatttggaagtttcttacaaaactaatgttaataaaagaccatgaggtttgcagaggaaaaataaagaagtgttttattttctaataataataataaatctgctgatcagagagatgcagtctccaaagtaaaacaaaagtgcactctggagataaagagggtgtctggcttaaatagggaaagttcctgccccagctctcaatcaggtctgtatatgcaaatgaataactcaaattcattcagtcctgattggtttggaattttccaacctgaaaccagaagtctgttggacgcctttcaggaggctactgggaggagttttctgccatgttagctccagacatagggttacaggaaccgtcttagctcagaggtgcaaacaggttattcctctggagctgctcactcctgagaataatggaaaaaattaactcactggccacagggagtaatcaccctttgctcactcactacagccagtgtgttcattttacttcacactaaacatattcttaccatgcaatccagcaatcacactccttggcatctacccaaaggagctgcaaacatttatctacacataaacctacacaagatgtttacagcagctttattcataattgccaaatgctggaagcaatcaagacgtccttcagtagacaaatggataaataaactgcggtacattcaaatgataaaacgttcctcagcattttaaaataagtaagctatcaagccatgaaaagaaatgggggaaactcagatccatgctattaagttaaagaagcaaatctgaaaaggatacatactttaaaattccaactacatgacattctggaaaagggaaaactatggagacagtaaaacaatcagtgcttgccaggagttaagggaagggagagatgagtaagtgaagcacagaagagtttcagggcagtgaagctactttgtacaatactttaatggtggatatatcattataagtttgtccaaatgtacagaatgactacaagagtgaaacctgcgtaaaccattgactctgcatgataatgatgttcccatgtggattcacatcagttgcaacaaatgtgcccctctggtgggggatgttgacaacggggaaagtgtgtatatgtggggtcaggaggtatatgggcaatttctttaacttgtcacaattttgttgtaaacctaaaactgctcttaaaagtaaaatctattaagactcaatattgtaaagatgtttgttctcccaaaattgatttgtacatacaatgtcattctaagaaaagtccagtactctctttgtatgtgtggaaactggaaaccgattctaaaatctatccggaaatctaaaggactaagaatagttaagacatgcatgaagaataaagacagatttaatcacttgatagtaaaacttattttaagctgataatttagtgtgctgttgattcaaaaataaaccaataaaaccaaagaaagtccagaaataaacgcccccatgtaagtattccatttagaacaaatgtgaaagtgtggaccagtggtaactaatgtgcttttcaataaattatggcggattttggcacaacggaattacactgagtagctgtaggagctcaaagagaaaggccccagactgctgaagcagccgccagctcctgcgggccctccttggacctggactctaagttgagggaggctgaggagacaccgagcaccctgcaggccgggtgtgaccagcactgcagcaacctggcggagatggaggggatgctcagaggcctgcagaagatcctggaggaggaggagcaggtgttgagggccaaggtgggcaccagagaggaagtactccagaagtcactgggcagtgaaacatctcaaagagattgtagagaagctaaaaggagaacttgaaagttcagaccaggtgaggcagcacacctcacatttggaggcagggctggagaagcacatggcagccccccattgctgtgccagaactatgccatggaagtggtgcagttgaggcaacttctattagaatctcaatctcagctggatgcagccaagagtgaagcccagaaacagaaggatgtacttgccctgctcaggcagcagttgagtgaaatgaagagccatgtagaggatggtgacatagcagggtccccagtttcctccccagactcacccccaaaccccctagccgagcacaaccctgttcagctgaagatgcagttggagcggacagaagccatcctggagggcaagcaaacgccactgcagaagttcatggcagagtttgaggctcctcaggcctcagtgtgttggttataagaagacttggaaaagctcagtgcagcctgtatcctggagtcttcagaaatggaggaggccgcgcagctgaaggagagactagaaaaagagaaggcgttaacgaatgatctgggccgggcggccaccaaactacaggagcttctgaaaatgacccaggagcagctggcaggggagaaggacacagtgaagaagctgcaggagcagctggaaaagacggagggctgcagcagctcaaaggagggcacctctgtctgagtctcctctgtggaaaaagaagttactgttggacttaccaaaatgcgtacacatttcttacaaataaaccaaccaacctacacagcgttatccaggcccaactttcggtagctttaagagaagccattagagacttgagagtgtcttggagccacagaagtagaccttccagagcccccatttgtaaacgaacctgtgtcatatttgataaacacgattctgggcacagccctaggccaccgctgagtgacaccaaagccctacttgactctgacagcccctgcggtgtgtgtgggaggccaggagctctggggtctatctgttgatgcaactgagaggtgacagcatgcaggcagccctcgcagccccagctcgctcacgatgcctcctcgccttgacgcccattctagctgtgcttgaggagcccttcagccgccgctgcaccgtgggagcccttctcttggctggctgaggctagagccagctcccttggctggccgggaggtgtggagggagaggcacgggtgggaaccggggttgcacttgcgggccagctggagttcccagtgggcatgggtttggcggccctgcacttggaatgccagccagccctgccggccccgggcagtgaggggcttagcacctgggccagcagctgcggagggtgcaccaggtccccaagcggtgctggcccactggcgctgcgctcgatttcttgcctggccttagctgcctccccacagggcagggctcgagacctgcagctcgccatgcctgagtctccccccaccaccgtgggatcccacatggcctgagcctccctgatgagcgctgccccctgttccatggctctgggtcccatcgactgcccaagggctgaggattgcaggggcagggcgggaattggcaggcagctccacctgcggccaggctgtgggatccactgggtgaagccagctgggctcctgagtctggtggggacttggagaacctttgtgtctagctaggggattgtaaatacaccaatcagcactctgtatctaactcaaggtttgtaaacacaccaatcagcaccctgtgtctagctcagggtttgtggatgcaccaatagtcagtctgtatctagctaatctggtggtgacttggagaatctttatgtctagctaagggattgttaatacaccaatcagcattctgtgtctagctcaaggtttgtaaatgcaccagtcagcactctgtgtctagctgatctggtggggacttggagaacctttatgtctagctaagggattgtgaatacaccaatcggcactttgtgtctagctcaaggtttgtaaatgcaccaatcagcactctatgtctagctaatctagtggggacatggagaacttttgtgtctatctcagggattgtaaacgcaccaatcagcaccctgtcaaaatggaccaatcagctctctgtaaaacagaccaatcggctctctgtaagatggaccaatcagcaggatgtgggtggggccacataagagaataaaagcaggctgcctgagccagcagtgtgaacctgctgggatccccttctgcagtgtggaagctctgttcttttgctctttgcaataaatcttactgctgctcactctgggtccacactgcctttatgagctgtaacactcaccacgaaggtctgcagtttcactcctgaagccagggagaccacaaacccactggaaggaatgaacaactccaaacttgccactttaagagctataacactcaccgcgaaggtctgcagcttcactcgtgagccagcgaaaccatgaacccaccagaaggaacaaactccggacacgccgcctttaagaactgtgacactcaccgcgagggtctgcagcttcattcttgaagttggtgacaccaagaacccaccaattatggactcacaatcattttgtctttttatagtggggtggtgtgggaggtgggcgggatagggcagcaagttctagaaggctgtggggctgactgggggccacagcccctcacccctagatattgctaaccagaactgatctgcgacctcctgagtgttggcgccattaagaccaacgttggtgaccctggagtggggaatacaatagcaatacagaaaaaaaaaaaaaaaagacagttgatcccttacataatagtgagcacaaaaatcaattaaatctgaattaataatctaaatgtgaaagataaaacaataagaaagttaatattggagcatactgtcataattaggagtttttaaacagaattaagcataacaaaataacccacaaattataaagaaaagaaataagattacattatatttagaaacttctgttaatcaaaattcaccttctagagagtgaaaaggagaattatggacttaaaaaatagtgaacatgaaactaacaaataattatattcagagtttagaaatgagcaagaaatgtgaacagaaactttgcaaaaataacatacaaatggtcaatgcccagtatcctcatgcttactaaaaatcttaaaaatacaaattaaaaccataacttaatgtcactttatatgcatcagaatgtcaaaatgattgacagtaccaaataggccaagaataggaagcaactggaagcccatatattgctggtgactgtataaattgatataaaaccacttagaaaaatcatttggcattattaatcaaagttgactataacacagcaatttcacttgtcttaattttttaaaaaaacattatgtatgtgtatttcgagagatacatacagaaatactcatagctgctttagttctaacagtcccaagtgaaaataatctaaaagctatcaccaataaaatgtatcaataagccgtggcatattcgttcaacaaaattgtatacagtatttaaaaggaacagattattgccatatgaaatgccacaaatgaaaggtacgaacataatatgaagcaaaataaagtggacagaaatgagtacatggtgtatgattttatttatgtaaaaatccaaaagagcaattattaatgtgtcagaatgatgctcacattgtggaggggccggggtaatgatcatcactgtgaatctgcagaagagctagtatgttttatttctctactaagatgataatcacatgttgttttcactttgtaatcattcgtctgttttcaatttgtacattgtcctttatgaacattttagtaggggatgagaggtcatttcaaaaaacgctttgatactgcgtgaaatgtcatgctatgtgttaataactcagaacatacacccagcaactctatgagctttcccagttagtgtttatttatcacaaacacactgtggtacaaatttctaataaaaatctgtctagatcattattataaaaatgtatatgttttctaatgaaatctgcatgccttgattatttgatatctgggagtttcaacaatgagccagtgttgaaagggaggaagctgcctgcaaaattgatgaaatgattaagatacatgatttaaagggtctgggacaccttaatcatgttatcgaaacacaaggggttctgtctaggtcctgctgcctgccgtacagaaagctaatcactgagaagtcgaatattgccaaggaagaaggctttaattgggtgctgcagccaaggagatgggagctcaagtctcaaatccatctccttgaccaactaaatctagaggtttatatatcaggcaagaaatgtaacaatgtgtaagaaaacagaaactcaggagggccaagcaagcaaccatggtgagtgagggctccagcatctggtgtggtgatctggtttcagttctttgatactttttaggagaggcctgaagttcatttcctgaggaaggaactcagataaaacaaatgtaagtttcaagctttaacagccaaagggtctctgtgcaggatgtataggtttgttacgtaggtaaacatgtgccgtggtggtcatggcagtggtgacctggttggagtagccactgccatgatgctggctgcagtggaggatctgtggcatgggctatgtgctccatggagccagagggagcagagaacaggtggcagccaatcccctttctgaactggtgagttgggagccccagcctcccaggtgcaacagcagctgcctagctgtggctgcaaaccgggaatctctgcattcttggagacccaggaagccctcctgtcccacaggctcagaagtgcctgctcctgctgcctgacctctccccgctcctggtgcctactccaattttggagcaaagttgaggcctagcacaggtactgtcatgatctggccaggtgtgcacactcttggggcagtgctgacatggcagacccctactccctctgtccccctccagactttggacactaacaagcgtgggaggaggcttgagtggggctgaggtcagcttggcacgagcctgaaggcacctctcagcatgaagagcctgggtgccatggacagcagcttgatggcagcagaaggcagacagggtcctgggtgaaaagaggcaggtaactggtgaagcccaaacctttaaggcagggatggcctgtaggtagcctgggggctgggctgccaagtctgcagactgaagtgagaacttatggtggtttttctggacctgcctatgaccacctcttgaccaatcagcatgcacctgatcccctctgaagcccataaaaaatctggactgagccagaatcctgtatacaacaggacaatctgcttgcagataggagctacccactctgggtctcctctctgctgagggttgcagagatgacagaccgacctgcctgcaaataggacctacctaccttgggtctcctctctgctgagggctgcagaaactttggggccacctgcctgcagaaggaagcaacccactgcgggtctcctcattattattctgctgctcagtgaagctcttctctgccatattcacccttcagttgtctgtgtacctcatttttctggatgtgggacaagaactctggaccaactgaaggcaggactaaaagagctgtaacagaacaggagtgaaaaaagtccccaacacttgccacattgtgggcgacaaggagagaagagttgcggcccttttgggagcccagacctagaggctccctgagccagggctgttacattctctttgggtttctgcagttcctgatgtctccaagcctctgggagccactgcattctcttcgtccagatgtgggtgcccaaagcagatgctacatgtagtacatctggtctatctgcagccttacatggagctagcatgtgtgctggcacctggaactgcctgccccactgcagcagcaagtgtgcctggctatgtgcagtggctgcaccccatgctcggttattcacacacccctcactactccgcacctggctcatgcttggcaggggtgagatctgggccagtagtgcaagccaaacacagcatgtcaggccaagtaggtggaatgggcccaggaggcataagcaatactcaggcagaaggtgccattggccacagtagtttccagctggtgaaatgacaccccaaggaccctgtgacagtagtttgctgcacctatccacccatcacccaggtattaagccaagcatgtacttgttatttttcctgatgctcttccttcccttgccccctgacaggactcagtgtgtgttgttcactcccctgtgtttttgtgttctcactgttcagctaccacttataagtgagaacatgtggtgtttggttttttactcctgcattagtttggtgaagataatggcttccagctccatccatctcactgcaaaggacatgatctcattccttgttttggctgcatggtattccatggaatatatgtaccacaatttctttatccagttcaccattgatgggcatctaggttcattccgtgtcgttgcaattgtgtatagtgctgcaatgaacatgtatgtgcatgtatctttataatagaaagatttatattcctttgggtttatacccagtaatgggattgctgggtcaaatggtatttctagttctagatctttgaggaattgccacactgtctttcacaatggttgaactaatttacattcccaccaacaatgtaaaagcattcatctgttatttcttgactttttaataatctccattctgactagcgtgagatggaatgtttttgtggttttgatttgcatttctctaatgatcagtgatgttgagctttttttcatgtttgttggacacatcttgagaagtgtctgttcatgtcctttgcccactttttaacaggattatttgtttttttcatataaatttgtttatgttccttgtagatttttgacattagacatttgtcagatggataaattgcaaacattttctcccattctgtaggttgtctgtttactctgatggtaatttcttttgctgtggagaagctctttagtttaatcagattccacttgttaatttttggttttgttgcaattgcttttgacattttcatcatgaaatcttcacccgtgcctatgtcctgagtggtattgcccagatattttatagggtttttatacttttgggttttacatttaagtctttattccatcttgagttaatttttatataaggtgtaagaaagtggtccagtttcaattttctgcatatggctagctggttttcccagcaccatttattcataggaaatcctttccccattgcttatttttgtcaggtttgtcaaagatcagatggttgtagatgcatggtcttatttctgagttatctattctgttccattggcctgtgtgtctgtttttgtaccaggctattttggttactgtaaccttgtattatagtttgaagtcaggtagggtaatacctcttaaatttgctgaggagtgttatgcttctaattatgtgatcaattttagagtaaatgccatgtggcaatgagaataatgtatatgctgttgttgggtggagagttctgcagttatctgtcaggcccacttgatccagagctgagttcaagtcctgaatatctttgttaattttctgtctcaatgatttgtctaattctttgagagtgggttgttaaaatctcccactattattgtgtgtgagtctatgtctctttacaggtctctaagaatttgtttatgaatctgggtgttcctgtactggtgtaaacatatttaggatagttagctcttcctgttgaattgaacccttcaccattatataatgcctttctttgtcttttttgatctttgttggtttatagtctgtcagaaactaggattgcaaccactgctttttttctattttacatttgcttggtaaagtttcctatatctctttattttgagcctgtctgtgtttgcacatgagatgggtctctggaatacagcacactgatgggtcttgagtctttatctagtttgccattctgtgtattttaattggggcatttagcttattagcatttaaggttaacattgttatgtatgaatttgatcctgtcatcatgatgctagctggttattttgcagacttgttgatgtagttgattaatagcattgttagtctgtgtacttcagtgtgtctttgtagtgcctggtaatggtttttcctttccatatttagtgattccttcaggagttcttgcaaggaaggcctggtgatgacaaattctctctgcatttgcttgtctgaaaaggattttatttctcctttgcatatgaagcttagtttggctggatatgaaattctgaattggaaattcttttctttaagaatgttgaatattggcccccagtctctctgggctgctaggatttctgctgagagatccactgttaatctaatgagcttccctttgtagttgacctggcatttctctctggctgcccttagccttatttccttcatttttaccttggagaatctaatgattaggtgtcatggggttgattttccttctcatggaatatcttattgagagtttctgtgtgtcctgaatttgaatgttggcctgtcttgctaggttggagaagttgtcctggcttatatcctgaagtgtattttccaacttgattccattctcaccatctcttttaggtactccagtcagttacaggtttgatctttttatgggatcccataattctcagaggttttgtttgtttcttttcattcattttaaatctaatcttgtctgcttgtcttatttcagcatgatactcttggagctctgacattctttcctctgcttggtctattcagctattgatacttgtggttgcattgtgaagttcttgtgtttcttggctccatcaggtcatttatgttttgctctaaactggttattctagttaccagttcctgtattgatttatcatggttcttagcttctttgcattgggttagaacatgttgctttagctcagcgaaatttgttattacccactttcggaagcctacttttgtcagttcatccatctcagcctcagtccagttctctgcccttgctggagaggtgctgcaatcatttggaggagaagagacactctgggtttttgagttttcagcgtttttgtgttgatactttctcatctttgtgggtttatctacctttgatctttgagtctgctgacctttggatgacattttttctcaggtcttttttgttgatgatgttgttgtttttgctttctgtttgtgtgtttttcttttaacagtcaggcccctcttctgtagggcttctctggtttgctgtggatccactccagaccctgttcacctgggtctctcctacacttggaggtattaccagtggaggctgcagaatggcaaagatggctgccttctccttcctcctggagctccatcccagaggggcactgacatgatgccagctggaactctcctgtataatgtgtctggcaacccctgttgggaggtcttacatagtcaggaggcaagggatcagggacccacttaaagaaggagtctggctgccccttggcagggaaggcatgctgcaatggggggaatccccctcgtccagactgcccagactcttcagagccagcaggaaggaaagactaagtccactgatccacaggaaccacagctgcccttccctccaggggctctgttccagcccgtttgcaaacccctggctggaggtgataaaattccctcagggaggcacgacccagtgaggagggatagatctgggtcttacctgatgaagcagtctggccatgatctgccacagccactgcactgctctgtggggaattcctcttgggccctataatttaaaaaatgaataaaacatggaccccgagcatgctagccagtgagaaggggaaaaagagtataagaaccagtaggagaaaaagagtattgtagcatctgccctggttctcaggccatgtctatgaaagcagaactcatagagaaccctgggcaattgagtaatagagacaaaaattttaaataaataaaatgatttttaaaaaattcaggaaagaatcacatgattttttttctaaaatttacatagcatttttttcagaatatgtgtatataaattttaaccctattacttttcttggacctaaccaattagtggtaacttactcctgctgaatgtgtgcccatgtgtatggggcggtggggagcaggggatattgaggagttgaaaatttcctctccatagaaagtaaccagatgcaatctagtttaaactgaaacagttcctgtttagtaagcaaaaatgtctccacataaggcaaataacccaaaccagttgggaggtagaaccagttcatgtttgttctatctggtttgagaaagattccattaggtggctgaaaatttaggataagatttatttcacagagaaaatagacaataaagacattgggggtcagggcttgagaaaagcaaatatatgttccagcatcacaagctatgaggttatatgctttcagtatgatttataccttgttcagaaatggtataggaactgtagttgctttttgttttgcttctttttttttttttggtttttttttttttttgagttaatgcactctgtgtacctttacaggttgcctcgttttgtattttaatcataaaagaccttttgtactatgcatccctgatcattaaatatgtttactgatttattattttctcagaatttcattaatctgtcacgactcagttcattaatgaagatgtgaaattagatttgaatatgctcttttcctggcagcagctctgtgtagagcaatgtgtgatgacttggtaataacatttaattttttgcccctattacagtttgtgtatctaaatcaatttaatgtcataatattaatatttcgtgaaataatgtattaaactgtgtactcagatgcctaaatactgcatctcctgctgttgaatcatgcgttaatttgggcaattccacttccaaatatcaatttgcaaatgtgtggtatttccttaagaacgggccatggataagttcttacttctttgatctttactggttttgaatataatgtaaattccatgcattccagtcagtaggtggacctttattaaaggcctcagaagcagatcactaaaaccaatgcctttctcagatctttcttagacagccttctgtgccaatcagaacacagcctattgcctggcatggattttattatcaatggccctctccttgtcccatccagcaaggttcaaaatccacttaaaaaggttgataccattgtctttgtttatcattgttatgttgttgttttttttttaaaggaatcatatcataactttcttatagcttaagatagttcattttattaaggtaaaacttttacttagtgacatttgcagtttaacaagtgctttctcttcaatgcttttgtttggcccaacagtgaacatcaaagccatgtgcaaactgtggaaaatttaatgcagatatcatttaagattggtgttatccccacttaattataaaatctaaatttacatgaaattaaatatgaaatttgcatgaaattacatatttcatgactcttacaacatgaaataatgacaggggataccatctgactctgaaatatctgaccatgtcccataattctttcatgctgggaacattgaatcaaattccaaacatcttggtctcattgctgacataaacggaatcctgaagcaaaacttaatccttccttgatacttgcagcttgcttgcttgcttgcctgccttccttccttccttccttccttctctctctctctttcttttctttctttcctctgtcgccaggttggagtgcagtggtacaatgttggctcactgcagtctccgcctcctggattcgagcaattctccttcctcagccttccaagtagctgggactataggcacttaccaccatgcctggctaatttttttgtatttttagtaacgacggggtttcaccatgttggccaggttggtctcgaactcctgacctctttatctgcctgcctcgacctcccaaagtgctgggattacaggcgtgagccaccatgcctggccacctttcattattttgtatgtcccctatttaagtaaaaaaaaattataatttatccaactgacctaagccaagaatgtaagcattctctttgactatttcatctcttatctcttcctccatcctatgcaatctactataaggttaagcttatctctcttttttccaacttttaggttcaagaggtacatgtgaaagttaatgacatgggtagattttgtgttgtagcggttagcttatctcttaagtcaagtcacttaacagcatccccaccgttatctgcacagtttatttggttgtagcagtgagtgttctccagagaaacagtaccactagtatgtgtaaatgtatagtaataaatttacagaattggttcatgtgattatggcagttggcaagtgcagaatcttcaggatgggccagccagttagagactgaggaagagcccatgttgcagctcaaagcaaaaggcaatctgatggcaactttcctttactggagtatgtcaatcttttgttctattcaggccttcacctgattggttaaggcccaccaatattgtagagggcaatttgctttactcaaagtctactaattttaatgttaatctcatccaaaagcaccttcagagaaacatccagaagaatctttgaccacagagctgggcactgtgtctcagccaaatcggcacataaaattaatcatcacattggtcatgatctcattggaatagtttcatttcaataattcaaatgacctcactaaatattctctcccctgtctttatttaaaattttgataattcaaaaccactttaattgtcatttccttgaagaaatttctgaaccacttaagaggcgatattatcacacgtttccatagcaatttgattgttccctttaaagccataaatttttctcccatgaaatttctaatttccttgtcttgctctctcatgataattaatacccaggaaggcagtgtgttctctaatgcatcattgtaggcatccccaattactaagcttggatcacaatttgcatttgttcataaaattcatttttgaatgaaagaatgaatgacattctaaataatagttgggttagagttcaagcataacacttaggactctaaaatttgtgatgtttacaaatataccatattgcctctattttattctatagaacaaatgaattaaggatatctagagcagaggtatactatatatgtttgaaaacaagatatattttataagccggagtacatattcaaacacatatgaccatctgaaaaagtatacctctgatcagaagcaacttgcattattaagctataaagagtggtatgggcatttttaactgttttcttttctattggttttctgatattacttttaaattcctcacatgtgtcgtgtcagaaaatgtgatcttagccaagcttagctttattttttctccagtcatttctgatttaaactcagtcattttatctaacatgccccccacctccccaagccaccctatatattcttaggtcttgggcaaaatcatgctattgggagagaattaggtttccagttctagacaactgtcaactctcatccaatgaaattcaactaattccaactgacagctggtcctcaacaagtctgctcactgtcactcactcagctctccttaatgtcatcaccagttctggagcatcattgttgctcacttttttaatttgtattattctcatcccaactaatttttattggtccacaggccccctctcacaaatacaatgtatctaactttatatacaaaatgaacttttctttttatttatttatttttttgagcgggagtctcactctgccgcccagactggagtgcagtggtgcaatcttggctcactgcaagctccacctcctgggttcacgccactctcctgcctcagtctcccaagtagctgggactacaggcaccggccaccatgcccggctaattttttgtatttttagtagagatggggtttctccgtgttagccaggatggtctccatctcctgatctcgtaatccacccaccttgtcctcccaaagtgctaagattacaaagtgaaaatcttaaaaatcagtgacaaaaggcaaattgagtacaaaaaaatcaatcaattcaatggggtcagcaatctgctgcctgtttttgtgaacaagattttattggctggttgcttttgtgcaacaaaggcagatttgggtagttgtggaagaaaaaattaggcctgcaaaacctaaaatatttactatttgtgtctttatgagaggtgaagccggctgggcttctgggtctggtggggacttgaaaacttttctgtctagctaaaggattgtaaacgcaccaatcagcgctctgtgtctagctaaaggtttgtaaatgcaccaatcagcactctgtcaaaacggaccaatcagcattcgtaaaatggaccaatcagtactctgtaaaatggatcaatcatctctctgtaaaatggaccaatcagcaggatgtgggtggggccaaataagggaataaaagcaggccacctgcactaccagtgtgggagtactggggtctgcttccttgttgtggagcttttattcttttgctctttgcaatgaatcttgctgctgctcagtctttgggtatgtgcttcctttatgaaggtctgtagcttcactcctgaagcccgcgagaccacgaacccattgggagggacaaacaactccagacatgcagcctttgtgaactgtagcactcaccctgaaggtctgcaacttcactcctgaagtcagagagaccacgaacctaccagaaggaagaaactctggacacaaaatttgaaggaacaaactctggacacaccatctttaagagctaacactcaccgcgagggtctgtggccttattcttgaagtcagcgagaccaagagcccaccaattctggacacatttacacaaagtttgctgacccctaaattagactgttagagtactcctcaagagagtagtaacagaagaaatggaggaaagattttttttgtttgtttttttgagacagagtctgactctgttgcccaggctggagtgcagtggtgtgacctcggctcactgcaacctccgcctcccgggttcaagctattctcctgcctcatcctcctaagtagctgggactacaggcatgtgccactacacccagctatttttttttttatagtagagacggggtttcaccatgttggccaggctggtctggaactcctgacctcaggcgatctgctcacttcggccacccaaagtgctgggattacaggtgtgagccactgtgcttggctagaggaaaaaaattaagtgttcaagggaaataatgccatttgataaatttataactgcagaaattatcattgaatagtgcaagcattataaaagcgtttttagaaaacaaacagtaagagaattcatcacacacatatgcttgctaaaataacaagaaacggatttacctaaggaaacagaaaattaacccagattggagtgagctgaaataagcaatgaactattaaattgtaaaaactataagtaaaattaagaattgactgcataagtaacaataataattgattttttgtttgcaagtatagtataaagaaagaaaatacttggcaaaaataacatgtaaggtggatggtaaagtactagttttattctggaaaaagactagaaatgttggtttgcttaatatttgtttttctggtcaagtaatgtttaaatttaagatttatcttggacaaagaaaagtatataaaatacttaagaaaaaggtggggacaaatataatttttattaaaaaagatgaaagaaagtataaatgatataaataaatacaaatatattatcaataaagtgtgcaaataaatcaatgaatcagaatagaaagctcagatacagagacacagatagagtaaatttatcattaggaaaggcaactcagaaaggacagtcatttcaacaagtaagctggaacaactggtatccacttccaagaaagtaaatttaacacaaaaatttctaacagaaaaattaacacactatctcaaagttaacaaatttacaaaaaaattaacaaaattacaaaaattaaaaacaaattgggtcatagaactaaagggcacaaaattgtaaaacttctagtagacaacataggggaaagtgtaggtgaccagtaggtatgatgctgacttttaagatacaacacaaacaataataaaccctgaaagaaaaaagtttgattttattaaaattaaaaacttctactctgaaagacactgttaagagaatgaaaaggcaagtcacagactggaagaaaatctgtgcaaatacaaaatattaaaagaacacttacaattcaaacaatctaaagttgagcaaaagttctgagcacgtactaaagaagatatacagatcaaaggtacacaggtcacaagtaagtacatgaaaggatgctcaaatcatatttaattaggaattggcgaattaaaacaatgaggtgccactacacacctattagaatggataaaatccaaaacatgaaaactaccaaatattggtgaggatgctgagcagcaggatccctcatcatggctgtaggaatgcaaatgacgcaggtcctttagagacagtctcaccatccagcaaccatactctaaggtatttatacaaattagttgaaaacaaatgttgtgtccatttgaaaagctgtgaataaatgtttatagttgctttattcataattgccaaaaattggaagctacgaaggtatccttcaataggtgagtaagcaaactgtagtacacccatacaatgtaatatcattcattgttaaaaagaagtgagaaattaagccatggaaaacatggaggaaccccaaatgcatattactatgtgaaggaagccagtttgaaaaggctacattgtgtctgacttcaactaaaaaagcaaaactatagagagtaaaaagattagtggttgccagggtttgggggcagggagagatgaataatacgtggagcacagggagattttagacagggaaattatctgtatgatgttgaaatgcttgatatacaaccttatgtatttgacaaaacccatgcttgtacaacagaaagtatgaaccctggtgaatactatgagcatcagttaataatttatcagtattggttcatcagttgtgacaaatgtactgcactcttgcaagatgttaataaacggagaaattgcatatggagagagtgcatatgggaactctacccaactttacattaaaactaaatacatttaaaacaagaaatgttagagaacatttgaatgacactattggcaatctgaatttcatggataatacattttttttcatgcaaatgaacaatatttacaaaaaactcaccacatgaaaactagattaagttctcaacaaaaaaaggaaacaaaattatagaacatgtttctgccaacaatacaataaaattagaactcaataaaaatgagacagctaaaatagaaaaataacacatttttgaaagtttaaagccattctttttttttttgttttaaacaggatcttactctgtcacctcagttgggtgcagtggcatgattataactcactgcagcctcaaaatcccaggttcaatgagttctcctgcctcagcctcctaagtagctgggactataggcacacgcccctgtacccggctaatttttggatttttagtttttatagagacatgggtctcactttgttcctcaggctctgccagtcattcttaagagaacaaaaaatgtgattgaccctgagaaacaaaatatgtattgcagtatatttttaacatacagatattgaaatgtataaaaaaatagattaaaatgcttgtatcatcatagtaaaagaagataggttcacgattcaacttggaaagttagaaaagcaattaagcaaacataaagttagagaaaacaaaaataccacaatatgtaaagtataaaataaaagatcaaaatcaaatggaaagctttacataacacttttaaaataatatttttcaacatcataaatagacaaaccataaatgattatatagagaataaaaaagatgtcacaattatagataaactttaagatcgtgctaaatgctataaaccacttaatgccattaaatttgaaattattaaaaaacagtctagaaaggtatacattactagaatttattcatgaggaataaaaatgtgactgagtatatatttttaaaatatgattcaaatttccatatatgcagtgtttcagaaaatggaaaaagaaggaaagctctctagcttattttattgtgctggggtaactttgacaccaaatctcaaggtttctgagtcaattttgaggttgacttaaggatagtataagggaggaaacactcaaggataatacaagaaggaaaaaacgaaaagttgatatttacttataatttacatacaaatatttttgttaaagtattaatagtccaataaattacttaaaacaatccaaggatcaatcttgttcctcagaagcatgtaaagatgattcagcagaggcatatctgcgttaagtatggcctagtgttggagtaccacataactctgttcagagatcaagatttcattcaaagtgctcaataatttttgagataattattttttgaacaaaataaatcaatttttaaagtttgatttcaagatctaatttatcaacaaattactgtttagaatatatcaatgtatacttcttggtagattttcataaaatatatttgttgtaagacacattttcattcattcaaaacatattgtaggagtttggttgaaactcagtagactattttttaaattaatatactttccagtaataattcaaagtcaaatagattttaaaaatattgtaattctaagttatagctatattttatcatttttatttggaatcaggagtcagacattttcacaacatatcttccaaaatgtacaaaaatgactttttttacggaaacatataaacatactgctttctccattgaaataataaaacaaaagttaacctgcaaacatgattcacataatttatctgctaatcagactagtatggtgatcaaactagtattctgatgagcttgaaaaaaaggaaaagtgattacatgaagttacgtattaaatggaattctttttccaaatgcatttgttctggtcaacaaagcttgatcagtttcctagcaaatgacactggcctgaaattgctgaatgaattgttttcagcaaagaatatgaaattaagtatgtaggcattcaggatgacttttagtaaactgaatcaacatagccaatgcctccacattcagtcacctatttagttacatttagacataaccataaacccataaacttttacatgtatttattctgttgtttgtctttgtcatcattaacctgataatgacaaaacactagctggcacagattattgaaccttcacgtttttacatgacctaatctgttaatttccatcatcttttctgggtccaggcagacacaatgctgcgttctgaatgataggattgttttcaaatcaaatgagccattcatgaggatgcttattaaaagccagaacagcaagaaacatgcttgctttgtgagggttaatctttcttgattttcattacttttaatacattttagaataactttccaatttcgtttgaacccacgactacctgaaatgtcctaataaaagaagatctggctgccaaagagaacacaccatcatgccagttacctgtggtgttcatctttcttaaaagctacaaaaatacgtttcctactgtgccatccagtacaccaaagagctttccctggaaatcactctttcattatgtctttgtaattactgttttctgtctgataaatcttatgcaagctgtgagactttgaattatggatctgggagagttacaagaacataactagttgcagctcagtcagctgtgcgtgtcgatccttgctttccaggcaaggcctgttgcagctatccactctgtcatctgtattcattttcagtgagttgatcaaaattctaacttacagaaccttggggtgagtttctcatttaacaagtgttgagcacccatggcaggaaagatattgtatacagcagcactcaagagacataatctttgcccttaaaacttttatttttgggaggaa

SEQ ID NO: 5666 - DNA, 91666 bp, Homo sapiens
  MK-STYX gene - 75270307 - 75321972 of chr7; NCBI Entrez Gene ID: 51657; Build 35; sequence includes 20,000 bases upstream of initiation codon and 20,000 bases downstream of termination codon of the gene
catcagagtcaggtctcccgcagccacacccttgtgtggttcctgcccatgtcattgggggccttgtaacttactctaacctagagaatgcagcgcaagcgaagctgggccagttctcagcccaagccttagagcctggcagcttctgcttttgcttgtgggaactgagtcattcaacaaacatatggaccttgctgtagatgcgttgtgaagaatgagaggcccaagacctcggggaaaaggccagctgtccgggcatctcccaaacaccagcctcgcgtgctccagtccagccaagcctccagtgactgcagtgggagctgtgggcatgtaaccacccagctgagtcctgtcaacccccagcgtcgggagataggaacagaaatagcctaaaagccaccagagtggagagggctgggattgttacagtagcagataacctgcagagcaggcttcattctctcaacctatgaaatatgcaagagaggacaagtattaccagtagttcctttcccgctttattttttagctgctttttgggttttatacaatgaacatgtattaattgtagaagaaaacgatgtcatcctttatgataaaatccatttccattttagcttttttaaaaaaacaaaaagctgttgtggacagatgaacatccaagtactgggcacacctccagccctccctcttccactgaaggccattgcctattcctagaaagttctttcccaggtatgcagctttcagtttccacttcagaggccacagtgtctggggaacggactgcccccaatactaaagggagtcaaatctctttaattccgcactcctcagtacaacaagaagtcccttctttaggccactgatggaaacctggaacccccttttgatggcagcatggcgtcctaggccttgacacagcggctggggtttgggctgtcccaaaccgcacaccccaaccctggtctacccacagttctggctatgggctgtctctgccactgaacatcagggttcggtcagaagatgaaatcccaagggggacagaggtcagtagaggaagctcaatgagaaaggtgctgtttgctcagccagaaaacagctgcctggcattcgccgctgaactatgaacccgtgggggtgaactacccccaggaggaatcaggcctgggcgatgcaagggtgccaacaggaggggcgggaggagcatgtacgggtaaactgaatactgtgtccaattccataaattaacaatttagactttcttgaagctactgatgaaagcgtcacgcttcagtctaacagttaaacatcatctaattctgattggtaatgaagaggtagcagacactctaaagttggctctcacagggaagaaagcacagcatttacagaagggaccttgaaaaataaaatcaaggacggcttttattgatgcgcccacagagccacccacaatttggaaggcatgatgatgtcaatacagtaatcatcaccaaagcaaattaaaatacaaagtttatctgcaacggctttgcagtgacatgatgccttcataaattaaggaaactggccacccgtcacagcggctcacttcagggtcttcacgaaatcttcccccttcttgatggaggccttcagctcggggatggcatccgagatcatcttctcctcaaaagaggagactttgccgatgcccaggttcttctcgatgccctttttctgagggagatgggaacatgttaaaatgaagtttccaggaaagtgcttgttagagaaaccccgacctgtcgctccatcagccctgccgaggagtctctctacacatgcgggttctgggtgccttgctggggacgccttgctgagcaggtgggtgggactgagctgcggtcaggagtgcgaggctcagagccagagggtgccaggcaggggtcccagcactgtgattgtctaggcaggtaccctggacaatgactgaccttccaaatgtgtttccttagctataaaacaagcaccatccaccttcgtgaacacgaggacaatgcgacaagcacctggacgccaggaactcaatcatcaggaacacttcaccgtattctccccaacagagcctgtttctgggttcttgtctctccccgcaggttggtaaaggactgaaaacattgtcacagtcacctgaatcaggtgtcactaagtaggtaaatgtctgacattggcaaaaacaggcatctctgccaccgtctcacctgcagaaactgagcacagtttgtgtggcaacagcctcagtcctcacctcaactcaattccctcctactgcttcccctggctcaagggcctatgagaaccgggtgcgtctcacctgcaggccctgccattccatacacctgcaccgacatggggacagaactataccatcgagtgcctgtctctcaccaaggcctggggccatagctgaaggatctttctgtatcggagcatctctgagaaaggtcctggggtggcccagtgagccatattactttctggccacgtgatgaaggcaaccacacatctgcctcatttctgcccacaggtgagaaatggaaactcggcttgagggggtatgagtaagacctaagggtttctgtttgctgaagactcaggctgtctggatggggcacactctcgaagaggaattgggcctggccgccccccgcagtcagaacaagatgaacaaggagcgacagggaggtgttcaggcggggtagggaggcctccctgggctgcctggagatggagtgtcttatcagtcaatactcctgcagctgctgggcacccgctgtcaaactgcagggaaggagacccacttgctgggaggttcacccttcacagtctgtgatcctcccagctcttttttctcgggtgtgcgtccacccttgaaaacaacagcactcgccaggcaggcacatgagcttactgcataaagggccagggagagctcctgaggcttaagcaaagggaacgcccccttattccacagtcagaaggacccacgcctggatacgtaccccaagcagcagcggtgtggagaagtaggtacattccgtttcctgtgacttaacgaaggaacattccacaacaccttcctttccattcattgcatccacaagggagaagacaaagcgggcgccggcatacgccatggagagggtggcagagcctaggggggcacagacaggtcagcctggctggtgccacaaacgtgacgcccaggtgagccggccccgccagccaagacacctgcacaccttccagcctgacagtggagaatttcagtcagcaccccgatttcttgttacttatacatgaatggtgtagaattgactctgccaccctcaaaaatgactctcaaccccacaaagcaggccgagctgccctctcacacagggattttccaccaggcaactgcaaatcaacactgaaaaggatcgtccatgcccagggacaagcagcatttctccccaaccctgagctctcgcagggcctcactggcacccagccccggggctgcctgagactctacctgctccggctttagccttgaccacctccgtgccggcctcctggatccgcccagtgagtgctgtcagctggtcctggggaaagtccaccttgggggtgcactgcaagccaagccatgggatcagtgagtggcttccggcccatgaccccagacccactgcctcccacccccactattcccgacctctcctctccctcccatcaccagggcatgggaaaggttttctataaagaagaaaaagaaaacctttatagaaaaatgacatgctattctgggcacactgcctatggggtagccctgctccacaaggagcagcaaaaaaataataataaaaagataaaaaaaaaaaagacgaagtgaaatcaactctgttgggaagtgtggtgagtcccctactcatttgttttttgaggccagggtctggctctgtcgcccaggcttcagtggtgcatcatagctcgctgcagcctcaacctcccaggctcaagcaatcctcccgctttggcctcccaaatgctgggattacaggtatgagccactgtgtccagccctggactcatttttgaaaaaagcacctcgcccgctccggcctaaccagtaacccggtgaggttcccaacagtggttctccttgcgtgctggagctgggccctgagcagcttccacccacattcgctccaggactgacaccgccctgcagcagaggggcggggctgcctacaacaggagcccttccaaaacctggcacgtggccaggccttctccagtctaccgggatcacctcaaagcagggcctggtaaagggaatcctgacctcgaagcccctcacagggtcatatgcgtgtacctgagagatcagggggatgatggtcttcccagcatggccaccaatgacagggacgttgactcgagctggatccaaaccctggtgaccaaagtatgaagctggatgagttaacaagctctttcactgtaaaacatgtcacagctgcccacagccccaacactggaaaagccccccagaactcagggtggaacagagccagctaggaggaggccctgtccagcccctgctgcgcttggatctcctgccacggtgccccaaaaggctgagcatgagcgccagcaggtgccgtgagggcttgccgccgtctggcgaggccatcgcaagtccttccttcatagtgagcatttgtgcccactgtggatgggcatgggaggatgctgcctcctgtggaggccccccccgggcctggcatcctctttcccagagccggctccactccccatgcacaagcccagactcctccctacacagaacaatccaagttcccttttcttcaggccccacagaacaaaattcaaatccattccaggatacccatgagttagaagtctgccacctcaaacagtgattgggacagaaagaacaaactgactcctatggctccaaacagcacagttcaaggctgcctcatttcttaaactggaggtaccacacccccaagaatctgtgaaccaggtttttgttttattttttgagacagggtctctatcccccaggctggagtgtagtggcacaatcttggatggctgcaacctctgcctcctggactcaatgatcctcccacctcagcctcccaagtaccaaacacctccacacccaatctatgttttttaaatgttttgtacagatggggtgttgccatgttgcccaggctggtcctgaactcccgggctcaagccatcctcctgcgttggcttcccaaagtgctgggattccaggcatgcaccactgcgcccggctgaaccaagtatttcttaaaacggacaataacctggtgggagtaatggtagcgagggaacagccacctgccccgatggccatggccactgaagagcccagtcctaggttggaaaatgagcctggtctgggagagggaggatcagcctcacgcacgggaaaagtaggatcagcttcatggagccgggagccaaagatccgagaggcttagcttggtggtgtataagcacacacgtgcgggcactgcacggtcaccagggacgtggggctgaagggacacagccctgctttccagaggcttgccctcaaatacaagactcctagaaatgtatgttccaatggtgcatgctaagacgggggacaaggcgactttgcagcaaacgggaacaaggcattggcctgggaggtcctggagccacgttgaaagggaatatggtgggtgagaggatgagggaggaaccagccatcggaagtttaaggattgatatgcattcttgatatgatccaggaaatttccagaatgtcaggcagccaggggtaatgacagtccacttcactgttggaggtgggggacgggatctcccaagggccaaggtaccctgtccccaactctaacagtgaagcttcaaggctgagataggactgcctaacaggactttctgtgaggacagaggagccatatgtggccatggagcatcttaaatgtggtttgtgtggcagagggatatagttttaatgttatttaaccataaatagccaaatgtagctagtggcagctatggtgcagggcaggactagggcctggggtgtgcccagccctgagagcccacgagaatgaactctgttgcctccaggacgccaggggctgcgcctctggaggtgggaggtgggatcctgcctgttgtgtccacttccgtactgcggcaatcccgggggcctctggacatacacctgcgctcacctgctcactcaaactgttttttttttttttttaaagagacagggtcttgctctgtcacgcaggctggagcgcagtggcgcaatcacagctcattgcagtcttgaactcctgggttcaagcaaccatcccacctcagcctcccaaagtgctgggatgacagccgtgagccactgtgccaggcttaaactgtctcttcgattcaagtgtctctcccattccatggaactctaaggcctggggccatgccttttgaaactctgtgacccccacacctgtaacagagtcccactaccaggccctcgggtacgtgctgccatgtctgttacagtggggcatctctaactcctcagaagcagatgtgcctgtcactcgggagtaaaacggaggccaagggtgctgcgggtgcacttcctaccatgccgcacgtataacctccaatctgccatcagaacaaaaaggcctgaagctcaagagaaatactttttggggccaaaggaagtggttctgctggctccacaatggaagcaagtcgaaagcaggctgtgcaaagcactaaggactccaggcccggcactggcaccaaaccaagccgagctcaagccacacccagcagctcagtctccgtccagcggccctagggtcaggcacctggccaggcctggactctccagggtgagctaccacgggcaacccaaaaaagtcagtgccagggaccagggccaacaacaattctgatacctcaggacttctggcactttcctcagttcttcatgtttgctaattttcccaccctttatctagtggccaacaggtaaatcctcccaggaccagttttcaggggcaaggagaaaggggaggactgggggagccccgtccaagtccagccactgagaagcccaaagaaggtgtgaacccacagtgctcttggcgagaaggaagacagcgagagccgggagacagacactggccagagtagatgcctgttgggccgagtgcctggaacccacaggaaacacaggggctgcttccatcaagagggcgagctctaaaaacatttaaaaccccaaagtgacacgtgacctgggcatgccttcatgtcttccacgcccgtaaatgagcacgggtggcgggagaagttcagaaaggtcacctgagcaacacccacgccgcccttaccttcagctctgcaacaaaggtgttggctctgacgatgtccagggtcgtcacgccgaagattttgttggggttgtacactccatgcttcttgaaaacttctgctgtgatggggatggtggaattaacctaggacatccaacagacaggcatggcttgccctgggttccgagagcagggccaagccacagcaggaaaagggctttttgtcagaccttcccaaaggtctaactagtccaaagatgccacattaaactgccctgtctgataactctgtactggcaagccacctgccagaaaggacaggccgcaccatgtgaacaaagaaaccctttgctgtagaggatgcttcttcccttggtggcccttcagctatcaactgaaatgtgtgatgatgcctccatggatcaccttctgctcggccgggactcacagctgcagggccactcctgatgggacagcagtgcacagcggctgtgtgctccaaggaagcaggtccactggcagctcagtccctctgtgctatgaccctgggcaggtcaccctaactccctgggacccgtttttttcttctgtaagtgggggaaacgacaacctcatgaagtcataaatactaaatgacttcacacacggcgagtgctgaacacgtcacccgggacgccagaagatgacagaatggccaggtttctattaggcactggttagctccccaacaaagggaatagcagctctctatttgtgacccaccaccctgaggagcttctggggaacgcaggacccttagaggccaggagcacgagctctgcatgcctgctggcatccatgcctctcagtgacatcatggtccctgccccttcaccccaattgatcctcatcctcagacaccaggacccaggctccgccaggaaggagcagtgaggtggctgctgttaaatgagcacaaggccctgcaggtcaagctggggaaccatggccgccctctcagtgaggacgcagcactcaacgtttccgagagtaagcagctacctgcaaaaaccagtgagtggggcctggggtggctgtgtgtgtgtccgcgactgtgtgtgaatgaggaaatggggacaacaggggaccaggaatggaaatcctgagtagaatgcagatagtcccaccttatccatggtttcactttctgctgtgttaattaccagcagtcagttgaggtctgaaattattacacggaagatttcagaaataaagaattcatgggttttaaactggctgggcgcagtggctcatgcctgtaatcccagcactctgggagagtgaggcgggaggatcacctgaggttggttgtttgagaccagcctcaccaacatggcgaaatcctgtctctactaaaagtacaaaaattagctgggcatagtggcatgcacctgtaatcccagctactcaggaggctgaggcagaagaatcgcttgaacctgggaggcagaggctgcagtaagccaaggtcgcaccactgcacactggcctgggcgacagagccaaaaacaaacaaacaaaaaaactgcatgccatcctgagtagcaggatgaactctggctccatcccgcccaggacaggggtcaaccctttgcccagcatacccatgcgtctacaccacctgcctgagtcacttaggagccattttggttatcagatcagctgttgagggatcatgatgcttgtgttccagttgccttattttactttacaatggccccaaagcgcaagagtagtgatgctggcaatttggagaaacagaaaccagagaagccattaagtacttcccttaagcgagaaggtggaagttcctgactaaagggaaagaaataacttttattatagtatcttgttgtgattgttttactatgagttgttgttgttaatctcttactgtgcctagtttatgcattaacttatcacaggtgtgcatgcctaggaaaacacatggtatatacagggttcagtatacacatggtatatacagggttcagggttcaggcacctactgggctcttggaacatacttttccggctaagtaggagctactgtgtcaaaaagggaatcaagagaccaccacaatcacggctgaaaggagccttgagaatggacttctcttcaggtggggaaactaaagcagagagagacgtggtctgcccacagcacaaggctggctgtgacaaccctcattcagttcatgctggaaggagtccttaggaagtgcacggacgggcctctgcttagtgcacccgacctctccatttcagccccttcatctgtgtatccccccatccccccagcacatcagcagcctttgctgcaaaccgtgagcttttcacgcactgtcagcacctaaacacctgccatagctgcaagagccgggtgctgccacactcaccggattggcaatgacgcagatcatggcttccgggcagtgctgggcacaggcagcggtcagggtggccacaatcgtggcattggtgttgaacaggtcgtcccgggtcatgcctggaaatgatccaatatgagatgttaacagagaacaccacaaatttccagacaggcagcatgtgctgagcgccagctgttacaggaaatttagccactcaaggtccccgtttcaagtcagtccctcttgcagggtaaatgatccagcatgatgagtgccagaagcgaggtctgcatgggtggagcaggggaggacaacatctgagaaggaccgtcgaggtttattaagaacccccaaggtagagtgggactgagaagagggaagggcgtccgtgcacagaggcacaggggaacggcaagacgactttgatcccaggccaacaaagagatgtgacctttaccccacaggaaaggggagctggtgacatttttcctacaacaaagcaaccagattaaatccatttttaataggaaatggatttaatccccacatcttcacgtggggaggtaccagacaaggctttcaaacacaaacctggctttctggggactccagccggaataactaccacatcacaacctttcaggcagtcaggcagctgttcaggtccgaggtagcctagaacaaacaccccacaagagaaatgtcaccgtttctgattcagagaggcctggaaagttcagccctggccttaaggccaactaatggcctcgagaaaggctagaagccctgcctgtaacgtgacttccttctgttgacgactactgccctgcgagctgacaattcccgtggcaggaaccctccccttctaccctgctttccccagcctctccttgcccaggccccagctagaatgggtcagccctccaggtttccacaaaagcgaactgagccactgcttgtcttcatcctactcgtgagcattgtaagtcacacttggcctccagttagaatgagaggagctgctcattccccatcaccacaatcctgatgaaaactccttttttttttttttgagagggagtcttgctctgtcacccaggctggagtgcagtggtgtgatcttggctcactgcaacctccacctcccggcttcatgtgattctcctgtttcagcctcctcagtagctgggattacaggcatggtccaccacatttggctaatttttgtatttttagtagagaaggggtttcaccaggttggcaaggctggttttgaactcttgaactcaagtgatccacccaccttggcctcccaaagtactgggattacaggagtgacccactgtgccagcccaaactccttgatcagaaggcactgaaggccaggaaagaaaacgtcctgtgctgaaagactctaaatattactatttcgtttactcctatcatctgaaggaaaaagtatgttttcaaagatttcagggaaatttgctacaatatccaaaatctgcttcgatcttgactttttccttaatgcaggagccttcttaacccgaatatacagcccaaaagaaaatgggcaacccattcagagaactctggaaggtgcacgaacataaaatttgccaggcagcctccccagctgttcacaccaacttaagactcatgtaaacaccatcagacacggtatcgcatacgctgtcagaggggaaagaaatcagtagaatctttctggacagcaatttggaactttatagtaaaagctttgaaatattcatacctactaattctgtgtttagaactctaagacttcaacaagatgtaaagataaagatacgtactgcaacttacattaatatatttatatttacagaagcaaacaggaaacagccaatggtcaacagcagagctatcataaatgataaattacagctttaagaataattttatcaagaattcgggctgggcgcagttgctcatgcctgtaatcccagcactttgggaggccgaggtaggtggatcatttgaggtcaggagttctagaccagcctggccaacatggtgaaaccccatctctactaaaaacacaaaaattagctgggcatggtgttgcacacctgtggtcccagctactcgggaggttgaggcaggagaatcacttgaacccaagatggggaggttgcagtaagccaagattgtgccactgtattccatctgggacacagaggaagacatggtctcaaaaaaaaaaaaaaaatttggtgacatgcaaaaatgttgatacattgtgaaggttaaataagcagcatatataaatatgcatatttatgaaatttttttttttttttttggaaacagtgtctcactatctcacctaggctgaagtgcagtggtgtaatcagggctcactgtagcctcaacctcctgagctcaagtaatcctcccacctcagcctcccaagtagctgggaccacaggtgtgcactatcacgcccagctaatttttggactttttgttgagataggggtctcgccatgttgcctgggctggtcttgaactcctggactcaagcaatcctcctgacttggcctcccaaagtgctgggattacaggtataagccactgcactaagtccagtgaatcattttccagacaacatttactgaatatccgacactgccttccacagacggggaggtttcccaaagaggccgtgctttttgagaagctggcaagataaccctggggtggagggaaggtggcccgcagctgagaccaccaccttactgtccccaaatcctcaccagaggttgctgacacttccctcttccccatcctcatactacttttcaaattagaaaaagtagaaaatgggatgattaggctacctcacatttctaaaagacaccgctgtttcaatttttatagacgccaagtctaaaagggtgtaatcacttgtaaaatttaaatttaaaacagagaaacccccgtctctaaacatttagtttcatctaagaatcttactcaaaactcgaatcctggcctactggggacaggaagcaagtctccagggtcagcgcgcccagtacctttcacagcggctttggtctcgatgtggctcagatctgcggccactccgggtgtgtgcgcgatatcatagagggtcaggcggctcaccaaggggctgttcttcaggagaagtgaaagtggctgcccgatgcctccagaggcccctagcacagctactttagcattgttctaaaaagaggcacagagaaaggactcttaggaggaaatgagcatgaaaaggattcacatggtatcctataatgttgcactgggcctctttttactgcagttgccaaagcaagatacaatcattgtatttgtaacagtctcattctggaagaattcaggaccttcattccaaaggtccactttcaaatggggagaatttatgtctgtagagtctgtgatactcagggtacttcaaaaccctcctgaaagatgaagaacaagctggactccatcaggcagctggactggtaacagcagccttcccttcaacctgcagctttataaactataaacacacactgagtgcctagcaacaggccctcccggtaactgaggttgcaggaagatccctgctggctctgtaggagacaggtaatgagatgcattaggagcagggagaacactgtcacagaagccccttgtgcaagagggcagatggggttgcggcaatcaactccctgcaggggtggggaatcagagaagattcatccaggcagcaaacttgtggctggagcctcaggcaggacaaggagctgcctaacaagaggtggaaggggttacgtacgttgcgaaagactccaaccctcctggtgagtcagatctgtcatctcgggctccagtatctcacactggttctccagcctaggtgtgcatcagagccacctgctgagctaatgaagcccactcaggactaggctcctggaagcgggatggggcttaggccttggcatttttgccattttccccagatgattttgataccaaacagtttgagaatcactgtttcataccaggctaatcagaagaacaggcagcaaagtagcagctggccctgggcatttcagcttggaacagttaggaaagtgatggggtgaaagtgacccggccccgcatccagcaatcactcccgttattcgaaggcactcttcccctctaggtctcactcaaggtctgaccaaaattacagccatacccagggagcttgtttctgatctaaactcacaaatgagaagcacagccgatccctggcaggcaggcaggcaggcagctaccagtgagggaagaggcaaacaaagtggcagacacgggaactctcggcaccgtgtgtggtcatctggggcctgacagcatcactgcacagtcttctacagtagctgaggccagctaataacaggctttggttatcagaaaccaaaacccaacaaaccaaaatccgaatcaagacgcttacccagtgggtttctgctcaggaaattaaactgtggaagcatatacaaccaacatttgaattcaaacaggtttttgagtttcaagttggtgctttaaaggtgaacccctggctgcctggaaacttgaacctgtcagacccgctcagaacctgaggtcgggcaggctcagcctcacccacttctggatcttcagctctcactcccacatcttgtgtgagtctcagggactcccaaatcccagctctgcattcccagttctgttaggcgttccatgggttccacaaactcaactgtccatttatcctgcccccctccctccatccctggtcccaaatggcacttgtgttcactaaatgtaaacttctagaaccatcttctgccacctccttcttatcagagacatcaagtcaggacatgaagaacttggcagctcaaccaccctcccaacccgctcctcctcttcattctattccgttatctaacttaggtactcagcaacacctccaaagcatgctttcccaaaatcaaagtcttaatcatttcactctcgtgctcaggctggcatggtggtatgcacctgtagtcccagctactcagaaggctgaggtgggaggatcacttgagcccaggagttgaggctgccgtgagccatgatggcgccattgcattccagcctgggaaacagagcaagattccatctctttaaaaaaatatcttctgggctgggcgtggtggctcacacctgtaatcccagcactctgagaggccgaggtggatcaccttaagtcaggactttgagaccagcttggccaacatggcaaaaccccatctctactaataataaaaaaaattagccagacatggtggcgcgcaccggtaatcctagctactcagaaggctgagacaggagaatcgcttgaacccaggaggagatcacaccactgcactccagcctgggtgacagaccaacagtctatctcaaaaaaaaaaaaaaaaaaatcttccaaagctttcatgcctccatcactcagccagggcagtggttccacaggggagtggccaagacaatcccaccagggtggaggatgaaactgctgcaatgagtgtatctttttttttttttttttttttgagatagggtctccctctctcacccaggctggagtgcagtggtgcgatcttggctcactgcaacctctgcattttcggttcaagccatcctccccaccttagctgtagctgggactacaggtacacaccactcattttgtagaaatgaggttttgccacactgcccaggctggtctcaaacttctgagctcaagtgctgggattataggtgtaagctaccatgcccagactgtctctatctttatctaacaaagaattaatctctaccaagaaatggaccgacctgtgccctcgctagggtgcttaaatggatgggtcccatgtgtacataaggtgaacacaacatgggggagggaggggaagaagactgcctcactggtttctttgctttcactttgtcaaggtgatgtcactgtttgtatattacaggatgtcaccaacttaatttttacaaaaccacaatccttaagtagtataatctttacatgctttgcaatgagatgaaaatctttggtggcccggaggttagatcatgatctccttgtcaaagagctgtcttccagacccgctgacctttgctgggtggcagagtggctatcaacagcacactgcttggcaactgtgttgaaaaccgacatatgttaacactgccttcatttataagttttaacactttataacgtgttatggtttgttttaaaatttctacttgagtttatattgtaatgtatatattagtacatatacctataagtaaatacattggggctatgtgcttcctacgcttttactgttaaagatacaggatccagctaggcgtggtggctcacgcgtttaatcctagcactttgggaggctgagatgggcgcatcacctgaggtcgggagtttgagaccagcctgaccaacatggagaaaccctgtctctactaaaaatacaaaattagccaggcatggtggcgcatgcctgtaatcccagctactcggaaggctgaggcaggagaatggcttgaacctgggaggcggaggttgcggtgagctgagatcgcaccattgcactccagcctgggcaacaagagcggaactccgtctcaaaaaaaaaaaaaaaaaaaatccaaagtctggagaccactgcaccatgggctcaagcccatctttctttctgctttcatcagctgccttctcaacaatgtcgcttgtatgcccaacaggcattttaaattgaacatatgaaaaactgagatcctggccgggtgtggtggctcacgtctataatcccagtaccttgggaggccaagacaggtggatcacctgaggtcaggagtttgagaccagcctggccaacatggcgaaaccccatctctactgaaaatacaaaaaaaaattagttgggcgtggtggcagcacctgtaatcccagctactcaggaggctgaggtgagagaaccacttgaacccaggaggcggaggctgcagtgagccgagatcacgccactgtactccagcctgggcaacagagcgagactctcagtaaataaataaaaactgaactcctgatatcttctccctggttaaacccactctcttctataagtcttgcctatttcagcccaactccaaggcccaaaaccttggtgtcatccccgaccccttatctaatcacacatcagcaaatccttctggtaccatcaatgaatacccagaattcaatcatttcttaccacctgcacctagataaccacaatgaactcctaacctacctttctctcactcctaagaccatcttgttaaaatggaaggaagagcaagtcattacgcagctgaaaaccctcaactggccgccccatttctgagaaaataccaaagttttacaaggcctgttctgttacctccactgccttctctggaactaccctagcctcattttctcaaaccttcaaggcatgccccatgcttctccaagggctctcagctacatcctgagacatatcccttacctgcaatactctttccatatgatgtgatctctgcttccttcagactttactcaaacatctcactctgcgtgaggcctaccctggctgatgtaaaactgctaccctcggctgggagtggtggctcacgcctgtaatcccagcactttgggaggccaaggagggtggatcacttaaggccaggagtttgagaccagcctggccaacatggtgaaaccccatctctactaaaactacaaaaattacccagctgtcgtagcccttgcctgtgattcccacctactcgggaggatgaggcaggaggatagcttgagcccaagagttggttgcagtgagccaagatggcgccactgcactccatcctgggcaacagagtgggactctgtcaggtccatcctggccaacatggtgaaaccccatctctactaaaaacacaaaaattagctgggcacggtggtgcgcgcctgtagtcccagctattcgggaggctgaggcaggagaatcgctccaacctgggaggtggaggctgcagtgaaccgagatcacgccactgcactccagcctgtcgacagggcgaggcactgcatcaaaaaaagtaaataaaattggtaccctcttccctaacacaagcaccctacaatccccatttttcttgcatgttcatcactattttaagatactttataatgagtggggcaataagtaaaatatctagtaatttccgtgagagcagggacttctgtgttttgttcaccgctgtatttccagtacctagctcaataaatatgtcggatatctgaaggtcctaccaaaactcaacctctccctggacacccctgtcctctctttggttggctgcccctcccccacacctcatccctcctgtcctgtttactcattccctaagaccttcatcgcctccacctgtcctaagtttactcattccctaagaccttcatcgcttccacctgtcctaagtttactcattcctgtcccatatcaagtgtcacttctcacttatcttggtatcccctgcagcacccagcatagttgttggcaagcacaggtacttaatgtacttatctgtatacagctgggcccccacttcaccgcagcgcaaaagcatttggtacattcaacttacaatggggttgcctgtgggaacccattgcaagttgaaaatacacaaagttaaactcgccttttgacttaggatattaccaacttgcgatgggtatgggaagtagccatcaatccaggagcatttgtatttatttttcaaatgaactggatgtacaggaaactcgagaacttcgatgataaatttggattcccctttaaaattacctccctcttgggcgtcgtaattaaaaggcaatgcgagcacctcctgggttctcaaaattaggtttaattagattcacctggtaaaaatgcggacccccccccccccccccgcagtcttaagcttcttcaatgaacccagacgtctgttttttattagctttctggtgattctgacacactgcagagtttaagaaccaccattctagaagatggctaaaaatagcctaggctcctaggcttaagtggtcgcgggccaagtcaagcactgttaagacacctggcggcaggctcagtccgcccacagcaggagagatcctccaaaaaggttaagaggaagccgtcttcaggtcagaagcgctgaattctaatcctctggccaaatgactgtaaccctggcccagttctctagcctcggtttgtccatactatggaattaggaagtatacgatttcttttattcacgcacaactcacacggatgctgcaaggagattagctacgtcaaagcaatggaacgctgcagaaaaaaacgtaagtttactttcagatgcagagccctggtttcccaaccttgaaggcgtgcaagccaagagcaggtcctctgggaaatctgggagacctgggggaaccctgacaaatggaccggccctggagcgggactacctcgcccccttttccccggctttctcccccgcacctccaggccagtgtcagggcctgccccgggcgccacagtctccagccagtgccgggcatccctgcggtccaggctggcctggagagggtcagagctgcccgcgaaccggggacgcacgtggcccgggccggggggcctccgcctgcaggccgcccctcgtctggcctacctgggccgaggtgctgaagctgcggcggagagcagcgctggcaggccgggcgagggcggagagcatggctggagcgggaggggcaccgactggcaggcacaggagctggtgacggggaagtgactccaacgacctccacactgcccagcgcctgctctctggggcctcgcgagagtgaccggacttccggtcgcgctcgcctccgggatctcgtgagatcacggccacttccgggagtcggaaaggaaagctgtgggaccatcctggcaaccccggtgtttggctgggttctagcgtagccgtctgtgtggccggtgggggacctgcggtcggagtgggagggccagtctgcacccaagaggtggaagaggacgggctttaggctggaagcgccttagaggagccatttttccaggtggggccccaggcagaggctccgacagggagcctggccatagtcgcgcagccggggaggtggagcgcgtcccagacccgagcccccgacctcagccaaacccattccttctgcccttggaggccagaggggactctgagctccggaaaggtagggtcagggaggctgagagtccttaggcggggtgggaggaaggggccatctcctcagatccgggccgtcgtttcccaagttgcagagacccttgggttcaggtttagtgacaccactgctgataatggcgacctccagccctgcaagctttagaggaccactattctgtgttccagatgagcaaataggttgtagggacaacaacttccgtggtcatacagttcctgtcttctctcgcctgcccggcagtgctctgacggtcccactgtttctgctttacgaataaagacactgtggctgaggccaagtggatttgtagagtttacgcagacagaaagtcgagtagaattccttgctcacaatgagtttattacttaaatgtatgaatttatttatttttttgagacggagtctctctagcccaggctggagtgcagtggcgcgatcttggctcactgcaacctctgcctgtcaggttcaagtggttctcctgcctcattctcctgagtagctgggattagcgcaccactacacctggctaattttttgtattttttttttagtagagacggggtttcaccacgttggtcaggctggtctcgaactcctgacctcgtgatccacccgcctcggcctcccaaagtgctgagattacaggcgtgagccaccgcgcccggcctgatacatatttttaaaattaaacaacacccccaggcaaggtggctcatgcctgtaatcccagcactctgggaggctgaggcgggccgatcacttgaggccaggagttcatgaccagcctggctaacatggtgaaaccccatctctactaaaaatacaaaaattagcccagcgtggtggtgtacacctgtagccccaactactccggaggctgaggcaggagaatcgcttgaacccgggaggtggagggaggttgcagtgagccgagataaccccactgtactccagcttgggcgacggagaaagactctgtctcaaaaaaaaaaaaaaaaaaagccgggtgtggtggcttatgcctgtaatcccagcactttgggaggtcaaggcgggcagatcacctgaggtcaggagtttgagaccagactggctaatgtggcgaaaccccatctctactaaatatacaaaaattggctgggcatggtggcgtgtgcctgtagtcccagctactcaggaggctgaggcaggagaatcccttgaacccaggaggtggaggttgctgtgagccaagattgtgccattgtactccatcctgggtgataagagctaaactccggctcaaaagcgcgcgcgcgcgcgcgcgcacacacacacacacacacacacacacacacacacacacacacacacacacacacacacacacacagcagataagctgagacatgctggaagagtaggtgtttctcaatggaacattcaactccagaggagggaaagatcccttgccttggaatcagaattctcaaaggaggggcactagggcctgagcatttaacaatgggaaatgtttagacaggaaaggaggagaaaaaaggccaaataaaatcctagcgggaaaaaataagcataggccagtattcaggggacagtgaatagatcatttattttggagtggggacattagggcaagcagtgtcctttgtttatcttatcactgactgcatcttctggtaattatttactcctctgtcttgtaactgagagcacctcagagccaggtattaagtcttgccaggtactaagtctttcttctgttttttttgtccaacatgcgactgggctgaaagggcctcagtgaatttgtggagagttgagtggttttaggtacagctggaaacagcaggttgggaaaaactagattgtgccggtcccatgaatgttagctgagaagtttgtatttcatttcttgggaagcaagtgtttatcaaaggttgtttatttatttgagatggagcctcacgctgttgcccaggctgcagtgcagtggcgcgatctcggctcactgcaacctccacctccgggttcacgcagttctcctgcctcagcctcccaagtagctgggattacaggtgtgcaccaccacacctggctaatttttgtatttttagcagagacagggatttgtcatgttggccaggctggtctagaactcctaacctcaagtgatctgcccgagtcagcctctcaaagtgctgggattataggcgtgagccactgcacctggccaatcaggcttttgtgacactgccagaactgtgtttgaggaagattagactgaccttgtatgctaagaattcccaggaaaaaaaaaatggagattgtttaggaatctattcagggagattgtttaggaatctattttatggatgacaaaggtctgaattacggtggtggccatagaaatggagtgggtagggccagtgtgggagaagtctcatgggaagaatgggtaacagtctgtgctcatctgggtttgaggagtgaaagaaagaggtgtggaaaatacataaagagggaagtcgggttatacaaaggagaggagaaaaataaaggaggttataccaaaggagaggagaaaaaataaagagttccgttttagatgggcttaattgggagttatgctgagttgtccatatagacctttcagtggtatgggccgtgttcatgcctgtaatcccaacactttgagcagccaaggcggacgatcacttgagctcaggaattcaggaccagcctgggtaacatggcaaaaccccatctctacaaaaagtacgaaaattctctgggcgtgatggtgtgtgcttgtagtcccagctacccaagaggctgacatgaaacaatcgcttgagctcaggcgatcgggggaggtcaaggctgtagtgagccatgattgtgccactgcattctgacatgggtgacagagcaagatatgtctcatttaaggggggaaaaaaggaactgtgggattgaaactcaggccagggcggaagtcacctctgtagagggggagagttgagaccatgagcaataaactggaatcacagattgtcaggctccctcccacatctggaattcagtttcctccacatccctcccaagtcctcatctccacagaagaggaactcgctacctcccaagccttctacttgggccatcccaaacaacttgactgctagaaaagcctcacatttggcccagtgcagtggctcatgcctgtaattccacccctctggaaggccaaggtgggaggatcgcttgagcccaggagttcaataccagcctgggcaacacaggagaccctgtctacaaataataaaaattagccaagcatggtggtatgtgccagtggtcccagttactcaggaagctaaggcaggagaattgagcctgggagtttgaggctgcagtgagctgtgtttgcaccactgcaccccagtctgggtgacagaatgagaccttatctcaaaggaaaaaaacataaaaagcctcacactcagctcctatctgcctctctctaaggaaataccaaggtaattaacaacagtcttattggctgctgtatgaagcactgtgtggtaggcattgattttacttggtgttttgcaagtgaaacttatattaaacaagcagggtttccacagtcaagaagtagaattcaatcatgcagcagctttctgtctttaaatctttgcttgcccttggattgtgtctggttactaggacagacttactgtccagttcatgttaataatcaaaactaggaatttaattcaaaggtaaagctgcttctcttcccctctcaagctttctttgggctcccacatttgaggaggacagtagttgacttctgtttattttgtttcctcttccatcccaccccagcccaggccaactatggcttctgaggcatcctgtgttggtggagggggttataagagagtagagatggggcaagaaaagccccttcgacatctggccttgttactgtctcagcttgatgggaatttgtaactgactctcccatgcagtgcttctgggggtctttcttacctccagttcccatgatcaggtggccatctcagtcttgctgcttcaattcctccctcagcccctggcttctggaatcctccaccacatgccattggtccattttccctctcggtggccctcttgggcaaagttcctttaaaatggcttctcggctgggtgcggtgactcacgcctgtaatcccagcacttcgggaggctgaggtgggtggatcacctgaggtcaggagttttgagaccagcctgcccaacatggtgaaaccccatctctacaaatacaaaaaattagttgggcacggtggcgggcgcctgtaatcccagctactggagaggctgagacaggagaattgcttgaacccaggaggcagaggttgcagtgagccgagatcatgccactgcactccagcctgggcaacagagcgtgactccatctcagaaaagcaatactaataaaataaaaataaatgagtaaaatagctactagttggccttctcccctgcctggtccatatctgatcaacgggaaacacttaggtatcctttgccccaacaaattctgggggtgcaggccatttcaaatgcagctacctcttcttgctttgccaacagctcgccagcctcacgccagcctcagatttccagcccaaggcctattaccagcctctgtgcctgcacaagcttcagagggcacaggccaagctaccctaggggctggcttctggtttcattaattgttccaagaaagcagagacttgtgaatgtttggaatcagaaagatgctaatagggagagctttgagattctgaaaggagaacaagagagattaggtgaaattgtatgagatcagagggtgcttatcccttggactgtggagaaaagcacataagggccggctgcagtggctcatgactgtaaccccagcactttgggaggccgaggcagatggatcacctgaggtcaggagtttgagaccagcctcgccacatggtgaaaccccgtctctactaaaaatacaaaaaattagccgggagaggtggcagtgcgtgcctgtagacctagctacttggaaggctgaggcaggaaaattgcttgaaccctggaggcagggttgcagtgagctgagatcgcgccgctgtactccagcctgggtgacagaatgagactccatcttaaaaaaaaaaaaaaaaaaaaaaaaaaaaaaaagcacataagggcacccagggagcagttggtggaggagggcgactcacagccagtggccttaactttcccaggcaagaatagaaaattagagaagttgctcccaaagaggatttggtttggataacagttgtgatcactgggaaaatgctggtcaaatgtggaaaaacaagagtgggattagctagtggctatgagggccaagctgaagttctgtaatgtgtacttgctgtgtgcccaagtccacatagttttctacagcccagaccccataccaaggtcacagacatatacacagactcacacacatgcgtacatgcacacacatgcacctgcagattcacatcctggaacacttaaacacatcaatctcgacaagggaattatttattgatctacggttttcatacagtgaagtatataggtctcaagtgttcagtttggttttgacaaattccacccttgtaacaaccacccaaaacaaacgataaaacattgccattattccagaaagttctctcatgctcctttccattcatctgccaagacagctatttcctgatttctatgatcgtaaagttgctttgcctatttgtcatcggataggaaaatatacaaatacattgacagcctgtcttagtctcttttctgttgctgtcacagaatgcttgagattgggtaatttatatagcaaagaagtttatttagcttactgttctggaggctaggaagttccagattgggtagctgcatctggtcggcttctggtgagggctgcatctgcatcataacatagtggtggagacagggaattaggcgtggaaaagggaaaatgcaagaggaaaccttgctttataacaacctgctctcaagaactagtccattccctggagaagacattcatccatcttaatagccaaatcacctcttaaaggtaccacctcccaatactaccacattggggaccaagccttagcatgagttttgctggggacaaaccatattcaaaccataacacaccctcctcaccccacccctacacacccacatgtactgatcattttgtaccttacagtgggcttatatcacaatcatgtgctatcagattttggtattaggtgcacacattatatactaacctaccttctcttcaactctaaagtcatagatcaagtgaagtattttactattttaatttagttttttttttttttttggagatggggggaggttctcactatattgctcaggctggtcttgaattcctggcctcaagtgattctcccagctcagcctcccaaagtgctgggattacaagtgtgagccaccacgcctagccaagtgaagtattttaaaccgctccttttggatccctggagctaaaacaaagggttagaaaggtggttatcatcctgccttgcctgggagttttcctcatttttctgtagctgctctaggatattggaagttggggacatgtatttttaaaacagaaccatatttagataaatagctttttttttctttttcttttcattttcttttcttttttcttttttcttttttttttagctgtgttgcccaggctgaagtgcaatggcacgatttcagctcactgcaacctccgtctcccaggttcaagcgattttcctgcctcagcctccggagtagctgggattacaggtatgcgccaccacgcctggctaattttgtatttttagtagagactaggttttaccatgttggtcaggctggtcttgaactcctgacttcacaaacctcctgcctcggtctcccaaagcgctgggattgcaggcgtgagccaccgtgcccagccttagataaatagctttaacttttatttgggcctcctacctgctggaagtcaaaggagttggctttccaggataggtcccagcagaacaaccgggaggtgttggactggccacagcagagccaccaaggggcttccaagagctgagagtcgctgattgtggcagatctgagtctgcagtgaagccttctgtcaggcagaccagcctgaggcctgagaagggagagcaaagccaggtcacagcctggtcagggccattaactcatgtcagagaagtggaaggtggggcctgagcccaatcagggagcagaggaaaagcaggccccagagacagagtcggaggaagtgagccaaaggtggtggtcaccgtctttggagactgtgctgtagtttccagaccccaccaccgcctcctgacagcctagttgccgtatgagcagacctgttacccttacaggaccactagggcacctctcaggggtctagcaggcttaggtttggggacatggaattgatagcaagatctaaggcaaggagcagggatgtggacggctggatctaggcctctgatccatacctgctctccctaaaatatagaggtactagcgatggaggccaggcgccgtggctaatgcctgttatcccagcactttgggaagttgaggcaggtggatcacctgaggtcgggagtttgagactaagctggccaacgtggtgaaaccccgtctctataaaaatacaaaaattagcctgtcatggtggtgcatgcctgtagtccttgctactggggaggctggggcaggagaattgcttgaacttgggaggcgaaggttgcagtgaggtgagatcacgccactgcaccccagcctcagcaacagagacactgtcacaaaaagaaaaaaaggtgatagtagatactagtgatgatcaaggcaaagttaggaggttatgatggccctggtctcctcctcctcttccctctttctttcttctgtgccagtgggacctggtgtccctctgagttaagagacagatttcaggcccacttctgcagcctccacagctctgggggtgttgtgacctgggactgtattacccagctttgtcaaggttcaggccacagagaatgtgtcaagctgggattgaggaaagactgtaccaaatcccttaagatcctgacccttggctgggcgcagtggctcacgcctgtaatcccaccactttgggaggctgaggcgggaagatcacttgagcccaggagttcgaaaccagcctggaaaacatagtggaaccctgactctacagaaactaaaaaaaattagttggccgggtgcggtgactcacgcctgtaatcccagcacttcgggatgccaaggcgggtggatcacgaggtcaggagttcgagaccagcctggccaacatggtgaaaccccgtttctactaaaaatacaaaagttagctgggaatggtggcacatgcctgtagtcccagctacttggtaggagaatcgcttgaacctgggaggcggaggttgtggtgagccgagattgcaccactgcagtacagcctaggcaacagggcaagattccgtctcaaaaaaaaaaaaaaaattaggcatgatggtgcacacttgtagtcccagctactcggaaggctgaggtgggaggctcacttgagcccaggagtttgaggctgcagtgagtgacgatcgcgccactgcactccagcctgggcaacagagtgagacgctgtctctaagagaaaacagcaaaacaaaatgtaacccaaatatgacaagagttagttagctcgccttgaggccattctcaagaatgtcattcaacggtggctcacgcctgtaatcccagcactttgggaggccgaggcaggtggatcatgaggtcaggagatcgagaccatcctggctaacacggtgaaaccccgtctctactaaaaaaaaatacaaaaaagccaggcgtggtggcagacgcctgtagtcccagctactcaggaggctgaggcaggagaatggcgggaacccaggaggcagagctcgcagtgagctgagatcgtgccactgcactccagcctggggtgacagagcaagattccgtctcaggaaaaaaaaaaaaaaaaatgtcattcaattcccaaacataaagcaggtcctgacagcctcgaagtcacataacgagtagggaggtttttctgggacgacagaggagaggctcatgtcatcccacagaaccaaacacccccacattccttcagacctctctgttcttccccattgttctcttccggaagcgagaccctgtctctacaaaaaaataaaaacttagctaggtgtggtggcatgcacctgtagcctcagctactcaggaggctgaggtgggaggatcgcttgaggctgcagtgagccatgattgtgccactgcacgccagcctgggcaacagagtgagcccctgtttcaggaaaagaaactgagagggtaggagtaaaggaatttcctaagctactgccatgtgtcaggcccactgctaggcaatttatatcatttagctcttgaatgatcctatagctttgccagtgtgtattatctcagcttacaggtgagggcattgatgcctgtcactatgtttaagccttggtcatgctggcacagcctgagcttcccaccgcgaaccagaacagcggtggggattggctgtggaccctgacccttacctgggctggtcagcttgagccagagtctcaaagtgaagctcatggtctggcttctccaggatcatcaagtgttgtctcttcaccagaagcaaatgcccatcaattgtgtccacctggactgtcttgggggttagggtggcttggcagttgagcgctgggtcaagcctgcagtatcctcgaactcctacaagaagcctgtggtcaggcccagcctctgacacctccaccgtcagtcaggatggaagtcccctgggtgttgagcagacacagggaggcagggagatgagctggatctggctgggtccctgcttagtcacaggctctggcaacctctaatgaaacatcccttcccagttggctgttttccccaaatatagacacgtgctgtcactagaggggagcttcccagcccaacagcttctggaccatgctgggctgacttggggagagagccacccacgaacccctggtttgaaggccagactaggtggtcatatggaaggtgacagaccttccccctggtgggtgtactgtgtgcagggacaaagcctgtgctagcaccctgctgtcttgacagtaagtgtctttgggctgggcatggtggcttatgcctgtaatcccagcactttgggaggccgaggcggacagatcacctgaggtcgggagttccttctgccttggacacccaaaatgcagagattacaggtgtgagctaccacaccccaccaagggtctcttaagaagagctggccgggtgcggtggctcacgcctgtaatcctagcactttggtaggccgaggcgggcggatcacgaggtcaggagattgagaccatcctggctaacacggtgaaaacccatctctactaaaaatacaaaaaattagccgggtgtggtggcgggcgcctgtagtcccagctactcaggaggctgaggcaggagaatggcatgaacccgggaggcggaggttgcagtgagcagagatcgcaccactgcactccagcctgggcaacagagtgggactccgtctcaaaaaaaaaaaaaaaaaaaagagctatactgtgttgaaagagtcctgtataaaggaggatgtcttaaatttgccattttgactctgttttgaacaggtcaccaggaaaatgagacttggtagcctggcgaggtggctcaaaaaaaaaaaaaaattcacatggaaaagacttgatcttgggataaataaatttaatcaaaattgaaagtgaaaaaaattgaaactggctaattgtgacatacagaaaatcaaggaattaaagtggcttaatggattcacaaaggaaaatacttttggcaaaaactcatctatattactttaatatttttatgtaaatgcacgatacatcagaatatccttgagggctcaaatggtggagctaaggacagctaaactctccagggaccaggcgtggtggctcacgcctgtaatcccagcactttgggaggccaaggcaggcagatcacctgaggtcaggagttcgaggccagcctggccaacatggtgaaaccccgtcactactaaaaatacaaaaattaactggacgtggtggtgggcacctgtaatcctagctactcaggaagctgaggtgagagaatcactcgaacccgggaggtggaggttacagtgagccgagatcatcccactgcactccagcctgggggacagagcaagactctgtctcaagaaaataagtaaataaataaactcttcagggttcagaatagcaccaaatgggatggttacttgtgctcagtcctcaacttacccaaggctagaggtgccctaatttcagttcacagggatgcatcttctcttggaatcatgctgttaggttcagggaccgatctcatccttccagcactttaccagtggatgaggggcagttcctgcttgaccaggtagagtgctttgagaaggagaaggatctgcagaaggagatccttggggctgggtttttatctataggaccagagatgattctttggctagtgagtaaggagatagagttagcaatgggggaaagtaggtagtagctgaggatgggtatgagccatagaccagatgggttaggagccagcttttagttttgcttaatgaggttgtaggactagacacaaagcccacttctctcctctatacttaccactgccaaagtggcctggctttcagaggcagaggatgtggaacctgacttggggggtgggagtgaggagatccttaagaggaatccacacgtggaaaaagtatgatggcaggtccagatggcggtgttgggaaaggccataatggtaactgacaataatgtattcattccacatgtgttcattgactattactttgcagcatgtaaatctggggtattgggtgaggacctagcagtggacaagacaggcaagaccttccctcagaaaccaggagacaataaacaagcaaataagcacaataacttcaggtgatagtgaggtgaagacaaggccctactcagattttaaagatttcccggactattatgtgaagatgaaactggagggaggaaggaggaagcaagaaatccagttgggcactactgcctcatcaggagagagattgtagtgtcctggaccaagatggtacccctggagatggagagaagtggatggacttggaatacatgaaggaggcagagctcagagactggatgtgagggaaaggggaatgaggtcatcgggcccaagcaactgggtggatcatggtgctgttgattgagactgagaaggctaaatgaggagcaggtactggaggtgtgggcacgagagcattgaagttgtatttcggccatgctgtatttacgatgtctaccaggcacccttctagagtctgcagctcagtagacaggtcaaggtgggataaaatttgggaatcattggtatgtgtgtggtattcagggaactggatgaatcactgtgactctaggtcttagagtgttggtcctcagctacgggtgatcttgcccccttcttccaggggacccttagtgatgtctggagatactttctgttactggtgatgggaagaggtacagtttgcttccggcatccactaggcagaggccagggatgccactcaacatagcagtgcacaggccagctccccacacatagagttacctggccccggacgtcagtggtgtcaaggttgagaaaccccctaccctagagtgagtgtagataaagcagaaaaaaaggaaagtaagcccgggggcattcttccatgcagagctggagaggaacagtctgcaaggaagaagggaagcttggagagtgctttttcttgggaggggagagtgtctggggaagaaacaatgctcagccgtgttacatgctcctaagaggctgaggcgtttgagcccagagggaagtgaccaatggcttaggcaagatggacattgttgatgactttgatacagagcagtctttgtggtttggtagggttggaagctccaggggaaccagcctgggcaacatagtgagaccccatctcttaaaaaaaaattagccggccatggtggcatgtgcctgtagttccaattacgtaggagtctgaggtaggaggatcacttgagcccaggaggttgaggctgcagcaagctatgatagtgccactgcactccaacatgggcaacagagcaagaccttgtctcaaaaaaaggcagcagctccaaagaagtaggttatgcccatggccagtactcactgagtatttcctccctgcttagaatgcctgacaaatgtgacttcatgaatccacatacaccaggcaggtactgtcaccctcattatatagaagtggcaatattattctcacccccattttacagaggtggggactgaggcacagagaagctaaccactccttagggccaggcagctgatagtgaatcgcagagccaggattcagacctaaaagagtttgactccagggacagcataattggaggtgaagaagtggaggcggtaaatgaaacaccacgcttttgagagatggtgtttctctttccacgcttctgctggaaagaagaacagataggtacaagaggatgtttgcatgtcaacaggaaggacccatgtggaggctgaaactgatgatgctgtggagggggtgctgagaactgaagtctttgaggaggtgagaaggatctgaggtttaagttgaggtgctggcatttcccaggagcatcgtctggtaactctgaagtggagcctaaccgtttagagcaagattacccctggactcaacttctccccttcgccatcccccactggcctccagaggctccactctgctctccttctagccctcttgctaaaagatagctggccaggtgcagtggctcacacctgtcatgccagcactttgggaggccgaggagggaggatcacttgtggacaggagtttgagaccagactgggcaacatagtgtgagacccccatctccacaaaattcaaaacttagccgggcatgatggcatacgctgtagtcccagctactcaggaggctgaggccagaggattgcttgagcctgggagtttgtggccgcagtcagccatgatcacaccaccgtactcaagcctggatgacagaaaaagaccctgtctcaaaaataaataaaataaaagccttcctacaggaagctcctgcacaggcctgacccttccagaaacaattgggcccaggagccagtgtcccaagagcagctctgccaactggagcccgagcctagctctggacacatcagtgattctccacccaacaatgactgtcgggatccttaacgtagaggccatctgtgttggcctctgcagtgtcatcaaaggagccacaccaggctcctttgaactctcttaggtactgcacttgcccctgctccaagcagaatgttcttatcctttgtttcgtcctctctccccctccctcttcctcttgcccaaccttctgtctcagtttagcagtcacatcctcagacaacccttttcccattcccccaactaggtgagaacctcctgttaggtactcctgtcacaatggatcctacttgtttttgtttgtttgtttgtttttttgagacaaagttactctgtcacccaggctggagtgcagtagtgcagtctcagctcactgcaacctctgcctcccaggttcaagaaattctcctgcctcagcctcccgagtagctgggactacaggcatgcaccaccacacccagctaatttttgtatttttagtagagacggagttttgccatgttggtcttgaactcctgaccaaaggtgatctgcctgcctcagcctcgaaaagtgctgggattacagatgtgagccaccacgcccagctgatcctcctccttctttttttttttttttcaagacagggtctcactctgttgcccagacgggattgtggtggtgtgatcacggcttactgcagccccacctcccagcctcaagtgattctcccacctcagcctcctgagttgctggggccacaggcatgtgccaccacacctggctagtttaagaatttttttttttttttagagatggggtctcactatgttgtccaggctggtcttgaacccccagcctcaagcaatcccccctaccttggcctcctgaatagctgggactataggtgtataccaccatgcccagctaatttgtattacagggtcttgctatgtggtccaggctggtcttgaattcctgggatcaagtgatcctcctgcctaggcctccccaagtgctgagattgcaggcatgagtcactatgcatggccctgagatcttttatagtgctcttgcatcttgcaattctttctgcaagtgtctgcattccatgctagactataaccttcatgaaggcaggttttgtttaccacagttatttccagtgcctgggacatagtaggtgctcagtaattatttgctaaataagcaaatgaactggcagctgttttacagcccatgtggtatgtatatggctcagataacgttgtattcaagattttattctctgcccacatttcactacacatttttttttttttttgagatggagtcttattctgtagcccaggctggagtgcagtggtgcaatcttggctcacttcaacctccgcctcccgggttcaagtgattctcctgcctcagcctcccaagtagctgggattacaggtgcctgccaccattcccaggtaatttttgtatttttagtagagatggggtttcaccatgttggccaggctggtctcaaactcctgacctcaggtgatccacctacctcggcctcccaaagtgttgggattacaggcgtgagctactgcgcccagccaactatacatttttgaagccctcctgatcacttccttggttactctcatctttgtttgaagttcaatatattactttttttttttttttttttttttttttggagacagagtctcactctgtcccccaggctggagtgcaatggcatgattccggctcactgcaacctctgcctcccaggttcaagtgattcttttgcctcagtctcccgagtagctgggattacaggtgtgcaccaccatgcctggctaattattattattattattattttagacagagtctcgctctgtcacccaggctggagtgcaatggcatgatttcagctcactgcagcctccgcctcctgggttcaagcgactctcctacctcagccccctgagtagctgggactatagatgtgcaccaccatgcctgactaatttttgtatttttagcagaaacagggtttcaccatgttggccaggcttctcttgaactcctgaccttaggtgatccacctgcctcggcctcctaaagtgctgggattacaggtgtgagccaccactcttggccaattttttttttttttttttttttttttagtagagatggggtcttgccattgttggccgggctggtcttgaactcctggcctcaagtgatccacccgcctcggcctcccaaagtcctgggattacaggcgtgagccaccacgcctggctagatatgttgtatttaagattttattctcctctgcgcactatatttcactatacagttttgaagcattcctgatcatttacatgattactgtcatctttgcttgaaggtatgttaaaaaagagtttaattcattatattactttgtggtcattcatctaaaatagagttatgttacccttgtgtgttattgattcttcccagcaggatgcctggtttgcttttatgtgaaccaacagagctttacaacatcctgaatcaggccacaaaactctccagattaacagaccccaactatctctgtttattgggtaagtacttggaaaaaagcggaggaggtcaaacacagtgtccttcaaacattatttttgatgagttaacaaacttttggcggggtggggggcagtgaatgactttagaacagggatccctgggctgggtgtggtggcacacgcctgtaatcccagcacttgggaaggccaaggtgggcgaatcacttgaagccaggagatcaagaccagccaggccaacagggcaaaaccccatctctactaaaaatacaaaaaaattagctgcagtggtgcatgcctgtaatcccagctactcaggaggctgaggcatgagaattgcttgaacctggaaggtggaggttggagtgagccgagatttgggccactgcattccagcctgggtgacagagtgagaccctgtctcaaaaaagaaaaaaaaaaataaaaaagaagtccgcaacccccaacccccagtaccagtctgtggtctgttaggaaccaggcagcacagcaggaggtgagcagcaggtgagcaggtgaagcagaagcttcatctgtatttacagccactccccatcgcttgcattaccgcctgagctccacctgctgtcagatcagcagcagcattagattctcacaggagcgcaaaccctactgtgaagtgtgcattcaagggatctaagttgcgctctccttgtgagaatctaatgcctgatgatctgtcactatctcctgtcacccccagaagggaccgtctagtcacaggaaaacaagttcagggtttccactgattctacatgatggtagaattatttcattatatattacaatgtaataataatagaaatgcacaaaaaatgtaatgggcttgagtcatccccaaaccatccccgccccccagcccactgccctgttccgtggaaaaattgtcttccatgaaaccagtccctggtgccaaaaagattggggatcgctgctttagaaagctgttaagaggccaggtgtggtggcttgtgcctgtaatcccagtgttttgggaggccgaggtgggcggatcaactgaggtcaggagtttgagaccagcctggccaacatggtgaaaccccgtctctactaaaaatacaaaaattagccgggtgtggtggcatgtgcctgtggtcccagctactagggaggctgaggcaggaaaatcgcttgaacccaggagacggagattgcagtgagccgagatcatgccactgcactccaacctggatggggatttagtgtgagctcacttcaaatttgatttcttccttccccttaccatttttatttatttatgagacagaatcttgttctgttgcccaggctggagtgcaatggtgtgatcttggcttgctgcaacctcagcctccagatttaagtgattctccttcagcctcgtgagtagctgggactacaggcgctgccaccacgcccggctaatttttgtatttttagtagagatgggatttcgccgtgttggccaggctggtcttgaactcctggctcaagtgatccacctgcctcggccttccaaagtgctggggttacaggtgcatgccaccgcgcccagccccacatctcaagttttaaactgacaatgactatcccttaactgccaaacaaatagacgttgatgacgacgtaggtcctctgagtagtttggtcgtatgttcctttgcaaattcagttcttaaatacgtttcctttccagatgtccgttccaaatgggagtatgacgaaagccatgtgatcactgcccttcgagtgaagaaggtacatgggcagcgtcaggatctggggcaggctggctaccttgcagtggggtggggaagagtgggaagtttcaccctcaatccagcgggcagcagaagcaggactgttttctatgtgcccaccgtggtggtcttccacacctctcaccctcacacattttctcaggtgtcctcccatcccccaagaatggtcaacaactccattagacaaatactgatttaatttttgagaccgggtctcgctctgtcatccaggctggagtgcagtggcacaatcatagctcactgcggccttaaactcctgggcttggctgggcatggtggttcatgcctgcagtcccagcactttgtgaggctgagacgggcagatcacctgaggtcaggagttcaagaccagactggccaacatggtgaaaccccatctctattaaaaatacaaaaattagccaggtgtggtggcttacgcctgagtcccagctactcaggaggctgagacatgagaatcgcttggacctgggaggcggagtttgtagtgagctgagatcacgccactgtactctagcctgggcaacagagtgagtgttggtctaaaaaatatatatatatctcctgggctcgagcaatcctacgccgctcagcctccagagtagctgagactacaatggggaatgccaccaggcctggctaatttttgtattttttatagaaatggggttgcactgtgttgcccaggctgctcttgaactcctggactcaagccatcctcctgccttagcctcccaaagcgctgggattacacatgtgagccgcctaagcctggccaaatattgatttaattccttgatatgccaggtattgttccagaccctggggatacaacagaatacaacagcctgagttcattgtccctgccgttgtggagctttctttttttgttgtttttaattattttttctgtttttatgtgttgtttttatatatttttttcatttttatctttatttttggagctttatgttgtaaatttttagggacagggtcttgctctgtcacccgggcaggggtgcagtggcacaatcatggcttgaactcctgggttcaatcaaccctcctatctcagcctcctgagtagctgggactgcagacttgtgccaacatgctaattttttttttttaaagacaggatcttattatgttgcccaggctgtcatggaccttctcttctatttagcaaacagacaataaaccctagagataattggctataatccaaagatggaagcatctcccttttttccttcccatcccctcccctcttccattcccctcctgtcccctcttcccttccccatcctgaggagtggacagagccctgcacacagtcaccatgtcccctactgcagcgaaaccttttccccacgcctccagggtgtcttctccctcatgattgtgaagcctggcagcctttgcccaggacccgtctctcccctctgcagtcctgatcaaattctctgccctgaacttggaggttctctttgactttcctggtttcttttctttattctttttttttttcttttgagacagaatctctccctgtcacccaggctggagtgcagtggcacaatttcggctcactgcaacctctgcctcccaggttcaaatgattctcctgcctcagcctccagcctgtagctgggattacaggcgtgcgccaccacacctggctaattttttcttatctttttttgtatctttagtagagacagggtttcaccatgttggccaggctggtctggaactcctgacctcgttatctgcctgtcttagccacccaaagtgctgggattgcaggcgtgagcctggcctcctggtttattttctatctctttggttcaccttcattttctccttctgccacctgaatgtaactgctggtctgtccttgatctccacatctgtcagggtactttcttgccagagatttcactggagcttacagctgcaatgacatatccacatgcaattagcattcctggcaagtttacatctaaaattttgggcggggcatggaggcttactcctgtaatcctagcactttggttggccgaagcaggaggattgcttgagtccaggagttcaagaccagcctgggcaacatagcaagacccctgtctctacaaaaaaattgaaaaattaactcagtgtggtggggcacctctgtagtaccagctacttgggaggccgagatgggaggatcacttgagtccaggaggctgattgcaccactgcactccagcctgggcgacagagcaagaccctgtctcaaaagtaataaaataaaactttgtcttctaaaattcccctttcctccccattcccgctgtacttttccacaccctgtctctgctgctttttttttttttttttttttttttttttttttttttggagacagagtcttgctctgtcctccaggctggagtgcagtggtgcaatctcagctcgctgcacgctccacctcccgggttaacgccattatcctgcctcagcctcccgagtagctgggactataggcgcccgccaccatgcctggctaattttttgtattcgtagtagagacggggtttcaccgtgttagccaggatgctctcgatcttctgatctcatgatccgcccacctcagcctcccaaagtgctggaattacaggcgtgagccaccgcgcccggcctctgtgctgctttttctgcacataactcaataactcagcagggagcatgggcaggctgtatttttccaggatatttccccgtacaaatccatcattattgtctttttgtctttttgtgtttttgagacagaatcttgctctgtctgtctgcccggtgcagtggtacaatctcagctcactgcaacctccatctcccaagttcaagggattctcctgcctcagcctccctcgtagctggggttacaggcacccgccaccacacctggctaatttttatatttttagtagagatggagtttcgccatgttggccaggctggtcttgaactcctgacctcaggtgatccacccgccttgaccttccaaagtgctgggattacaggcatgagccaccacaccaggcccataatcttactcttaatccccattgcaggccttttgctgcaaccgattcagagcccctcatgatgtatgggcctctattcccactcagctctcaagtctgtgcatttctttgattctggcagcacctcctgctctgggcctctgcccctcagcgtctccaattcagactgatagctttttttttttaatttttatttttattttttgagacaaagtcttgctcttgtcgcccaggctggagtgcagtggcgcactcttggctcttgccttccctctctagcttcccagttagcagattgaggccttcagggcattcccagccctagcaggacagaaaggctcccagccccacccccctcccgcccgtgttctcagccttcttagatctgaccacctctgtctccagcctcattcccagtacacttccactctcacctgacaccttagcagcactgtgctgccatgtttccttctatgatgcacatgtatcccatactgtaacttttttttgaaaacagaatatgtcgtactgttgaatttttttttttttttttttttgagacagagtctcactctgtcgcccaggctggagtgcagtggtacgatcttggctcactgcaacctccgcttcccaggttcaggcaattcttctgcctcagtctcccaagtagctgggactacaggcgcataccaccacacctggctaatttttgcatttttagtagagatggagtttcaccatattggtcaggctggtctcaaactcctgaccttgtgatccgcctgccttggcctcccaaagtgctgggattacaagtgtgagccaccgcacctggccaatttgtatggcttttttttgttttgttttttttgttttgttgttttgttttgagacagggtctcactctctcgcttaggctggagtgcaatggcaccatcacagctcactgcagccttaaactcccaggatcaagcagtcctcccaccttacccttcccagtagctgggaccataggtgtgcaccaccacacccagctaacttgtattttttgtagagatggggtctcgctatgttacccaggctggtcttgaacgcctgggctcaagcagtcctccctcctcagcctcccatagtgctgggatgacaggcatgagccaccaggcctggcctgatttgtacttttaatatggtagtgtctttttccctaaaagtgggtgtggtgaatatcggttgtttttctgcccaacacctccccctttttgaggggaacgtctcctctctctgctcaaaccatgggtttctagtggtgctctctaaagtaatattctggccaggcacggtggcttaagtctgtaatcccaacactttgggaggccgaggtggggagtttgcttgagctcaagagtttgagacgagcctggacaacacagtgggacctgagaaggcatctgtttactgccttctttttaagtggtggtggtgttcttgttgttttgagacagtttcactctgttgcccaggcttgagtgcagtgacgcgatctcggctcactgcaacctctgcctcccgggttcaagccattctcctgcctcagcctctttggtagctggtactataggcgtgtgccaccacacctggctaatttttgtatttttagtagagatgaggtttcaccatgttggccaggctgatctcgaactgacctcaggtgatccgcccaccttggcctcccaaagtgctgggattacagacatgagcctccgcgcccggccttgttggtttgagacaagtcttgctgtcacccaggctggagcgcagtgatgcaatcatagctcactgcagcctccacctcccagactcaagtgatcctctcacctcagactcccgagtagctgggactacatgtgcaccctcccacacccggctttttttgtctctacaaatatatctatatatatagatataaatatataaattagccaagtatggtggtgcatgcccgtggtcccagctactcaggaggctgaagtgcgaagatcatttgagcccaggaattcaaggctgcagtgagcggtgactgcaccactgcagtccagcctgggcaacagagtgagaccctgtctctaaaataaaataatatccagaacgctggccacagtgattggtcctgggtctgggatgaaagctgagccaatcagaattggaattagaagaaaggtgtctctgtccagcctggtggtggaattgggaagatgggagtctgagcattgctggggttcgtgacttaagcctctggaggaagctgtctgagaaggggaagtcagtgtggaggggtggagtgggaagcagagaggaagagagcccgaaggaagtctgggctttagggtctctgggtcctaaagccagctgctttaggtttggaaaccggctgcatctttgccttaccctggagtgttacctgccagtaagtccctcttttgtgcacactcctggttaaattgttagtacatcttatgatccatgaggttttttgtttgtttgtttgttttgttttgtttttgttttatttttgtttttttgggacatagtctcactctgttacccaggctggagtgcagtggtgcaatcatagctcactgcagctttgaactccagggctcaagcgatcctcccacctcagcctcccaggtagctgggattataggcatgagccaccatggccagccacatttgatcttctagtctatctcattccttctgctcactcatgacttctgcttctacacactgtctacttactgtccttttttggggtgttttttgtcttgttgttgttgttttgggacagggtcttgctctgtcacccagactggagtgcagtgacacaatcgcagctcactgcagcctccgcctcctgggctcaagtgatccgtccacttcagcctcctgagtagtagggactacaggcgcatgccactatgcctggcatttttgtatttttttttttttcatagagtcggggatcttgctgttgtccaggctggtctggaactcctggcctcaagcaatcctcctgccttggcctcctgaagtgctgggattacaggtgcaaaccactgcatccagtctggtatttctggattcaatctccactgccaaacactctccccatgagaaaggatatcactaattcaattgaccatggtttctctgacaccagggtacctaataggctgtggatcagtcagcagaccagctgttctttggtcaggcacttctctctggtccagtcagctgtggtcagcttttctcagaagggaacacagttgtggaggatccttgggatttaacagactctccatccactgtctcagtgcttctgggcctgtgtgtatagtcaggggagagagtgcggtcttagctcctcccagtgctgctatgcagggagtctctgctcaaccgaacctgcccaccaacaggcctctcttgtgtgtgtgtgtttttttttttaagaaaaataatgaatatcttctcccggagtctgtggacctggagtgtgtgaagtactgcgtggtgtatgataacaacagcagcaccctggagatactcttaaaagatgatgatgatgattcagactctgatggtgatggcaaaggtgggttttatgcaacagcagcaagaataatagttaacggctattgaacaaatttgttataggaccaacaggttcatatgcccatggcacgggaacaggccaatgacactgagacagcagggtttgcgtcagaaaaagagcttcatgatcactggataccgagcaaggagatgggaggaggccctcaaatacatttccccaaggagtttggaatggggtttttaaggggattggggagggtgagggactggaaagttggggtcattgattggttgaggaaagggggatgaaataatcaggacgtggaaactgcgttctttggtgagtcagctcctgtggggcccgtcagaccagctgatgtcagtggtttcatcagtacgcgggacctgaaagaatatctcaaagggaaaacagtgttccatgatgttcaagttgtcacctacagagcagttaaggggaactatattcttggccgggcgcggtggctcatgcctgtaatcccagcactttgggaggccgaggcgggcggatcacaaggtcaggagattgagaccatcttggctaacacggtgaaactccgtctctactaaatacacaaaaaattagccgggcatggtggcaggcgcctgtagtccctgctagctacttgggaggctgaggcaggagaatggcgtgaacccaggaggcagagcttgcagtgagcggagatcacgccactgcactccagcctgggcgacagagcgagactccttctcaaaaaaaaaaaaaaattcttgtaacagggtcttatgtgattctaggacaatacacatcaaacagctgtgagcaagcaggttggagagcaagcaaggtgacttagtgatgaatgctgaatgtgctgcaagcttgctttattttcatttgttcccctcccttctttgctgatttcacaaagtttatggggacagttccatgtgtgccatgcaccaggaaccaagggctttacttggatctgcagaacagcttacaaggacgctaactaacatcaagagctgtgaggaagccaggcccagtgactcatacctgtagtcccagcacttggggaggctgaggcaggaggatcacttgagcccaggagttcaagaccagcctgggtgatatggcaagataaggtacccagctcatttatttactttttgtaaagactgggtcttgctgtgttgcctgagacttaagcttttaaaagtgttgtggacatatttttaaaccaccacacctataagtggtggggccaggattcaaacccaggcctttttggctctgtcctgtcccccagggattgggtagtggcacgagagcatgcagccccaagtcagaacattaaagcgtggtcagttccaatgtgctccatcgaacctctgaggctctgctgtgttcttcattagcccctggttttgggctgaccaccctttgccattggcactgggagctctgcttctaggaatcagaactgcacctgtgggtgccgttccagaagctgggggcactcacaccaactgccacggggtggcgctatgctcccacctttcataaaaccagctgtctggacttttgtcccaggaggtccttggccaggaaattgtcccttcttccctaagctcatcctgttgggctctggtctgcaatcctaggactgtaggctaggccttgaaaccctaggagatggtactcaacatggataatcccctttacattctataactgaccttactttgctatggggcccccattcacaggaaaccacaaccacacaacttgtgcattcaaggcaacttttcttgtttcaaatggcatctttcaggtcaatgaaaagtctttgggggtacaagaccatctcaaggcttctctcaacacccccttctttctttttttttttttttttttgagtcagggtctcgctttgttgcccaggctggtctcgaactcttggcttcaagcaattctcttgcattggcctctcaaagtgcatggattacaggcatgagccaccatgcctggcctgaactctgacttctgagccaggccctgtggggtgagctttggctcctgtcttgagagctgcagattctctctcagcctggctgcagattccagattcttcctgtcaatgccatctctcagataggtcccagccacttatatcctccacagccccttctggaagtgtctttgtctccctgaacaaaaattcaatatggaagcagagttagccaggcacggtgcctcacactcgtaatcccagcactttgtgaggctgaggcaggagggttgcttgaagccaggagtttgagaccaccctgggcaacatagcaaggccccgtctctaccaaaaatacaaaaaaaaaaatttagccaggcatggtggtgcatgcctgtagcaccagctactcaggaggctgaggcaggaggatcacttgagcccaggtggtcaaggctgcagtgagctatgactgtaccactgtattctagcctggctgacagcgtaagaccctgtctctaaaaaaaacgtatttaaaaaaaaaaaaaaaagaaaaaaacagttagagttcatgctgttttctttctccttttatctggctctctgaagtctgccacacactatttctctttctgggccagaacctggcctcaggatatcttggtttaaggatgtcttggcttagccttaattatgcaaacttcctgtcacatatatctaatttacatgcagtctgattgtgattctgcagatcaatgaaggtgtttaagattaaattgatgtcaaaaccacattgagatattattcacgcccactgggatggtaataatcaaagagacagatgataataagtgttggtgagaacatggagaaattggaagcctcatacactgcgaaccagaaagtaaaatggtgcagtcactggaaaacagtgtggtgtttctttagaaggttaagatatagaccccaaagtaatgaaaacacatccacaccaaagcttttacatgaatgttcatagcagtgttattcataatagccaaaaagcacgaacaacctaagtgtctatcagcagctaaacaggtagaacagaatgtggtctgtccacacaatggaatattactcagccataaaaaggaatggggctgggcgctgtggctaataatgcctgtaatcccagcactttggaaggccaaggcgggaggatcacctgaggtcaggagttcaagaccagcctggccaatgtggtgaaaccccatctctattaaaaatacaaaaattagctgggcgtggtggcatgtgcctgtaatcccagctactagggaggctgaggtaggagaatcacttgaacctgggaggcagaggttgcagtgagccgagtttgtgctattgtactctagcctggacaacagagtgaaactcggtctcaaaaaaaaaaaaataaaagtactgacatgtgctataatgtagatgaacactaaagagatcatggtaagtgatagaagttagatgcaaaacatcacatattattccatttatatgaaaagtccagaataggcaaatccatagaaatgagtggttaagtggagctgggagtttggggaaaaacgggtgtggctgattagtggtacagggtcccttgtaggggtgatgaaaatgttctaaaattaggccgggcactgtcgctcacacctgtagtcccagcactttgaggggctgaggtgggaggattgcttgagcccaggagtcgagaccagtctgggcaacatagtgagactctgtctcaaataaatactaaaaatagaagaaaacattctaaaattgattgtgggggatggttgcataactctgaatatactaaaagtcactgaattgtatattgaacccatcacccaggtagtgagcatagaacccaataggtagtaggtagtttttcttttttcttctgtcttgcctttttttttttttttgagatggagttttgctcttgttgcccaggttggagtgcaatggtgtgatcttggctcactgcagtctctgcttcccctcagcttcccaagtagctgggaatacaggtgcgcaccaccccacccggctatttttttgtattttcagtacagacagggtttcgccatcttggccaggctggtctcaaactcctggcctcagatgatgcacccgccttggcctcccaaagtattgggattacaggtgtgagccatcgcgcctggccccagtaggtagtttttcaacccctgtccctctctctctgtcctcctcgtattcttcagggtgtgttgttccgcatctttatttctatatgcttctgatgtttagcttgcacttataaatgagaacatgtggtatctggttttctatatctgtgttagttcgtttaggatgatggcctccagctccatccatggtgctgcagaggacatgattttgttctttttttatagctgtgtagtattctgtggtatatgttaaccacatttaaaaaatccaatctggggccgggcacggtggctcatgcctgtaatcctagcactttggggggccaaggcgggtggatcacttgaggtcagcagtttgagaccagcctggctaacatagtgaaaccccgtctctactaaaaatacaaaaattagctgggcatggtggtgcatgcctgtaatcctagctactcgagaggctgaggcaggagaattgattgaacccagggaggtggaggttgcagtgcgccgagatcgtgccattgcactccagcctgggcgacaagagcgagactccatctaaaaaaaaattaaataaataaataaataaatacaatccgttgttgatgggcccttgagttgattctatgtctttgctgttgtcagtagtgctgcagtgaacatatgggtgcaggtatccttttggtgtaacaatatattttcttttggatgtgtacatagtaatgggattgctgggttgaatggtagttctatttttggttccttgacaaatctcaaactcctttccacaggggctgaactactttacattcccaccaacagtatgtaagtgttccttttctccatagccctgtcaacatctattattttttggctttctaataaaagccattctgactgatgtgagaaggttatctcattgtggttttgatttgcatttctctgatgattagtgatgtcaagcattttttcacgttcgttggctgcttgtatgtcttttgaaaagtgtctgtttatgtcctttgcccactttttaatagagttgtgtattagagttctctagagggacagaactaataggagatatatatatgtgtgtgtgtttttatatatatacgtgtatatatatgcgtatatatgtatatatgtgtatatatgcgtatatatgtatatatgtgtatacgtatagatatacgtatatatacacacatacgtatatacgctatatatgtgcacacatacgtatagatatacgtgtatatatacacacatatgtatagatatacgtgtatatatacacatgtatgtatagatatacatatatacacacatacatatagatatacgtatatctatacacacataattatatatatgtatccctatacatgtacatatgtatagatatacatatatctataaatgtacatatgtatatacttatatctatacatgtacatatgtatagatatatgtgtgtgtatatatatgcgtgtatatgtagatacatgtgtatctatatatatgggagtttgttaaggagtattaactcgtgtgatcacaaggtcccacaataggctgtctgcaagctgaggagcaaggaagccagtgtgagtcccaaagctgaagaacttggagtccaatgtttgaggacaggaagcatccagcaagggagaaagatgtaggctgggaggctaggccagtctagtgttttcatgtatttctggttgctttatgttgtagctgtactggcagctgattagatggtgcccactcagattgagggtgggtctgcctctcccagtccactgactcaaatgttaatctcctttggcaacaccctcacagacacgcccaggatcagtactttgcatccttcaacccaatcaagttgacactcagtattaaccatcagaggttgtttggtttttgcttcttgatttcagttccttatagattttggatattggatctttgttggatgcatagcttgtggatactttctcccattctgcaggctgtttgtttactctggtagtttttcttgctgtgcagaagcactttcgtgtccttaggtcccacttgtcaatttttgttttgttgcaattgctttggaggacttagccaaaaattatttgccaaggccaatgtcaagaagggtattccctagattttcttctaggatttctatagttttcaggtgttacatttaagtctttaatctatcttgagttgatttttgtatatggtgataggggtccagtttcattcttctgcatatggatagccagttatcttagtaccatttattgaccaataagtgggagtcctttcccctttcctgttctttgagacaaggtcttgttctgtctccaaggctgtagtgcagtggcacgaccattgctcactacagcctcaacctccctggctcaggtgatcctcctgcctcagcctctctagtagctggaactgcaggtgcccgccaccacactcaactaattttttgaattttatttgtggaggcggggtctttccatgttgcctaggttggtctcaaactcctgggctcaggcaattctcctgcctctgcctcccaaggttctgggattatagatgtaaaccaccatccccagcctccattgcttatttttgtcaactttgttgaagatcagatggttataggtgtgtggctttatttctgggttatctattttgttccattggtctatatgttttgaattgcacactttaaatgggtgaattgtgtgatacacaacatacagttgacatatatatgtggtataaatataatatatacatgtatataatatgtaaaccatatgtatgcatatgagtggttaacgagctggcagtttctgtaaactctgagatatatgtattgtatgacatcatacaatacatatatctcagagtttgcagaaaagaagattaacttaggctgagcacacctgtaatctcagcactctgggaggctgaggcaggtagattgcttgagctcaggagttcaagacaagcctgggcaaaaaagtgagacactgtctctacaaaacaatacaaaatttagccaggtgtggtggtgcgcacctatagtcccagctactcgggaggctgaggtgggaggatggtgtgagcccaggagctggaggttgcagtgagccgagattgtaccactgcactccagccagatggagtgaagcccagtctcaaaaacaaaaacaaaaaaaacccggtggtaagctacttttaaaattttaatatgatgcatctctatacttgcttcagcttcctaaataattgcatttcaagccgggcatggtggctcacgcctgtaatctcagcactttgggaggccgaggctgaaggatcacctgagctgaggagttcaaaaccaggctggcaaacatggtgaaaccctgtctatactaaaaataaaaaattagccaggcatggtgggcgcctgtagtcccagctacttgggaggctgaggcaggagaatcgcttgaacccaggaggcagaggttgcagtgagccgagatcgcaccactgcactccagcctgggcgacagagtgagactctgtctcagaaaataaataaaataattgcatttcagaagaaagtggtcatctatcccagctctagaccaatggcagatacacaggagacattcatgtctttggtctccactctcagatcttgtgcctcaagcagccattgagtatggcaggatcctgacccgcctcacccaccaccccgtctacatcctgaaagggggctatgagcgcttctcaggcacgtaccactttctccggacccagaagatcatctggatgcctcaggtagggccaaatgctgagcacaggcaggcccagacgggaaggatgggcctagaaactgacttgtgggtgactgagtgggagaaacaggaggatgggacagaggatatagagaaagtggaggagattctgtctatactaaaaacacaaaaattagctgggcgtggtggtgcgtgcccatagtcgtagctactagggaagctgaggcagaagaattgcttgaacccaggaggcagaggttgcagtgagccaagatcatgccactgtactccagcctggatgacagagtaagactgtctcaaacaaaaacaaaaacaaaaacaaacaaaaaaaaaactagatctggactcctggcagccctaagttcatgtctgcagcccagtctcccccatctcctccacttttttttttttttttttgagacggagtctcgctctgtcgcccaggctggagtgcagtggtgccatcttggctcactgcaagctctgcctcccaggttcacgccattctcctgcctcggcctcccaagtaggtgggactacaggcgcccaccagcacgcccggctaattttttgtatttttagtagagacagggtttcaccctgttagccaggatggtctcgatctcctgacctcaagtgatccacctgcctcggctttccaaagtgctgggatcacaggcgtgagccatcctgcccggccacagttctttataaggaactgatggctgtcgggttgaaacagtgagcaaaggtggacccattcagagggcaggctggatggtggaccgataccaaggtcagaaaggcaggggcatggcggctcgagaccacctcttttttcttggctgtctgattccacaaatcctagctggatccagaggatacaaaaatacacaaaagtgggaaggattggtcaggcacggtggctcacgcctataagcctagcacttggggaggccaaggcaggaggattgctttagctcagtactttgagaccggcctgagcaatatagtgagaccttgtctctacaaaaaaatcaataaatggagctggctgtggtggctcacgcctataatcccagcacttttggaggccaagctggatggatcacttgagctcaggagtttgagcccagcctaagcaacatggcaaaaccctgactaccaaaaatacagaaattcaccgggcatagtggcccacctgtcttgtagtcccagttactcaggagggtgaggcaggagaattacttgaacccaggaggaggaggttgcagggagccgagatcacaccactgcactccagcctgtgtgacagagtgagaccctggctcaaaaaaataatttagaaaagagatgggtggattgcttgagcccaggaggtcgaggctgcagtgagccgttgccatgccactgtactccagcctggttgacgaagcaagaccctgtctccaaaaaaaacaaaaagaaaatcagccaggtgtggcgactcacacctgtagttttagcactctgggaggccaaggcaggaggattgcttgatctcaggagttcaagaccagcctgggcagtatagtgagacccccatctctattataattcttttttagtagagacagggtttcaccatgttggtcaggctggtctccagctcctgacctcaagtgatccacctgcctcagcctcccaaagtgctgggattagaggcgtgagccactgcactcagcctattttttaatacaaaaagagaatcagatattaaacccctttgtccatcacctagctccaaacattgtcaactcatggtcagttttgtcaaaacaaaacaattttgagattccagtttctgctgatgactggtcctgtctgtaggggaggcagtggctggaagctggactgtgtcaagggacgccccgggtatctggagcccagagaaggggcacttgagcttcccagagccaaatctgacggaggaggagatttcgaggaagagaactgggtggagttgtctaaggctagcaccagactatgcagagatttgcaggcagggcctggtccctggagagtgccgtgtacagatgtctggcttattgaagcgtctgaacacaatggaatgtaaacagaaagtggttttaactttttctaacagttgccttcagctgtgttccccttcctgcccttagcaacatcgtgagcagattccatactttctggccacttttggttacaaaaaacttcaatcgaaatcatagtatagaatgactgggcaaatgtgactattcacaggatgtttgactgtgtttaggaattgttgcttttcgaaggttgtagtgacattgttatggttattataaagtacaagtccttatcttttagaaatacagaacaaaatatttacgggtgaaatgacgtgatgtctggaatttcctttcaaataatctggggtgaggtgagaaggcagtgagggtatagaggaaacaaaattggccaatgagttgttaatgtttgaagttgggcgatatatacgttttagagacagggtctcactctgttgcccaggctggagtgcagtggtgcaatcatagctcactgcagcctccacctcctgggcttggtatcctccagcctcagcctcttgagtaggtgggactacagatgcatgccaccacagtcagctaagttttaaaattttttgcagatacagggtcttgctatgttccccaggctggtccaaaactcctgaccttaagcaatcctcctgccttggcctctcaaagtactggaattataggcatgaaccaccacacctggccaactagtgtatagttttgaaataatgttaaaggaagtaaaaagacagtctagtagaagctagggcggtttaatgttccaacctcaaatctgaatcaagtctcatctcttcccatgccctagagctgggcagcctagggtttgctgggggcactcaaagtagggagggatgggggttagctttaaggacagctgctctcttcccctcttctgggcagagtacctttggcagtagggcccagagtggacctgtctgtgtgcctggctgcgtgttagtggtgggaaagtgcctgctctctggccccgtctggctgtgtgagctgctggtagcctctgctgctgggtttctcgggacccagctcagcctcaccctggctccttctggggctgaggatctcccagagaacgcagccagtggtgactcccttcaacccctgccaggcatctcctccaacttcctccccttaacttggaagcccatgacccgtcccctgccccgcatgcccacattccttcaccggaatcgtagaaggcagggactcatgcctgaggtcagacatgttcccagatccagggtatgcatgcctggctcccaaagacatccctttcttccactgagataacagcactgtgaatttcagctcaacaggtgtacagtcagttaaataaaggaagtaaagacaatcagtctagtataagccagggcagtttaatgttccagcctcaaatctgaatcaagtcttatcttgattggaactcctccttgctcctccttgctcttggaggagcaccctggctttgcagggtgcagagagattaatttcttctctgcaaaccctacgctgctgataactcatcactgccacctcctcatttctgaagctttagtaaggtgtaattgacatgatgaactgcacatatttaaaaggcccggtatggtccgttttgacagttgcatattcctgaaacttgcctttgctcctagtctagtcacattgggaagaaggcgcagggttgtggctagggtagctgtgagggttggattgggttacttgtttgcagctgtctttagaatgtaggtgactggccagctgtggtggcttaagcttggaatcctagcactttgggaggtcaaagaggaggtggaaggatcacttgagtccaggagtttgagactagcctgggcaacatagtaagaccttgtttacacaaaaatttttttaaaaggctgggcttggaggctcacgcctgtaatcccagcattttgggaggccaaggcgggcggatcacgaggtcaagagatcaagaccattctggccaacatggtgaaaccccatctctactaaaaatacaaaaattagctgggtgtggtggcacatgcctgtaatcccagttactcaggaggctgaggcaggaaaatcaattgaacccgggaggcggaggttgcagtgagctgagtcacaccactgcactccagcctgggtgacagagtgagactccatctcaaaaaagaaaaaagaagaaagaaagatttaggaggtagcaccgatcagacatgagggcataggagagagagggggctgggatgatgccctggttttaggcgtgggtgacgggggctgtgatgtggttcattctggggaacactcgggagggggcggggtgggggaagaaggaggtggttttgggggaaggcagtgtgcccagttcgggcatattcatttgagatactggtttcgtttgcattgtgtcactgagcatttacacacattctacagtacagtgtgtttttatccacatcacaccctcttcccagccaaacccacacaaccgcagaaaaggaagctggtttaaaaacagcaggaagaggggttgatagatttgctatgggatttttgtggggttttttttgttttgttttgttttggtttttttttgagatagcatctctgttgcccaggctggagtacagtggtacaatctgggcttactgcaacctccacctcctgggttcaagtgattctcctgcctcagcctccagagtagctgagattacaggcgtgtgccaccacgcctaatttttatatttttagtagagatggggtttcactatgttggccaggctggtcttgaactcctgacctcaggtgatccacctgcctcagcttcccaaagtgctgggattacaagcatcagccaccatgcctggccttttagcgagatttttaagtggaaattgaaagggggatttcatttggcaccagcaagctgagcgtccatccgggttaggggcagcccacatgctggagtaaattgggcctgcccgcaggcagtggggggtcatgcatctccgtgtcacaggctggagaactggctcagcttggtgtctgttctttactaatggctttcgaagctggtagcttgggaaggatgtgggcttgcagagggttcactgccgtggggaagggagtgagatgtgctgagttcaggtggctctgaaggacccacacgcctgaggtccttaaaatgttatttctgagtcagacttagagccaggggacttttggaactgattttgatctttggcaaaggtcagcattttctgtggtgtaataatggagaaagtggtctctaatcagagcctcatggaaacatcaagttatccagttggagtggatttctctactgcagagcttctttgagatttttttttttttttttttttttttttttttgagatggagttttgctcttgttgcccgggctggagtgcaatggcacaatcttggctcactgcaggctccacctcctgggttcaagtgattctcctgccccagcctcccgagtagctgggattacaggcgtgcactgtcacacctggctaatttttgtatttttagtagagacagggtttcaccatgttggtcaggctggtctcaaactcctgacctcaagtgatccacccacctcagcctcccaaagtgctgggattataagcatgaggcactgtgcccggctatttttttttttttttttttgagagacaggctggagtgcagtgatgcggtcataactctctgtaacctcaaactcctgtgggatcctcccacttcagcctcctgagtagccgggagtacagccatgtgccaccatgcctggcgaattttttattttttgtagagacaagggtcttgctgtgttacccaggctggtcttgaactcctgggttcaagcgatcctcccaccttggcctcccaaagtgctgatatcacaggcatgagcagccactgtgcccaacttctttgaacctttgattgctaatgtacgtgttgtttccgagagaggaatcatagatacagctgtccgtttgtacagttgtccagtatccatggaggttggttccagggcccccaatagataccaaatccttggatcttcaactccctgatacaagatggtgtagtatttgcgtctaacctaagcgtatcgtctcgtatactttatttatttgagacagagtctcactctgttgccaggctggggtgcagtggcatgatctcatctcactgcaacctccacgtcccaggatcaagtgattctcctgcctcagcctcccgagtagctgggactacaggcatgcaccatcatgcctggctaatttttgtgtttttcgtggagatggggtttcactcgttggccaggttggtctcaagctcctcacctcaggtgatgcgcctgcctcggcctcccaaagtgatggggttacagatgtgagccacctcacctggcccctcttgtgtatactttaaatcatctctagattatttataatacctaatacaatgtacatgctatgtaaataattgttatactgtatcgtttagggaataatgacaagaaaaaaagtctgtacatgttctgtacagatgcaaccatgaattatttttctggatatttttcatccaaggttgcttgaatatatggatgtggaacacacagattgcatttggttatctgaacccctgaacccttttctcatagtgccttatgggggactagtgtttcttagaacacactttgggaaatgtagagataatccttgtctgtgtttcaaataaacgaaagttttttgttgttgttgttgttgttttgtttttttttttttttttttgagacggagtctcattctgtcgcccaggctggagtgcagtggcacaatctcagctcactgcaagctccgcctcccaggttcatgccattctcctgcctcagcctcccaagtagctgggattacaggtgcccgccaccatgcccggctaattttttgtattttttagaagagacgaggtttcaccgtgttagccaggatggtctcgatctcctgacctcgtgatccgcccacctcagcctcccaaagtgctgggattacaggcttgagccactgcgcccggcaaacgaaagttttaatgataactttggacctggaactcaggaagctcccatttaagtaggtgtcttgttctctctacccctctgcacatacactggcttcatttctgggcatgcagggtggctcacatgtgtatcccaacactttgggaggctgaggcaggaggatcactacaggccaggagttcgaggacagcttgggcaacatagtgagaccccatctctacaaaagataaaagtatcaaaattagctgagtatggtcatgcgcacctgtagtcccagctacctgggaggctgaggtaggagaagcatttgagcccaggaagataagactgcagcgagctatgattgagccacttgcactccagcctgggtgacagagtgagagaccctgtatctttaaaaaaagaaaagaaaagaaaaagatgggttgagcacagtggctcacgcctgtaatcctagcactttgggcagccgaggcaggtggattacttgaggtcaggagttcaagaccagcctggccaacatgatgaaacctcctctctcctcctccacctcctccctcctcctcctcctcctcctctctcctcctcctcctcctctctcctcctctctcttcctcctctctcctcctctctcttcctcctcctctctcttcctcctcctcctccttctctctctctctcgatgcttaaattctggtggtcttaagagagctgtccctctccatcctcctgagcccccagtacatgctgggttgttacagttctgggccacagcgtcctcactgcaacctttgtgcacctggccaagtgtaaacagttgccacggagggaatggacaccagtgctgagacccagcgctctgcacgatgaggctcagtcctttcgtcatgactcgccctgtgccaccccatgcaagttaccgtgtgccaatctctttcaaagtctggatctccgtcacattcactgtcctggaactgcccttttacgctcgtttgctgagctgtgtttcaagagatagacatccctcttccctgaggaatatgctcatagctgcctttctccctccacacttcaggaactggatgcatttcagccataccccattgaaatcgtgccagggaaggtcttcgttggcaatttcagtcaagcctgtgaccccaagattcagaaggacttgaaaatcaaagcccatgtcaatgtctccatggatacagggcccttgtaagtaaagagaaactactgatttatatttcattttattttttatataatatttaaatttattttatttattttttttaattttattattattacactttacgttttagggtacatgtgcacaatgggcaggtttgttacatatgtatacatgtgccatgttggtgtgctgcacccattaactcgtcatttagcattaggtatatctcctaatgctatcccttccctttagtttttattttattattattattttttgagacggagtctcactctgtcacccagactggagtgcagtggcacaatctcggctcactgcaagctccgcctcctgggttcacgccattctcctgcctcagcctccccagtagctgggactacaggcgcccgccaccacgcccagctagttttttgtatttttagtagagatggggtttcaccgtgttagccaggatggtctcgatcacctgaccttgtgatcatcccgccttggcctcccaaagtgctgggattacaggcatgagccaccgcgcctggcctattttattattttttgagatggggtcttgctctgtcacccaggctggagtgcagtggcacaatcttggctcactgcaacctccgcctccagggttaagtgattctcctgcctcagcctccccagtagctgggactaaaggtgtgtgccatcatacccggctaatttttgtagtttttagtagagacagggtttcaaaatgttgcctgggctggtctcgaactcctgacctcaagtgatctgcctgccttggcctcccaaagtgctgggtttacaggtgtgagccaccatgcttggccaagataggtacttaaaaaaatttttttggctgggtgtggtggctcacacctgtaatcccagcactttgagaggccaaggcgggtacataagctgaggttgggagtttgatgaccagcctggccaaaatggtgaaaccccatctctactaaaaatataaacattagccggttgtggtggcacatgcctgtaatcccagctacttgggaggctgaagcaggagaatcgcttgaacctgggaggtagaggttgcagtgagccgagatcgtgccactgcactccagcctgggcaacagagcgggaatctgtctcaaacaaacaaaaaaaaagacaagggtctcgctatgtgatcctcccatctctgtttcccaaattactgggcttattcatgagccaccacacccagcctggatgtttttttccaggagaggttgagttacctgtgcacattcccccttacacaagctcagcgtcctccctgtggcccttctgctgtgatgaaaaccccacaatggggatgcctgcattctgcattccacctgatgacctgtgtggtccttccgtgtagttttgcaggcgatgctgacaagcttctgcacatccggatagaagattccccggaagcccagattcttcccttcttacgccacatgtgtcacttcattggtaaggagcgttccttggccgggtagcaactggcctgtgtctgggaagcagaggggcagtggagcctccttcacaggcttattctggaccgtgatttccccatgctctagagagaaagggcccagctcggcatatgctccatctgggtgggacaagctccaggacacgtccaacttctggggagccctcagtgaaacgagcaaccgtggtgtttacctcgggggcagtggggcccaaggctctggccctggctagatggctgtgcccttctgggcttgttgtaaaatgagagtgatggctacccacaagtgcacatgctcatggaggctctgggctgagctctggggaccagtagtaaatctatctctctccatccccgccttcatccttggtctgtgggatgtcggtggaatggaaggaagactacaaagctctttcagttctgacttccaagattttctttgtttttgtttgttggttggttggtggagttggggtcttgctatgttgcctaggcaggtcttgaactcctggcctcaagcgatcttcctacctcagcctctcaaggtgctgggattataggcatgagccaccacacccaagtgatgcccaccagttacttaactcatcaagagtggattttttactcattcctggggctccagattgccagaggagagtaagatctgtagagagagcagggctgagtcaggtcagagtccccaccccatgcctgcctgtctggcaccaacagctcctggcctgagccactgtaccaggggctggagcatggcattttggcccaaccatcccttattttaaattttatttttcgagacggggtctggcttgttcacccaggctggagtgtagtggcacaatcttggctcactgcaatctctacttcctgggctcaagcaatcctcctacctcagcctcccaagtagctgggactacaggcatgcaccaccacgtccaactaatttttgcatttttagtaaagatggggttttgccatgttgcccaaactggtcttgaactcctgagctcaagcaatccacccacctcagcctcccaaagtactgggattacaggcgtgagccaccacacccagccccaaccatcctttatttgcccagtagatgtcaaatgttgctcaaccagggcctgaggctgagacttcccatgtgtcccacctcgagatggcagagccttgtggcccaaggagggaccccatctagcctgcctccctgggtagcactgagccagtcaataaattaaactgcatgctcagttcctttattcagatggtgaggaaggtggccatcgtcatctctgcgtccttcttcagccctggcagtctgtgattttgcacttggtaggcttatcttcagttcctgagggttgccagaccagcctcgggtgccagcttagatttcctctccctgggcaggactcacagcttcaggggtgctgtgattagagctgatatttctgtgccaggcactgggctcagcacagaacaaaaccaaactgtatgaagtaggtagtatactgtgatcccgttttccagatgaggacaccgtggcctcaagtaacttaccctccagcccgggcaacattgtgagaccccatctgtacaaaaaagttagctggatatggtggcacatgcctgtggtcccagctactcagaaggctaaggcggagggttacttgagcccaggagttcaaggttgcagtgagctgtgattacaccactgcgttccagcctgggcaacagagcaagacccagtctctaaaataaaataaataaaaataggctgggcacagtggttcttacctgtcattccagtactttgagaagccaaggtgggcagatcacccgaggtcaggagttcaagaccagcctgaacaacatagtgagactgcatgtctatattgaaaaaaaaaaaaaaaaaaaaaaaatcaggcgcagtggctcatgcctataatcccagcactttgggaggccaaggcaggcagatcacctgaggtctggagttggagaccagcctggccaacatggtgaaaccccatctctattaaaaatacaaaaaattagctgggcgtggtggcaggtgcttgtaatcccaggtactcgggaggttaagccaggagaatcacttgaacccaggaggcagaggttgcagtgaactgagattgtgccactgcactccagcctgggcaacaagagtgaaactctgtctcaacaaagaaagaaggaaaggagagagaggagtagagaggagaagaaaggggaaagaagagaggagatgggggaaggaaaggaaaggaagtaacttgcccaagccccacggccagtgagtggcagtcaggattggcactcaggctacactggctctgtcagctcctgactgtttttgggatgacgatggtcctgtccgccccatactgggaggccagttggtagcagagcttcctgggctagaaacctggagttcaggagaaggtctttgcctggtgatgctggttgcccaggcatgattctctggaacttccagccaggtctgagggatgcccacttgctagacaatgaaatgggctcccagagaaatcatgggacttgccgaggtcacgtgggctggttttgaactcatgcttggaccacgggcccatggaggccagtgtctgacagcaacccaggcccacagggaggagggccaggcatgacccaaccccccacttctttttgcagaaattcaccatcaccttggctctgtcattctgatcttttccacccaaggtatcagccgcagttgtgccgccatcatagcctacctcatgcatagtaacgagcagaccttgcaggtatgcgttccccgggccaggctcgcaccacggccaccccctgggaggtgaggtcagagcgcaacctgggaggagtggggccccagcactgctttgggaggaagaatcccagataactccaagtctagggtgctccccagtccgcgtcacccaagggcaaggccccagtgttgcatgcttgaggcctgaggctggatatgcagggctggcccagggactcaggccaggtcaggctgtcctgcagcccccactgctgtcaggccgtccacctgtgtttgtttggtgttgcccaagggagaactgcttggagtcccagagctgcagcacaggcgcccacccactcccgtctatctccctgtaccttgggcgcagggtccagagaagagagggaagcagggacccatcgcagcaaacccaggcggaactcggagctcctaactcacagcacctttctcgagggcctgccctgcctgtcacagcctgttcgtgatccccagagggcttgataggacctacaaagccccaacatttgcccagggatgtttttgggggaaggagagggacaaagaataaaactcgttggccagtggcttcggttgttgcccccatgtgcactttgggggtgaagttgtaggctagaaagtcctttttttttttttttttttttttttgagatggagtcttgttctgttgcccaggctggagtgcagtggtgcaatctccacctcctgggttcaagcgattcttgaacctccactgcaccctctgcctcctgggttcaagcgattctcctgtctctgcctcccgcgtagctgggattacaggtccgtgtcaccatgcccggctaatttttgtatttttagtagagacagggtttcaccatcttggccaggcgatgtgtggggtggtggtgggggatgggtggtttacgattcttcctccagggcctgttctgacccagcgaggacatagtaagccttttgactgcacagctctgcccctcacaccactttaaaaaaaattgtggttaaaatatacataacaggccgggcgcggtggctcacgcctgtaatcccagcattgtgggaggccgaggcgggcagatcacctgaggtcaggagttcaagaccagcctggccaacatagtgaaaccccctctactaaaaatacaaaaattagctgggcgtggtggtgcgtgcctgtaatcccagctactctggaggctgaggcaggagaatcgctagaagctgggaggcagaggcagcagtgagctgagattgcaccattgtactccagcctgggtgacaagagcgaaactctgtctcaaaaaaaaatatacacacacacacacacacacacacacacacacacacacacatacacacacacacacacacaacaaaaaaattaccatcttaactattttaaaatgtatagcttaggagcattaagtacattcacattattgtacaactaatctcccaaacttttccatcttgcaaacctgaaacagcaactctttactttcccctcttcatcgccccgtgggaaccaccattctactttttgtctctgtgaatttgactactctaggtaccttatataagttccttccttttaaggctgaataatattccattatatgtgtggaattcaccaataaacccatctaggctgggtgctttctgttttggaaggttactaattattgattcaatttattattgttattttatttatttatttttttttgagacggagtctcgctctgtcacccaggctggagtacagtagcacaatctcgactcactgcaagctctgcctcccgggctcatgccattcttctgcctcagcctcccgagtaactgggactacaggcatctgccaccactcaatttctttaatatatgtaggcctattcagattgtctgtttcttcttgtgtgagttttggcagtctgtgtctttcaaggaattgatcaatcacatttgtggatatgaatattcttctattatccttttaatgtctgtgggatctgtagcaatgtcttctctttcacttctgtattagtaatttgtgtcttctgtttaagttagcctggctagcggtgtatcgattttattgatcttttcaaagaaccggcttttggtttttttgattttctctattgatttcctgttttcaatttcattctttgcatggcgtatctagttttcctagcaccatttgttgaaatgactgtccttttcccccatcgaatggtcttggcatactatcaaaaattccttgacaggcccggtgcagtggctcacacctgtaatcccagcaggttgggaggcagaggtgggcagatcacctgaggtcaggagtttgagaccagcctggctgacatggcaaaacctcgtctctgctaaaaatacaaaaatgagccaggcgtggtggcacatgcctgtaatcccagttacttgggaggctgaggcacaaggatcacttgaacccaggaggcggaggttgcagtaagctgagattgcacaattgcactccagcctgggcaacagagtgagactcagtctcaaaaaaaaaaaaaattgcttgaccatataggtaagggtttatttctaggctaggctggctattctattccactagtctctttgtcttcatgtccataccatactgttttgattactgtagttttgttagactaaggtttgaaatcaggaagtgtgagacctacaactttgttcttcttaaatattttttatggggtcctttgagattccatatgaattttaggatggatttttctatttctacaaaaaatgttgttgggattttgatagggattgccttaaacctgtggattactttgagttgtattggcatcttaataatattaagctttccaacccatgaacacaggatgtcttttcatttgtttgtacctttaatttctttcagcactgttttggagttttcagtgtacaagtcttttgcctccttggttaaatattttattctttttgatgctactgtaaatggaattgttttcttaatttcctttttgaattgtttagtatatagacatgcaactaatttttgcatgttggttttgtatcctgcatccttgctgaatttattagctgtgtgtgtgtgttgtgtgtgtgtgtaatctttagggttttctacatatgaaatcatgtcatcttcaaaccagaggtaaggttacttcttcctatccattgtagatgccttttatttctttttcttgcctcattgttctggctaggacttctaggactatgttgaacagaagtgatgaaagcaagcacccttgccttgttcccgatcttagaggaaaaactttatctttcgccattgagtgtgatgttagctgtgggcttctcatatatggcctttatcaggttgacatcacttccttccttttttgtttttgagacagagtcttgctctgtcacccaggctggagtgcagtggtgcaatctcggctcactgcaacctccgcctcccaggttcaagcaattttcctgcctcagccacccaagtagctgggattacaggcatgtgccaccatacttggctaatttttgcatttttttagtagagacagggtttcgccacattggccaggctagtctcgaactcctgacctcaggtgatccacccgtctcggccccccaaagtgccaggattacaggcatgagccactgtgcctggccatttccttctgttcctagttttaggcaccactcttgcctttccctttttcgtttgtcctcaatccagatggagaccaggtgctcaccctccttcatgcagcaacacttcctgtactttaaggtggatgcctgaaggagggcagcttgaattttcttcttcagagaatttgcccacagttctcttcctctttccattaatttgtccagtcacaatgcaaacctttgttgagactgcactaggcttggcatagtgtttgccatccacaggtggtttcatgtatattgtcttaatcttcccagaagctgtttgaaataggaattatttctgtcaccagatttagaagcagaggggcttgcccaaggcagagtcagctcccatgactcccagcactgatgcattcatgccaggctgccctgtttctgcatccagcccttaagccgtgttgctggcactgtgcaagtgcctcctgtctctgaaagctgcctctgatccaagtggaaagggcccaggaccaatcgtgaagttcactttctctctttgtattcatagaggtcctgggcctatgtcaagaagtgcaaaaacaacatgtgtccaaatcggggattggtgagccagctgctggaatgggagaagactatccttggagattccatcacaaacatcatggatccgctctactgatcttctccgaggcccaccgaagggtactgaagagcctcacctgggggcattttgtgggtggagggccagagtgtgtatacccaggcttgtctggaaggagaaggcctttgctgcctgaaagtctcatgttagcctcctgtactgattcttcccaagtgcctgttcacgccacctagctgatgcgccctgctcaggttcaccaagaacccgcatccctgaggtgtcgcgggccatcccaactgcacccctgaggctgcctctggaagagcatctggctgctagagcagctgccctgcatccccctggtgacttagaccctttggaggctgcctgggggtacccagaggttgcctgtgttggttcacagaggatgtcacaatagccaccaataggcagtcccctagtcccagagataccaagcccagccttgtctagcccccaggctcctagaatgggatcacacccttgcctcatccccagcgcttcctgccatccaccccttgaaacagattttctttccctgctccccactcatttctgcctggctgtgttcaccaaggagagattctcaccccctcccccatctccctatccacgtttctagaaattcctaaggtcttaaaagttttccttttttttaccccctttccttttttttggaggcacggtcttgctgtgtctctcaggctggagtgcagtggcgcaatcatggctcactgcagcctcaacttccctgggctcaagcgatcctcccacctcaacctcctgagtgagtagctgggaatgcaggcatgcaccatcacacctggctaatttatttttatttttgtagaaacagggtcttgctctgttgcctaggctggtctcgaacttctgggctcaagtgatcctccagcctcggcctccccaaaatgctgggattacaggtgtgggccacggcacccagttggaagttgttttccaaatgcacttctccaaagctggcagcacccacagaacaaactgggcatcaggagacggcacagactaggggactggtaggggattaggatgtccatccatgcaggaccttccccaagtccattcggcaaccattccctgccaccgcgtgggtggggctgggaacagagagatgaatgccgtcccaccacttagcgcgctctgtggagggatgggggtgggagggggtgggggattcccctcaacagaagggcaggccttcaaggaggagtggggttttgccagagggggaacggctttacacacagccctggctttcctcagggtgtgagttgggacagagcccgggatggctgcagagctccgattagggacctcctggtaggcaggacacagccgctggaaagttttaagcatgaacatgatggggaatcagccttgtgttttgggaagggcagtccggtggccgcgagaagggacagtggaggtgaggcagggagaaaggaggccgctgtaaaaatccaagcgagagaagcagctctaactcccttccccaaagaggctcagcttcccaaggacgaaaatgttgcaagcaggtgtcacctccctgcaccttggtttgctctcagcatgacgggccagagccctgctggctgcaccacgcggctggcacagtcagtgcagtccaggcccgggggctgcagccgtcccagtcccggtccaggccgcgagtcccggggctagcaaccgcccttgcatacggccccgcccataccccgcccctgtcccggattggctggggtggggggcgtggcctttccccattggtgcccgtggcggcgcgagcccggaagcggacgggggcggtggcggaggagcctcgggtgggccggggttgctgcgccgtcctccactactggctactggcgctgcagccatgcagcccccgcccccgggcccgctgggcgactgcctgcgggactgggaggatctacagcaggacttccagaacatccaggttagcgccgctgcggacgccgggtcgcccccgagccgcgtctcgctggctcagggtcaagggtcgggcagccctgggtcaggcagtggggagctaagggtcaggggtcggggccctggcgtcactgccaaggggggcgaggcccctggtcctggtgtccactgccaccacctccagtgtccgggaaccccggcgggaccccatcgcgctgggcgacctcggcttccaatgagggccttggaaaggggcccagaccccgaccccgtcccttcccagaagagagcggccgcctgagtcacacacgggcgggcccagccttgggtcagccactcagcaaacgcgcagcgggcagcgcccgagaggcagcccaggtcgggggagcagcgtttaggggggtgtcctcggcctggatgggggacgccccaggcagagggataccgcgcgccgccgaggcctttggaaggaaagaggggacttgacaggcccatgtggctgcatcaaggagaaccaggggaggggtgggacgggtgggaggggtgggcggggctaggccctgcagggacgctctggcctggcagagatcagagtccctccgaggccagtggaaagctacgggaggaattgtctggactgagctccccagggccaccgtggctgttctgtccagaggccagggaggaggaggctgttggcctcatccaggcagggaagagggcggtggctgtgggtgggcagaagtggcacgtgctggggtccgagggggcgtggtgacccctcctgggcatgagaaacaagatccagacagagtagagccctggccagctgatggcttggttagcccttggcctctcctggactggttccaactgcttcctgtgggcattgaaacccagctgcccctggccctgccaaggcccctgccattggtgcttctccccagagactgagcagacccagtctccccgcctggccgccgctgtcctggccacagcccctgcttggctctcctcacactgccccttgccccatctctaggctgcgccttcttgagactcacctaccagggcaaagtgcttggggaatccttgggccaaaggtgctaggggaagggagtggggctggccttagagcaggaggctctagggttgaaacctgatgacctttaacctgggaagaagatgtcagggattcctgagaacctgagctcctcctgtactggaaggctagataggcaggaggagctgagaggatagaggggtggctctgggctgcctgcttggtccaggaggtggccctgggggcctaagctccagactcaaggtaggagaaagagtctgtccttgtagggtggggacaactagcagatgggctgagactaagaaaaccttggctgggtgcggtggcttatgcctgtaatcccagcactttgggaggccgaggcaggcagatcacctgaggtcaggagttcaagaccagcctggccaacatggtgaaaccctgtctctacaaaaatacaaaaattagccaggcatgatggcaggtgcctgtaatcctagctacttgggaggctgaggcagaagaatggtttgaacccgggaggcggaggttggagtgagctgagatcctgccattgcacttcagcctgggcaacagaacaagactgtctcaaaacaaaaacaaaaacaaaaacacctagtctgtttttggaggaggggtgctgtgggggtctctgggctcacaggaggacacccaggtccttgcctgccttggggagacagccacctcatccctgggcaggcacagttctacctcctttcccgctgagcgaaaccctcccagcagccctgggggagcctgagcgccacgtcctgcctgcaggctctggctcagtagctccccaactggcctgagcctctcccctccggcccccaggagacccatcggctctaccgcctgaagctggaggagctgaccaaactttagaacaattgcaccagctccatcacgcggcagaagaagcggctccaggagctggccctcgccctgaagaagttaggatcccctaccccacccgccatgggcagagtgtggggtgggagggctggcgctgtgagaccctgggcaccgcccctcccctctctgggccctgtttgcccttctgcccctgtgggagtcagggaggacacttgggagtcctcttgccctgactgtttctggccttacccgcagatgcaaaccctccctcccagcagaggccgagggggccgcacaggagctggagaaccagatgaaagagcgccaaggcctcttctttgacatggaggcctatttgcctaagaagaatgggtgagggcccccaccgccacccccagctcagttcacagccactcctgaagccgggtgctgcctcctcttggtcattatagtcagcaaatgttccctgggcccagtacaggctgagcaatgaggcacagtgctgacttcaggggagacacctggctgagagtgacatttcactgtgataggtgctttgtagcatggggaatgaggtggcacagtgagggacacctgacccagtccaggaggtcgcagaaggcttcctggattaggggatgggtgggctgagtcttacagaataaagagtgggccgggcgtggtggctctcacctgtaatctcagcactctgggagatggaggtgggaggatcacttgaactcaggagttcaagaccagcctgggtgacatactgagaccctatgtctctatttatttaaaaagaacaaataggctgggcgcggtggctcatgcctgtaatcccagcacttttttgggaagccaaggcagatcgcttgaggtcgggagttcaagacccgcctgggcaacatggtaaaacccatctctactaaaaatacaaaaattagccgggcattgtggcatgcacctgtaatcccagctacttgggaggctgagacaggagaatcacttgaacccgggaggcggaggctgcagtgagctgagatcgcaccaccggactgtagcctgggcaacagagtgagactctgtcttaaaaaataaataagtaaataaataaaaaaaatgaggcagacacatgggctgagggcgagaggtagcagcaggtggacgggccatgagaacttgtagtggccagaggtcggggcgggaggtgagaggcagccaagagatcagaggctttgctgggctgcagctcttgccttgagcccagtaggcgggcgggggcggtggaatgtgcacctggaaaggccagcagctgtcacccaggaggacggatggggcagtgcaaaaccccctgctgagcaaaaaatcccagcagaggctgcaggcagggagatagctgggagagggcgtggcccagaaggcagggagaagaaaggagtgtccgtagcctggggtcagtcctgtgataaggaaggggatgcgcttcctggaagttgggtcatcttggcagaaccatttggtggaaggggatggatgtcgatcttggggatgacagaagagccaaggaagggagacagccaagtctaggagactttttttttttttttttttttttgagacagagtctcactctgtcgctaggctggagtgcagtcacttgatctcggctcactgcaacctctgtctccgtggttcaagcgattctcctgcctcagcctccggagtagctgggattacaggtgcccgccaccacacccggctaatttttgtatttttgtattttgtatttttagtagagatggggtttcaccatgttggtcaggctggtctcgatcttctgacctcatgatccacccgcctcggcctcccaaagtgctgggattacaggtgtgagccaccgcacccagccctctgggagactttttagagcttggctgtgagtggagggagagaattagcaactaggaactggaaattagcactgggttgaggggcagctactgcctgtttgtggggttactttgcctctgggaagactcgagcacatccacctgctgagaagaggggccgagaggggaaagacccaggagaagggcaggaggtgatggagggaagcctggggagagcgagaagggctagtgggggatggagggtgcagagatgagagtgaggagtgctcccggcacagtgctcctggcatagtgctccccatagagcaggagtcaggctgtcttctctgcagtgttgcaggtggggcccgaggtgggaggagacagggtagagggtttcggggagaggatgtggagaggcgagtgctgggaaccagatggcgagctgagtggggacacatccgcagcctggtgggttggcagtggaggctgaagctggcctgcttggggagcactgtgccgggagcattctgtagagggagaagcatggctgtcccagaagttctttgtggccttggggcaaattgcctaaccatgctgagcctctgtctgtttggcttgagtgtgaacaagagcccatgtgtctggggcaggtgctgagaaagtgaccgtgactttgctgtcacctcttggagtatctctggcagagaagggcaagatgatctcagttggtgggtgtggaggctggacatgaaggggattggcaaaaaagtggtgtaattggcgggtggcctggggactcagccagctctgatgagatctgggactggagagcgtgggggcctcggtgagggacaaggggggtcgtggtgggaagaaacgccccgggaggctgagtacttggggtcagcccacagtcagagctctgagtttctgttctggtttgggaggtcgtcctagatgtggccaggcgtgtgggtctctgaagtggaacctagtactgcaggttctggaggggaggtggcagggagctggggggtaggtggtggccatcgcacaggggagcaatcggggacagggggacggccctcagcagggagggagagccgggttctcttggtgccctgaggtgggggagtttcagacaagactctggagatgggggggaacactgtttcctccgggggtcaggattccggagcaggcggccaggaaggctgggcatggcagggagtgggtctgcagcctccaaggtcagaacccgatgccaaggccctgcggaaagcagcgggtgagggggtggggtggtggcccaggctctggcctggcaggcttggctgagtaccggtggcttgtctgtcactcgggcttctcctcaccccgccacccccttccctagattgtacctgagcctggttctggggaacgtcaacgtcacgctcctgagcaagcaggctaagtaatcaggccgagcctccaccccccaacctccacccctccacccctagccccctacccccctccccccctcaacctccacccctccacccagccttcccccggaacccggccttcccctccaccccccaacccggccttcccctccaccccccaccccacccggccttcccctccaccccccaccccacccggccttcccctccacccccccacccggccttcccctccacacacccacccggccttcccctccacacacccacccggccttcccctccacacacccacccggccttcccctccacaccccctccccgccttcccctccacaccccctccccgccttcccctccacccccccacccggccttcccctccagccccccacccggccttcttcccctccagccccccacctggccttcccctccagccccccacccggccttcccctccacccctccacccggctttccccccaacctggttttcccctccaccccccaccccacctggccttcccctccaccccccaacccggccttctcctccatccgactacccttggctcagctgccctcccggggtgggggcacacatgggccccaccagcaccccacccgtctcaccggcctgcgccccccaggtttgcctacaaggacgagtatgagaagttcaagctctacctcaccatcatcctcatcctcatctccttcacttgccgcttcctgctcaactccaggtgggcgtcccaccccggccgaggacccaccccatccccagtcgctgcagtaccaaccctcggtcccctccctccgcagggtgacagatgctgccttcaacttcctgctggtctggtactactgcaccctgaccatccgggagagcatcctcatcaacaacggctcccggtgggcagggcgggccctgagggaggggagcatggaatggggtgccaggaccctccgggaagcaggaacaggcgctgggggtgatggtggctctctgctccaggatcaaaggctggtgggtgttccatcactacgtgtccaccttcctgtcgggagtcatgctgacgtggtgagtggctgggccccggcaggggcaggagctgggacaaggaggggatacacggcatccccaagggtccccacactgccctccactttttaccttaggcccgacggtctcatgtaccagaaattccggaaccaattcctctccttttccatgtaccagagtgagtgtcccagatgtctgtgctgagccctggaggcacccgtggtggggggcaggggcagggaacccctcccggggctcagccctgctcctctgtcctccgcccggcccaggcttcgtgcagtttctccagtactactaccagagcggctgcctctaccgcctgcgggcgctgggcgagcggcacaccatggacctcactgtgggtgagtcgggagtggccctggcatctggacattcccctttcctcccatcccgggtctgagtggtagcgtcccctctgtccctggccgtcctgtgccctgaccttcctccccgcagagggcttccagtcctggatgtggcggggcctcaccttcctgctgccttttcttttctttggacacgtaagtcgtgcctctgtgtccctgcctgtctgtctgtccgtcctctgcgccggtttcgggctccagcagggactgggtcttctgagtaaaatgcctcctccctgcttagttctggcagctttttaacgcgctgacgttgttcaacctggcccaggaccctcagtgcaaggagtggcaggtgagccggggtccctggacaggatggatggggggccaggcccatgtccagccctcaccctattcctccggcaggtgcttatgtgcggctttcccttcctcctccttttcctcggcaatttcttcaccaccctgagggttgtgcaccacaagtttcacagtcagcggcacgggagcaagaaggattgaggctgggccttcccctgccggcccagaggggcttctgtcctgtgtgttgtgggaggggatgggaggcgcccctcgagtgtgcgtgtatcagggggtctcttctattctcccttgggttttatgggcgctgtgggccctgaaggaagacctgggcccagtgccctcaataaagagaggcccagaggtggcctgagcgtgtgtgttctcctgggggaggggagggctgggtggccccaccacatgggttcctggggtctgagttagttaagttgatgcaggtggaggtcccagatctactcacacaataccaggcaaatacagaaaacagaactttattccaagggccagaggttatttaaaattatttacactcactggaaatcacgtggaggggctgggcccagctcagcagagagaaagagcccttctgtgcagccaccgagggccagaggcctccagaggcatggagcccggtgcccccatgcaggccctgggctgtgctgccaggggccggtggacctcacctggcctgggggctgaggaggatgcaccccaggcccagaggagtctttgtcactgggcctgcgcccatgccaaggccaagccaaacacacccaggagactacgggagggagccaggagagctgattacaggccggagtctgtggggtgggtggggcaggcaggcccctagctccacacgtccagggagtagcggcccttggtcatcagtttcttgatgtagtccaccgcctgcgcgtgctccatggccccgagctcagccacgatgtcgtagaaggtgttctgcacatccctggccatgttccgtgcatccctgggcaggaagagggggtgctgggggctgggccaactgtggcaggcagggccttgtcctccctgccccctattccagtgaccccactcactcacccacagacgtagatgtgggcaccgccttcgatcaacttccacaggtgctctcggtcttgctttagcaggtgctggacgtagacctggggccaagggtggtgctgtgaggggggcactgtggctgtggccctgccagcctcatgcccaccttcgtgggtgcccgcccgtctcaccttgtgggactgctcccgggagaaggccacgttgagctgggtgagcgcaccgtccctgtggaactgcgccagctcctcccggtacaggtagtcctcatccgagcggcggcagccgtagtacagcagcgtctcccccacctccttgcctgcgtggcaggggccggggtgagcgcggggctcccagtcgtcaccccctctcccccatgggaccccactcaccctgctgtcgcagccaggcccgctcctggatgaagcctatgaagggtgccaccccggtgccggggcccaccatgatgacaggcgtggtggccttgaagggcaggcggaactgggacttgcgcacgaacatgggcaccagcgcacggccgccgttctccccggcaggctccttggcccgcagccagttggtggccacgcccttgttgatgcggccagccttggtctcgtactccacaaccaccgcacagatgtgcacagagttggggtggacctgtggggagggccgtgtgagctccaccgccacaccgaggcccttgcccagccccggccccaagtcccgttctgcaggccagccccactcacccagggcctcttccagcccacctggcacccaaacctcagaggccccctccccagcggcttcccggactggttctggggaccggggctggacagatgctgagaatctcacaagccagcccgactgagtccacagcctggggaggcatttggagctgcgctggggctggaactggagctcagggctcagatctcggagctcctgtgccgccttgcactctgcctgctgtgagcagggctgggcctccagcgtgtggctggcagggcagtgccggccctcaccttggaggatgaggcgatggagtagtagcgggcctgcaggcgcggcagcagctcacacaggtggtcgatggggggccgcagggacgggcagtcctgcaggatggccaggatgtgcctccgggcctccaccacccagctcaggtacagctcctaagagacacgggggtgagatggggctgattggggcccacggagctcggaaaacggcggggtgacggggcggaggttgcgggggctgagggggcgcaccttgccctcgccggaggaggaggccatcttgcgcagcagctcctgctccgagggctccgaggcgtactgcgccagctcgtacagcacgttggtacgcggcgggttggtgatgtccaggtagtaggtgagggccgtgcggtaggacgtagggcacgggaatgggtgcttcttgttggactcctctgcagggaagagacaggcaggacttggggtaggcggccgcctcctggggatgggtggctgcggcaggagggggtgacaccttgggccagctctgcggcaacaggtgccccagctggtgctggaaacaaggcctatgctctctgatgcctccctggccctggggccaagtctggggcctccaaccagacaggaagtcctcatcagaggcaggaccctgctaggggaggtgcgggggagcccctgcacactaacgcacccgctgtgctttcaccgcacactacacggtctgacacagccccgcccaggcttccctacaggcgggctgtggaagccgacagtaagggcagccctggcatggcagctgaggaccggcaagcaggggtggggcgaggtgggctcggcccaggttggtgaccagtggggtccgagggcttcacagcgggaggctcaggctgggcagccccaccaggcccaggcagccccgcgtaatggctactgccactcggcaccactgtgcacccttgggggcctgggagggctgctgactcctgacttcagtgaggaggtgggggcagccccaggccggcagaggtgggtcgtggagccaggccctccttcccagcaggacacagtggccatgggggagccagggctgcctctgccaccaggcctcagcacctcactcccttaaaggactatgacagtgacggggtagggggaaccccgacagagagggctagacccctagggccaccccgcctcccgtttgcttgggatcctgtaaccgtggagtctcggtgcaagggcctcccaggcaccggggcttcaggcctaagcagaagctcaacccagggccttcctacaggcccaatcccgcggctgcctgagcccggcagggcgccctgactgtggcactcaccatccaggttgttcagggacatgacgacgtccaggtcggcacccaggattttgcccagctggttgacgagagcagagtcgttggctgggtacacagccacgtggtccccagattcatacctggagggagatgtgaggctcgggaggggcggaaggctggccctgccccaggtcaggaggcccagagtgagggttcagggggtgacagtggcagctggtacctgattttggagtccgagatgtccaattccaggtgcatgaggtggcgctcggttccctggttcagcttccggttggtggtgactgcagccaggaacggattcttggcatcaaaggggctgggtggggaggagagaagcacagtgagcggccggggctttgatctgagtctccgtctccaaggacgcttctggttgcacaaagcacagggaatctcagagatctccatgaggaaatctcaccggttacatcaagggctctcccagcctggtccaatgcagttctcttttttttttttgagacagagtttcgctctgccacccaggctggagtgcagcggcgcgatctcggctcactgcaacctctgcctcccaggttcaagcaattctcctgcctcagcctcctgagcagctggaattacaggcattcgccaccatgcctggttaacttttatatttttactagagacggggtttcaccatgttggccaggctggtcttgaactcctgacctcaggtgattcacccacctcggcctcccagagtgctgggattagagctgtgagccacctcgcccagccctaatgcagttctctctatagtcccaccacatgggcagagctgggtcatcagtgtctgtttacagatgtggaaactgaggctggcccctaaaagaactgtgaggcccaagctgacggtgccacaggctggaaggtggctggtccccaaatgaggagcacagctcccccacccccacacgtcctggactacaccgtggacaagagagaaacttgcactccggaaagccaccgacatgcagggcttctcgctccagccaggctggggcaggcctacagaaagcagggcagctggtcttggatgcagtggcacgaggacttccctgggtggctcgggcaggaatctgggcagcaaccaggggccatcaagggcacagagaggaacgccaggtttctcccccaagtctatctatggagatagattctaagaaaatgagcccttctgccaaagaggatcctagccacagaggccaatgcactgtcctagtcgagaagtgggatgtgccccgctgccctgggcagtgcagagtaaggtggctaagtgagctcagtacaaactgggcgagtgccagtctcctggggccgggccgtggacaggtcgtggacactcacacccactcggggcacggggtctggtgagaagggccctgtggggatatggggatacacggcagactgagcctggggtgcaccagtggccatagagccgtctgccccaagccacgctccctccactcacggcttctggttctcgtagctcttcagccggcccatctcccccatgtacaccttggccgcatctatgtcggtgtggaccacaagctcgtactggcgaatgctggaaaggggagaccaagggtgaggccgggaagcggcaggggtcagtcccgagagggaggggttggactacaggggagaccgtgcatggcctttggggtgaggtcccaggtacatacgacaagaagcaggggagcccctgctgcagatgcacaaggagggcaggcgagggagcaaggagggaggcggcgtggagctgccgggggccagacgcccagaagccggggcagggctgggcaggcttccatctgggagaaggtaaggaagcccgggcagcacccaggggccatcaagggcacagagaggaacgttatgtttttggccaagtctgtggaggcagattttaaggaaatgagcccttttgccaaagttgaacctagccacagagcccgacgcgatgtgtccttgtcgagaggtgggatgcaccccgctgccccagggcagtgcagagcaacgtggcagagtgagtccttggctgggaccaaggtccctcctcgaccctatgacggagtgtcttctaaccttgctgcgacccactgccagcccttgttccagggtggctgccctcggcacaggacccgcccaggccacccaccgcacctgcgggcacttgctcacctggactcctcgccagtggcttccaccccaaagtgttcacacacggccggccagaactgctctcgccaggtgatgaagtcctcctccaagctgggccgaggagaggagagggggagcggctcaggggaggcccatgtggcaacggtacctggtgccaggcacgccccgaccccaccccatccccaaagctcaggactgtgcaccctggggcacccagcgacataaacccagagcatcaggaaggctccagggagttgggcaagccgaaaagcaaaactggcaggggcagggcagaggcaggagagccccttccctctgtgttggaggtgcgtgtcgctgagtctcagctgacacaatggtgtgcgcgcccctcacgttccacggcccctgcctaagcccgccgcgctgatcatggtggcagggtgggcactcacttcccatcgtcgtcgcccaaccccagctcaaagatgcgctgggcgccgagctgctccagccgcttgtccacgtacttgcccatggcattgaagtgctcgtaggtcttgttcccaagaccaaacacctgcgtggacacaggggccgctctgaggcctggccctcgacctgaccagtgggaggggccatgggggcagggcgggaggccccacagcactggctgagctgctggcaacacctgcaggcctccgttccaccaggcgcctcgcactgcaaggaacactgggccactgaagaggcttcatctggttgacctgcagcccacagcctgccccgtccactgccagcctcaacccacagggaagcggggccagcccaccctccccaccgggctggggctccagctctccgaggccaggcaggtctcagtcgtccagccagacctttcttgcctttagtctccagcacccaatgccccctggagccgactggggctggggacagggaggggacattctcgtagtgctggggtctggggcagaggagagggtctcacaagtggcctgccctggctgctgaggacagggtgggggtctggagggctgcctttcagatacatggatctggagtccccagggaggcaccgcaggccaccgggagcccatagcagtctctgggtgactcaccgcgaacttgaccccagagagatccacgtctgtctcctgcagccagtcgtagaagtcctgggcattgtcggtggggtctccctcaccgtaggtggccatgcagaaaaccaccagggcgttgtcgatctctggcaggctgctcaggtcggcctgcagaaacagggacaggaccgcgccccggccatgactgagcctgttcaaggttcaacccgcaccagatggggaaggccaggtcctgcccagggtggcaccaggccagggatgtctgagtgtcgtgggatcagagagaagtaacaacacggaggggctggggcatgggcatttgtgccaggtgggcaggacaaggtcacccgtgttaggctggagcggagaggatgtgtttctagaggaaagtgaagcttggcacaaaagagccatcagaatgcagcctcctgagctgatgcaggtctggggccaccctgggaacctcattccaaagctcccaggcaccgcacagccccggtgcacactgatatctaactaaactgttcatcaactgcaaatgcagcctggagagggctgtggggtagtgcccgtcaccaagacctcgaaggagaggggagtggagcagctggggagggtgggtttggtttgggagatgtggcggccgccaggagggcagccggcactcaggggagggccagtcctggggaaacgatgcctggcacgtggctgcaactgcaggaatggcccttccgtcagtcagcccgggcagggatggcaatgaccctcacgggaaggcaacttccgaggacgtcttcccaggaccccactccctgccggcctccccctgctgaggggcgccctacagacctgctccctgtcctacccactgcctccatctggggccagcacgcggtggcagcttaccaggtcatactcctcagggtccgctgacatgcctcgcatcccgtagcggtgggcgtccttggacaggcggttggcaaactcctctgcagtccccgtctgggagccgtagaacacgatgatgttcctcccctaaggaaggcagacacagggttggtgagggccacagacctcagccacggctccggtgaacacccactgggcaggcctggcaggcgggggccctccaggccgccccctttccttcctggctttgagtcccttctaagttcctctgggacttgcttctcactgtcacagccactgtggcaaaggagggcaaaggtcaccaaggcaatctcacacacgcggctgctcaagatcacacttctgacattttcatgacacggggaaaaaacaaagttaaaaaaagtaaccaaatgtatagcccctatccgtgggggaatggttccaggacctcccatagatacttacatccaaggatgcagccgggcgtggtggctcacacctgtgatcccagcactttgggaggctgaggctggcagattacctgaggtcaggagttcaagaccagcctgaccaacatggtgaaactccatctctactaaaactacaaaaattagccgggcatggtggcgtgcacctgtaatcccagttactagggaggctgaggcaggaaaacagcttgaacccaggaggtggaggttgcagtgaactgagaacacgccactgcactccagcctgggtgacagagcaagactccacctccagtggctcacgcctataatcccagcactttgggaggccaaggcgggtggatgacttgaggtcgagagttcaagaccagcctgaccaatatggagaaaaccctgtctctactaaaaatacaaaattagccgggcatggtggcacatgcctgtaatcccagctacttgggaggctgaggcaggagaatcgcttggacctgggaggcagaggttgtggtgagccgagatcgcgccattgcactccagcctgggctacaagagcaaaactccatcacaaaaaaacccaaaaaacaaaaatccaaggatgctcaagtccctgctataaaatgatgtggtatttgtgtgtagcctacacacatcctccaacatactttaaatcatctctagattacttattaatgtaatacttaatgtaatgtaaattctctgtaaatagttgctatgctgtattgtttagggaacagtaagatgacagtatgtgttcaggacagacacaacaatccattttttctccaaatattttcagtctgcagttgaattcttgaactccgaactcacggatatgcagggctggctatacaatccaattgtgttatataaataatagatatgtatatcaaaacatacatatgtattttctttctatacccacaggcacaaagaaaacagactggcaagaaatataccgagggtccctaaatggggcattctggatgtgttttgctggttaaatacatattcattataaaattttacaacagggaaaggtcctaggggctggctcacatactcgtcagtccaccctcctcctccagcagctgttgaaaagcctgaaatcctattccccagagcccgttggggctggagttgcagccaattcggttcagccaattgaacgtgctttgcaagatctgaagggtggaagggaggccaaggcttcctggcccctcatgcacatgtgaggttctctgcagtgcctggtcttcagtgcctaaggcatttttctttttttcttttcttttttttatttttgtgtgtgagacggagtctcgctctgacgcccagattggagtgtaatggcacgatctcagttcactgcaacctctgcctcctgggttcaagcaattctcgtgcctcagcctcctgagtagctgggattacaggcacccaccactatgctaggctaatttttttgaatttttagtagagactgggtttcaacacgttggccaggctggtctcgaactcctgacctcaggtgatctgcccaccttggcctcccaaagtgctgggattacgggcgtgagccaccgcacccagccacctgaggtatttctaatagttttggtagccagactgcaagttcctagtcctggctactggcttatgtgatgttcagaggcagctgtagaagtagcttcttatcctggatcacagctacacgtggtgtgtcctgaactcaacagtttcaggctgcattcgaacagagcagctaccttgcaggttgcttctgtgatatcttagagaccaacctgctccttcagcccctccagtaacctggaagtacccccttccctgtgtgaaatcccttccagattaaaatgcctaaagtagtctctagttttcacactgaatcccacctcatacaaaataaaacttacgcggccgggtgccgtggctcacttctgtaatcctagtactttgggaggccgaggtaagaggatgacttgagcccaggagtttgagaccagcctgggcaacatggcaaaaccctgtctctactaaaaatacaaaaaatttatctgggtgtggtggcgcatgcctatggttctagctacttgggaggctgaggtgggaggatcacttgagcctgggaggttgaggctgaagtgagctgtgattgagccactgcactccagcctgggtgacaggagtgagactgagtctcaaaacaaaaccaccaccaaaaaaaacttagggattacaataaatgttcttatactttttaaagttcctgaattttccacaaatcattgttaaatcattaaaaattgtttttttttttcttgagacagagttttgctcttgtcgcctaggctggagtgcagtggtgcgatctcggctcactgaaacctctgcctcctgggttcaagcgattttcctgcctcagcctcctgaatagctgggattacaggtgtccgtcaccatgcctggctaattttttgtgtttttagtagagacagggtttcaccatgttggtccagctggtctcaaagctcctgacctcaggtgatccgcccgtctcagcctcccaaagtgctgggattacagacatgagccactgcacccggccaaaaggattttttttttttttagatggaatcttgctctgttggccaggctggagtgcagtggtgcgatcttggctcaatgcaacctccgcctcccgggttcaagtgattctcctgcatcagcctc

SEQ ID NO: 5667 - DNA, 64851 bp, Homo sapiens
  UNQ2754 gene - 6655597 - 6680447 of chr8; NCBI Entrez Gene ID: 389610; Build 35; sequence includes 20,000 bases upstream of initiation codon and 20,000 bases downstream of termination codon of the gene
gaggccctaatccaataggaccggtgtccttatataaaggagaaattggacccagagagaggggcatacagagagaggacgacgtgaagacatacagggccgtgtgactggacatgatgcctctacaagccagggaaggcagggattgccagccattaacagaagctggaagaggcaagatgggatcctctctcagcattgtgagatggagcatggcccggccaacaccagatttcagacttgtgacctccagaacaatgtgaggcagtacaattttgtggttttgagccacccagtttctcatactttgttacagcagcccgaggacactaatcctagagggatccctttaatagctgggtggagtacagatgtgaggtccaaaggcaattctggaggtggggagcccatgtgggagcctcttgtattgatcctgggagaaacaatggaagccagacctaagatactaagaacagagaggaggacaaagattcgagaaacatttaggaggtaaaaacaggcaaggtaaacttgcttcggtgagttgtgtgaggtcaaagacaaagacggcctcgaagatctcctcctgcagtctggaagtcccataggaccaagagcagttttcaaggtggcgggaaaaggtgaagcctgcagtatagatatgaagcccctgcagctcttagagattcccgcacatccaaaatcccaggtgtctgtactgatcgccttttgctgcaagaacaaacgtccccaaatctcagattctggaagtcacaaacattcatgtcgccattcacagttggctctgtggcctctgcagccggctctggactgggctcagggctgctctgtgtgtggccctgtcggggacaaatgctcagtgaacaggggctgcctatgacacgctctccccatgggagctgagggctgaaggctgtgggctgagacacatgctgccctttctggaacaggcacgcagccactgcttcctgctggtggacacaaggcacactgtcaggccctgtgtcggcgggtcagggagtacagtttacctgctgagagccactgccaagccacggctgagggaaggcatgttggagcagtggattcgccgtatctcttgttgtctgaattctcatgccttgatatctggggacttgccccctcagagtcagccaattcttagagatagtaggcaactctcccaggagcacccctttcaaatgcaaaccaaccaatcaaaagtccacacccccagttgccctcttcgggaggctctcatgctctggtctctatccaccagcccttatctaccctgggccaggtaccagacgactagggacaccctctgtgccccagaactgctgaaattattcatactagcaaatcccaaacctgcttgccctgtcttctcatttcttcccatggaaatcacaagaaaggctctcgcccacagttccttttgtctccatctacttcctaaccccaggcttccccatgtggcccccctgctctgtgtgcccctcctgcgatctgtgggtctaacaaactcccttttcaatggcaccgtgtcctgatccgttggcctcactgtatttctggtgctatattttaaagccagcaaaactctgattctatcacagcatcctaaaatttcatatcctcttgacacaccaaaaactcaaatctaggagatgacagaagcctcattgaacccaggtgccgtatctgcagaatggaaaattcagcagaagtatctagggcctacaaaaggaaaatatatcttggggtcccccaacaaatcactaagctaaagggaaaggtccggctgggaactgcttagggacaacctgcctcccattctattcagtcacccctctgctcactgagatgaatacatatctgattgcctcctttggagaggctcatcagaaattcaaaagaatgcaaccatttgcattcttggaagcccttcctatcatttggaagcccctccctgctttgtcttctcgcctttgcttcaagttgttctgcctttccagaccggaccgatgttcatcttgcacatgttgattgatgtctcctgtctccctagattgtgtaaaaccaaactgtgttctgaagaccttgggcacatgtcctcaggatctcctgaggcggtttcacaggcacacaaccccaactttgacaaaataaactttctaaattaactgagacctgtctcagattttgggggttcacaggccagatggagcattccaaactcactgctgtttctagaccaaggagtgcaaggaagacatttgaggctaagcagggagttgatggactccctgcggtcaagtcctgaaagctttgtctgaaggttgtagaaagtctatggaggtgcttggaccatggctccccaggcaggtaggcattacaaactgcatcctgctccactcttttcagtgggcgttgcaacttgacttgtttgttcttgaaacaagatagtgaaagaaccaggtggagatgatttaacttgtggtctccccttggggaaagtttcctggaacaagacatgaagggttggggctgttttgaaggcagtggttctcctccagtgcagaagccagcttctctggctccctgggatggggcccagttcagagatcagataaaccatgagaaatgcagcagaacagaatgcgggcagttagaaacatgtctttctccctttgacaggctgtgtggaaagacttagcagctgataagagggagaagccaagcgaggaggttgtagaagtgcacaaagactccaaggtttagagactcaggaaacacccataatttgagaagcactgagccctactgtcaatgcaggcagaagctgcagtcctgccctgggatggatgagtgattttccctgcaggccgctcagtcccaccacaaatatttgagaatagtggggaagaacaaacagagacttatgtgccaagagactaatatttaacagctataaatcaaactatcacactgttgactaaaacgtgttctatcctcccaccctaaacaaatatacttccaagacaacctggacctccaggaaaaatgtaggatccttgcactcccacaactcccgcaccagaatcagacagcacaaagagggcagggccttggcttgcagcccctcccctttctctccctacagccaagaccatcctcagcctccagggtctcatgcactcccacacaggacctcttggcttgcatctctaagctgtgtcacagtctcacagcagccaccacttggcctatgacacaccctgggagcacgtctcaccttggggttccaacccaaggaagaaacttccaaaggccctagacgaaggctgggggcaagtaattcttaggtcataggagcccagagaatgattaatgagaagggacatagatctggccagacagaagacctcttaaccccaggcccgagaagaacccctcttgcctgggtctccagctggtacagagacgaggaagcccaaagaagtttccacttggccccaaaggttggattcagaaagcttcccaggttaagagagggagtcacgggataaccctgatccagctaaggtgaaaacggattcctgcaggagacagagatgccctctgcagacaccctcctactagtaaatgggaaaacagacactcagaccgtgtgtgtgtgtgtgtgtgtgtgcatatgtgggcgtgggtgtttgcaggtgtgcatgtatatgcatgtggatgtgtgtgagtgtatggggtgtgcgtgcatgcatgcttgagtgtgtgcaggtgtgcatgtgtatctgcatgtatatcagtgtataagtgtgcacgtatgcatgtaggtttatgcaggtgtgcatgtatcgacgtgtgcatgtgcaagtgtatgtatgagtgtgtgcaagtgtgcatgtatttgtgcaagtgtgcatctgcatttgagggtacgagtgtgcatgtaggtgtgtgcaggtgtgcatgtgtgtgtatgtgcaggaatgagtgtacaggatgtgtgtggatataggtgtgtgtgtgggtgtgcatgtgtgtatatgtgcgggtgcgcatgtgccggtgtgattgtatggggtgtgtgcgtgcatgtaggtgtgtgcaggtgcacgtgtgtgtatacgtgcaggggcacaagtgcaggtgtgagtgtatggggtgcatgtgcaggtaggtgtgtgcaggtgtgcatgtgtgtatatgtgcaggtgtgcatgtgcaggagtgtatggggtgtgtgtgcatgcaggtgcaggaagtgcaggtgtgcatgtgtgtatatgtgcaggtgcgcatgtgcaggagtgagtgtgtggggtgtgtgtgcatgtaggtgtgtgcaggtgtgcatgtgtgtatatgtgcaggggcacatgtgcaggtatgagtgtatgtggtgtgtgtgtgcatataggtgtgttcaggtatgcatttgtgtctatgtgcaagtgtgcatatgtgtatatgtgcaggtatgagtgtatggggtgcatgtgcatatgtgtgcaggtgtgcatgtctgtatatgtgcagaggcacatgtgcaggttgagtgtatggggtgcatgtgcatgtaggtgtgtgcaggtgtgcatgtgtgtatatgcgcaggtgtgcatgtgcaggtgtgtgtatggggtgtatgtgcatgtaggtgtgtgcaggcaggcatgtatgttcatgtgtgcatcttccagtgtgactgggtatgcatgtgtgtgtgtgtgtgcatgtatgagtgcacacatacatgtgcagctatgggtgtgtgcatctgcatatgtatggtgggaagtgggttctggtgtgtgggaattccccttgcagtgacctgccctgggcccctggtctcccctcgctgagttgtctgtcaccagctgtcctagaatctggctttgtggaacaggtggatacttggtactaacttctgcagtgagctgacttctcactgcagaagtcagcaccaagcaggttggttctgtgcagggccacaacagagatcaccttcaaattctttaaatgagaagttgacagacatttccatccctcttctggccctggctgtctgtgttccctgaggcccattgacctctgtggtcaggtatgtaggccaagcgtccacccttggagctaaatatgaggtctttcccatctaaacgtgtggctggccagcagaagggtaggaatggagctgctcaatcggaaagcactccctgtgcagataagattcattctcgggtggagccaagatggccgaataggaacagctctggtccacagctcccagcgtgagcgacgcagaagacaggtgatttctgcatttatatatgaggaatgcagctcctcaccagcaaaggaacaaagctggatggagaacgactttgacgagttgagagaagaaggctccagacgatcaaactactccgagctacaggaggaaattcaaaccaacggcaaagaagttaaaaactgtgaaaaaaaattagacgaatggataactagaataaccaatgcagagaagtccttaaaggagctgatggagatgaaagccaaggctcgagaactatgtgaagaatgcagaagcctcagaagccaatgcgatcaactggaagaaagggtatcagtgatgcaagactaaatgaatgaaatgaagcgagaagggaagtttagagaaaaaagaataaaaagaaatgaacaaagtctccaagaaatatgggactatgtgaaaagaccaaatctacatctgactggtgtacctgaaagtgacggggagaatggaaccaagtgggaaaacactctgcaggatattatccaggagaacttccccaatctagcaaggcaggccaacattcagattcaggaaatacagagaatgccacaaagatactcctccagaagagcaactccaagacacataattgtcagatttaccaaagttgaaatgaaggaaaaaatgttaagggcagccagagagaaaggtcaggttacccacaaagggaagcccatcagactaacagcggatctctcggcagaaactctacaagccagaagagactggcggccaatattcaacattcttaaagaaaagaattttcaacccagaatttcatatccagccaaactaagcttcataagtgaaggagaaacaaaatactttacagacaagcaaatgctgagagattttgtcaccatcaggcctgccctaaaagagctcctgaaggaagcactaaacatggaaaggaacaaccggtaccagccactgcaataacatgccaaactgtaaagaccgtcaaggctaggaagaaactgcatcaactgatgagcaaaataaccagctaacatcacaatgagaggaccaaattcacacataacattattaactttaaatgtaaatgggccaagtgctccaattaaaagacacagactggcaaattgcataaagactcaagacccatcagtgtgctgtattcaggaaacccatctcatgtgcagagacacacataggctcaaaataaagggatggaggaagatctaccaagcaaatggaaaacaaaaaaaggcaggggttgcaatcctagtctctgataaaacaaactttaaaccaacaaagatcaaaagagacaaagaaggccattacataatggtaaagggatcaattcaacaagaagaactaactatcctaaatatatatgcacccaatacaggagcacccagattcataaagcaagtcctgagtgacctacaaagagacttagactcccacacaataatgatgggagattttaacaccccactgtcaacattagacagatcagcgagacagaaagttaacaaggatacccaggaattgaactcagctctgcaccaagcagacctaatagacatctacagaactctccaccccaactcaacagaatatacattcttttcagcaccacaccacacctattccaaaattgaccacatagttggaagtaaagcactcctcagcaaatgtaaaagaacagaaattataacaaactgtctcgcagaccacagagcaatcaagctagaactcaggattaagaaactcactcaaaaccgctcaactacatggaaactgaacaacctgctcctgaatgactactgggtacataacgaaatgaaggcagaaataaagatgttctttgaaaccaacgagaacaaagacacaacataccagaatctctgggacacattcaaagtagtgtgtagagggaaatttatagcactaaatgctcacaagagaaagcaggaaagatccaaaattgacaccctaacatcacaattaaaagaactagaaaagcaagagcaaacacattcaaaagctagcaggaggcaagaaataactaaaatcagagcagaactgaaggaaatagagacacaaaaaccctttaaaatattaatgaatccaggagctggttttttgaaaagatcaaccaaattgatagactgctagcaaaactagtaaagaagaaaagagagaagaatcaaatagatgcaataaaaaatgataaaggggatatcaccactgatcccacagaaatacaaactaccatcagagaatattacaaacaactctacgcaaataaaccagaaaatctagaagaaatggataaattcctcgacacatacaccctcccaagactaaaccaggaagaagttgaatctctgagtagaccaataacaggctctgaaattgtggcaataatcaatagcttaccagccaaaaaaagtgcaggaccagatggattcacagccgaattctgccagaggtacaaggaggagctggtaccattccttctgaaactattccaatcaatagaaaaagagggaatcctccctaactcattttatgaggccaacatcatcctgataccaaagcctggcagagacacaaccaaaaaagagaattttagaccaatatccttgatgaacattgatgcaaaaatcctcagtacaatactggcaaacctaatccagcagcacatcaaaatcttatccaccatgatcaagtgggcttcatccctgggatgcaaggctggttcaacatatgcaaatcaataaatgtaatccagcatataaacagaaccaaagacaaaaaccacatgattatctcaatagatgcagaaaaggcctttgacaaaattcaaccacctttcatgctaaaaactctcaataaattaggtattgatgggacgtatctcaaaataataagcgctatctatgacaaacccacagccaatatcatactgaatggacaaaaattggaagcattccctttgaagactggcacaagacagggatgccctatctcaccactcctattcaacatagggttggaagctctggccagggcaattaggcaggagaaagaaataaaggcattcagtttggaaaagaggaagtcaaattgtccctgtttggagatgacatgattgtatatctagaaaaccccattgtctcagcccaaaatctccttaagctgataagcaacttcagcaaagtctcaggatacaaaatcaatgtacaaaaatcagaagcattcttatacaccaataacagacaaacagagagccaaatcatgagtgaactcccattcacaattgcttcaaagagaataaaatatctaggaatccaacttaaaaggggtgtgaaggacctcttcaaggagaactacaaaccactactcaatgaaataaaagaagatacaaacaaatggaagaacattccatgctcatgggtaggaagaatcaatatcgtgaaaatggccatactgcccaaggtaatttatacattcaatgccatccccatcaagctaccagtgactttcttcacacaattggaaaaaactactttaaagttcatatggaaccaaaaaagagcccgcatcaccaagtcaatcctaagccaaaagaacaaagccggaggcatcacactacctgacttcaaactatactacaaggctacagtaaccaaaacagcatggtactggtaccaaaacagagatatagatcaatggaacagaacagagccctcagaaataatgccgcatatctacaaccatctgatctttgacaaacctgacaaaaacaagcaatggggaaacgattccctatttaataaatggtgctgggaaatctggctagccatatggagaaagctgaaactggatcccttccttacaccttatacaaaaattaattcaagatggattaaagacttacatgttagacctaaaaccataaaaaccctagaagaaaacctaggcaataccattcaggacataggcatgggcaaggacttcatgtctaaaacaccaaaagcaatggcaacaaaagccaaaatagacaaatcggatttaattaaactaaagagcttctgcacagcaaaagaaactaccatcagagtgaacaggcaacctacagaatgggagaaaattttcacaacctacgcatctgacaaagggctaatatccagaatctacaatgaactcaaacaaatttacaagaaaaaaacaaacaaccccatcaaaaagtgggcaaaggatatgaacagagacttctcaaaagacgacatttatgcagccaaaaaacacatgaaaaaatgctcatcatcactggccatcagagaaatgcaaatcaaaaccacaatgagataccatctcacaccagttagaatggcaatcattaaaaagtcaggaaacaacaggtgctggagaggatgtggagaaataggaacacttttacactgttggtgggactgtaaactagttcaaccactgtggaagtcagtgtggcgattcctcagggatctagaactagaaataccatttgacccagccatcccattactgggtatatacccaaaggactataaatcatgctgctataaagacacatgcacacgtatgtttatggcggcactattcacaatagcaaagacttggaaccaacccaaatgttcaacaatgatagactggattaagaaaatgtggcacatatacaccatggaatactatgcagccataaaaaattaagagttcatgtcttttgtagggacatggatgaaactggaaaccatcattctcagcaaactatggcaaggacaaaaaaaccaaacaccgcatgttctcactcataggtgggaactgaacaatgagaatacatggacacaggaaggggaacatcacattcagggactgttgtggggtggggggaggggagagggacagcattaggagatatacctaatgtaaatgacgagttaatgggtgcagcgcaccaacatggcacatgtgtacataagtaactaaactgcacattgtgcacatgtaccctagaacttaaagtataataataaaataaaataaaaaagaaataaaaaaatttaaaaacaaagaatcattctctataattaagtctcataacaggcaacacttccagatctgttgtgtaagcagccagaagcagtataaacagaggctcttccagcgagcctcgtggtctcagcagggcacataccttttccttctgttacccatcaggagtctctgtttttggctcctggccttccgcgttcttgttggtcaggttgccccaggtaagaccggaagccgggcagcgtgggggctgcagggtctcgggcccagggaatggggattaagctgtgttttgacaacggctcagggtctagaaataagtaataaatctgagcatcagggagaggatcaaaataatacagactcaaggaaaatgcttatatatatttttttaacttactgagacatcctccaggatctctttagactgagggttgcttccctggaacaagaaccgacttaccagggagacagtgaaaggaatgagccaggcttttaggacagcagatatggttagcgctagaaataggccttgcagataactgcctcataggaggcacctgtccccagggctcatttcccacctgattcatttctcggcctggaagaaagtgcagtatacagaagagggctcagcctgcgagaaagtgcaggatacagaagagggctcagcctgcgagaaagtgcaggatacagaagagggctcggcctgggagccaaagtacagtgtgtggttcccagctctgacactcactcgcagtgggccttcctgcgagtaactgagttgtcctcaaattcaaccctgtctctgtaaaacaggaataaaaaccccacgtggcacagagggtttcattgatgacacctgaggctaggttcaggaagagcctcttaaagcatcacagacattggaggtagtggcggtgtttctgttgctgttgctttccggcttctgttttctgtattctctgcctcctctcccgccaagccggcccaccatgccggcctcctgaggccgtggatgtatctcagtggcctatggggtcccagtcccccgaggagtcctgtccactctttctgcccagtgcctcctgcccttctatgcgcagggcaagtaggggctgtgctctggcttgtcttcacactcatagaaggttgcagagattcctgttacggaatctccaccccattctatctctttagcagggactggaagctggggtgcaagagggagctaagagtcagcatttggggcagatactatggaatctggcatttttagagttgaggctgtcctgcaagccaagaaccaccgacagcgtggcacagattgacacagaccgcagtgcgggcttcatagggaataccattgtcagctgaggagctgaaatatacttccctccccacaggccatggccaatgccttcgaaaacccctgagtgcttccagaatggcggccaatgtatattttcttgcacaatacagcagatccccgttggttcctcctacagtggaagaaagaaatgcagccagggcctgtgacgggctgaagatcacctgagcacaggaaacctggagagcgaaatagaacgctcactttagctctaaagattctaccgtattacctcttgaaaataaataaatgaccaggtgctggatttaggaatggcgattacgatgcttatttgggagagacatgtatctagacgcagagaaggaaggaatactgtgtgtgcgtgaagagtaacctcaggttacttctctcagtcccagaggctggaagtctgacatccggttatccgcagggttgatttggttcctagatggccgccttcttcctgtatctttgtgtgttcgtcccttggtgcatgtgtgtgtcagtatccaaatttccttttcttataaggacagcagtcctactgaatcggggccaccttaaaggcctcattttaacttaataagctatgcacagaccctatttccaaatacggttacattctgaggccctgggagttaggacttccacataggaattcgggtgcacacaactcagcccttcccaccgggcttacccctgcatctgcagttagcttccaggtccactggaggctggctgccgccaaggcaatgtgaattgtagagccacgcgcaaggtgtcctgaggcctagcttcataactggccccttctgctgctgttattggtcaaaacaagtcaaaaagccaactagattcctgagctggggaaacagacaccactgcagatggaaagagctgcagagtcagatcacaaagggtgtgattcagtgggggattcagggccacagtggtggcccgcctcaccatcaaccacaaagggtatccaggttccttctgccttacgtactttgggtgtgtatgaggggcttaacgtagttcagtgtgccttggaagaccccgaacactgcctttcaagcggaagattctctgacaaaaatccgtacggatcaaggatgtgcttcagagccagatcccaattgtttgatcaagcacagcccaggagctctgatgccagtgaagtattagttttaaaatgtcatgcatgactagtcgttgaggggaaaataagaatttctggacttctttatacttttccatttatatggcattggttattggttacagagagggacggggacctaaaatattttctgttccaaaatctagactttgcccattcctggtgacgtgaaagtcacttgaggtgattgtgtatctaggggcagtagtaggactgaaggaggggtgagagagtgcactttaactccccgaaaacctactccctacagctacccaaataacatgcaaacattaataaaaacaaagaacttgcaaaacaaatgtaacttcaaagccgttccccaaaccctcttccagctttatggctttagctaaatccttcctgcacagcccctgcctttgcccacacactccccaagcagaagagtgcctcagagccccaaccaaatgttcctgctccatctcccccagccctcgccctcctcgcatgctctcccatacacaactgccttatccctgctgaccaagaagggccttgccccttcttcacctggcttacaggagtcccttttgcataatggtggaacttgatcccttttttctctgtgctcccagaatatgcattgaaccaatgctgttcaatcctaaagagtgcaggcgaggagaggaaaagaagagtcttcacggctactgcccaggcggggcatgctgtctgccaaataaccatcactctagtccccagatccattcacaccttcagcccatcggtgtgtatcgagtgctccctctgtgccagggcctgggagacagtgctgaacaagtcagatgaagtccccctcctctggtgctcctgtagagggagacggacaatgagaaaataaacaaatgagatgatgtaagtgcaggaagaaaaagagagcaggatgagggggtgcaagtgtccaggaagaggcctgcgagagccgcccacctctgccacgcagcccctcacaattgcagggtccccacctcaattccagctgccctcaccccaccccatatatgcaacacacaggccctggggagggcagccccagggacacctgggccggagcgtcacagcagacagaagagggatggccgctctgggctgcttctttattgattgctgctgcactcacagaaggcctgtttccttctttgtgcccggtgtctgcctagccccaggaggagaaagagaaaggaaacaaaaacggccgccacactgctcagagcagctcttctcatgtccggagactctcccttcactccacacactgaagtgcgcctctggaaacactgcggcttgcaggagatcccgctggactggggtcagacgcgccttggctctgtgcctggctctgcatccagctctgcctctaccagccgagaaactgccctctttggatctcagagagcaaatacctgccctgcccaccccacgggcttgtgtgcagttaactatggagaaagtattcccaaagcattcagaagctagctgagattttaaagtactaaggattattttaatgacgttaaaatacatttattttcacattaagtcatcttcaaacctaatgacgtgatttgaagacacaggttttccacatcctctgtcccagagtcagagagctctgtttaaacgtgctctgagggtttgcaaccgccggtgcaacagcgccacctactgggtgtttgccctgggaaaagactagactgagctgcagcgcttcctggctgcttgctttcattcattcacttacttgtttattcacttattcattcatacacccaacatgcactgagaaggcattatacgctgtgcacactctcatgatctgctatctatgcaggtgcaaacaagccatggcattacagggtccggatgggcttgagggacgattagtttacatggcttggaggagggggcaagaaaagccttggcaaccatggctttctcctacgcactagaagagggatgcttaagaaggtgggtggcccgactggctcgtggatcatcccagggttagcgaccacagaagacaccagtatcttccacatcaactccttcaactattgctacaaatttatagagccaaaacattccgtttactctcatttctcataacgtactcctggaaatttatctaaaagtaaacattccagcagaggacagtggaggaactgtgttccccaaatggttgttgcagtggtatcaacactacaaaaataggtaaacaaataaaatcttcagctgcgtaggatttgctgacaataataagtactatacgaatatttgaatgtattcctgatacattgagtgtaaaatgcagaatattaacttcaaggctcattcttatttcattaatgtaacagaaaagatagacagataaagattagaaaatgtatgcccaacattaaaataagaattgccttaattatgaagacgctgcttctgatttttaatcagactgtaccacacttaacctgaactgctctaatcacagcagcagtgccagaggtccctggagcctgggaccttatgtggctactgaggctaggcatcacccagtttgtaatttttgccaatctaaagaagtaatgtgatgtcaggccgggagtggtggatcacgcctgtaatcccagcactttgggagacggaggcagacagatcacttgagctcaggaattcaagaccagcctggccaacacagggaaaccccgtctctactaaaaataaaaaaattacccaggcacagtggcacgtgcctgtaatcccagctactcataagactgaggcaggagaatcgcttgaacccgggaggtggaggttgcagtgagctgagatcgcgccattgcactccagtctggatggcagggcaagatcttgtctaataaataaataaagtgatgtcattcactttgcactttttaaaatattgataggtttcagcatcacttaaattatcttcagtttggaaacattttcttcagtaaattaggccttttcgggtttttctcttccataaattgccttttccccttttttactgaggttgctgcctcctcgtttttgttgaaatataggagttacttgtatatttcatatattaatgacttgtcagtttgagacattgcaaaacacttctcccactgtatctaacttctgtccgttaacgtccacaaggtccttcactaaacagaaggcttcagttgttacacacaaaaaaatgcaatccatttttcccttgtggtttgtgttttgaggtgttgtttaagacatccttctccattactaagtcataaaaatattctgctattttttgtacttctttctgttaaagtcttatctttcatatgtaggtctttactctacatggcgtccacctgtgggcatgcgctaggtggagatctacttttattgtttggatctaatgagctcattttatcacacattcactaaacaatttgtatttctccattgatttgtggtgccgctattggtcatatattttaagttctatgtatttgtaggtcagcttctgagctctccactgcattctatagattttttgtctgttctgtgccaataccataacgttctataaacatgactttttcttgatatatattaatatctagaagggtacaaatgcctctttatccttcttcacaaagtcggctaatttgtggacctcctctcttcattcacattttagagtaagtctatcaagtttcgtaaagatcattttggaatttttaataagtttccactgaatgtatagattaattaaggaagaattgacaattttattaagctgtttgaatcaaaaacaagaatatatctactcagatcatttcttatattctttattagagttttatggtgtgctccagacaaatcttatgtatgttttaaatcaattcctaagcactttatagacattctaactattacaactatcttaatttttccagttttgtatagtacgtgtacagagaaacgctattggtttttgtaagttatattagaaggccttttggccttttttttttttttttttgagacggagtctcgctctgttgcccaggctggagtgcagtggcgtgatctcggctcactgcaagctctgcctgctgggttcacacctttctccttcctcagcgtctcaagtagctgggactacaggtgcctgccaccacgcccagctattttttttttttttttttttagtagagatggggtttcaccatgttagccagggtggtctcgatctcctgacctcatgatccacccgcctcggcctcccaaagtgctgggattacaggcgtgagccaccgcacccggccacgttttgaactatttcatcagcttgacaaggttgattgttctaggtagagaagcatctgtagatgatgagtgtctcacccttcctttctgctagttacatgatcttatttccttcagtttccttatacattaggtataccctccaacacaatattaaacagtagttgtgatactgagcatgcttgtcttcttatctgtgagccactgtgcccaaccaagaaaaatcatttgattatttcaatcctagcacttggggaggccgaggcaggcagatcacttcagctcaggagttcgagaccagcctggctaacatgaagaaaccccatctgtactaaaaatacaaaaattagctgagtctggtagcacacgcctgcaattccagctacttgggaggctgagacatgagaacagggcttgaacccaggaggttgaggttgccgtgagccaagattgcgcctattcactccagcctcatgtcagagctagactgcctcaagaaagaaagaaaaaaaaaggatttttcttgttcaaaatgataatggagtgacatcaaaggatttctgggttgtgaaaattcatagtaaaacccaccttatcatataatactattttaatatattttgaatttatcattttacctaggatttttgcatctgtgcttgtcattaaaataattttctttctatgtatatctttgtttacaatcaaaactacagcagtcttttaaaataagctgggtaaagttcggtctttgtttcctggagcaaattatattaggtagcagttaactgttcattgaaactttggcagaattaatctgtaaaagtacctagacctgaatagtctttgactaccagtttaatttctctaacactcactggactattcaaattctctctctctctctctcttttttttttttttttttttttttgagatgaagtctccctctgtcacccaggctggagtacaatggtacgatctcggctaactgcaacctccacctcccaggttcaagcggttctcctgtctcagcctcccaagtagctgggattacaggtgtccaccaccacacccagctaatctttgtatttttagtagagacagcgtttcgccatgttggccaggctggtctcaaactcctgacctcaggtgatccgcctgccttggcctctcaaaatgctgggattacaggcatgagacatcgtgcctggccaagttctctttcttcttatgttaatttgaacatgctttcgccatgggatgtgcctgctcccctttcaccttccgttatgagcataagctcccaaggccttcctagaaactgagcagatgccagcaccgtgcttcctgtaaatcctgaagaactgtgagccaatcaaacttcttttctgataaattacccagtctcaggtatttctttatagtcatacaagaacagcctattacaatatatgggtatatacatgaatgacaaagaatgtctccctgatcagactctggacagcctcctccgagctctctgcacgactgggcccaacctgggcattccttcctctgttcctgcagagtctagttttagcaagaatcctgctaagtcagtttaatcccaattccccacctcaggtgtctgaataccctccatatctgaccaaattccaacacctgctccaccccacccccatccccgatgtggatcaacttggcccaccctcagcaggaatcctgttaggtcagggaagccagaacccccacttgatgtccccttctcaatgactttccatccaccgtcccccacactgctccttggctataaatccccacttttccttattattttcggaccccaatctctctcccctgctgcaaaacctcagtgcagtcccttacatctaaggaaatggttctgaataaaagtctgtcttaccgtttttaaaacgtcagaatgttttcagatacgtgtgtgtatatatctccatatctgtaaatatatataaatatagatatagatatctccgaagagaaggttttccaatgtgcactttttcttcttgcacattgcgatcttaaccctcaagcacatctggaaaaagcttccatgaggatacagcctgggatggatttgtgggcgaggtgtagaccacgataccgggtaacgtgccctgtgttttctggacacagaactgtaagatttcaaaaagacccaatcaatgattctaacccaactctacatatatttactcaaacacagtattcctccctgactagtggttaacggacttgctttaggcggccccagaggcggtggccagtttagccacctcccgaggaacctgcgcagtcccgacgctcaccaagcgctttcctggcggttacagggttgggggcagcgcagaacccgcttctgcccttatcaggagcccggacctgagctggactccaccacctcgtccccacccaccctggaagccagaaaccccaagcatcctccctccctcccctgctggccactacgaataaaccagacatacaattcgcgcctaacggcttagccagaaatgccacccgcagtcgggccccgggccggaaacctccccgacgcggggccgcgtgcaggggaaggggcgggcgcaggctgcggggtcggcacggaagatgcacgcgaggctcctggggctctcggccctgctgcaggcggccgagcagagcgcgcgtgagtgcggcagcccgaggctgtgctcacccctgcagcccctaaccccaccccggcgccgggagccgcacaggctgcctatgcccgggcgggcactgccccagcctgcgcccagcactgcgcgccggtgacgcacggtggtggccatcccacctgcagagcacgtcctcccgtccttagtagatgcccacgcatgcaccatccccccaaggatgcatgattttcctccacccatgctcggttcccccccctcccgactggtgcttgacttcctcccgcccatgcacgatccccccgccccacgcatgcaagatcccctcgcagaagcaggggagatgtatccgcccttccttccatcacaagctttgcaaagtgctgcgatgccaagatgtgctgagcgcaagtctgggggcgcccgggctctcccccgacccccggccgtccagggggaccctgcgacttggaggccgctcgcagaaggggtggcggggggagggggacagggctccgcatccacgcggccctgtaggacggcgactccgcttcggggtttaggacggggcgggacgcggcccttcgaggccacctccgtcgcagggggaacccagagcccgccagccgcggcggagcaagatggccccatttttcgcgcccttctggtttgaacgcgtaactccttcagtgccgggaggagcgtctccgcccacttccgccgggctccctgcggaagctttttcccgggcagagtccctggggtggaagagggggtaccctgggaacgccgccttgggacttttccctgagttcgcgggcgtccccgcaggtcccgctgcttccgaggcgcgccgagcaggacgcacacggaggacgcgcaagcgccctggctccgcgccccggactggaagggctgagacaggacctgcgggggtcggcacccaccccaggtgtcctcccttgccctccagctgggcacggactgggtgtcagcattccccagccctgcagcaccgaaggcttttcgtgcaagggaggctgccgcaggacgctcggggtggtgacagccggacccagcctgggcgctaagggctgcctgagcccggaccccgcggtctagagctgcagcgtctgcagctgtacctcagggcagttttcccagtttccctaaaatccgcggcttgtgttcattcatccacttagaactttactattggaaaacctaagtaacagttgtgtgaaacgatgcctgtgtgcggtgcctctaccagcgcaccgcctccaagatcagcctcagacaaccctgaggaggccgtgctaggagtattggggaggcccagagttccaggccagggagttccccatgtgaaagtaggagaaaagggaccccacagagagagctgtgaccccacagggactaacggtttcgtagtgcggagttactgactgcggagtgcacattctctctccactgcgtaaccaccatcaaaaacaaacaagcaaacaaaccagagaggaggtttcatcgttctcgaggatgcacaagatgctaggcgcttcacacatgtcgtatattgcccaacagctctggaaagccctgacaatgtcatttagtgaatgcctgtccctgttgccagaggctctgctggctcccagcctgctcctaggagactcttgctggtgatggggacactgtgttggttggttactgttttgttttgttttgagacaagagtcttgctctgtggcccaggctggaatgcagtggcccaatctcgactcactgcaaactccgcctcctgagttgaagccattctggtgcctcatccatcccgagtagctggtattacaggcacgcagccagcaaacttgctcatttttgtatttttagtagagaggcccagactggtcttgaactcctgacgtcgagcaatctgcccacctcggcctcccaaagtgctttggttttgtttttaatgagataattaggtgtggccacaagatgagacacaggagagactctggaaagcaaagtttgctgtactcacaggtcctaggacaggagacatggcacaccatgccgggccacaggggaatgtcaccagggtggtcaggaggcaggagacaggaaccaggggaagttgaggccagacgctttgctagggcagagcaccagcttcagattagccctttgaataatttctgtggctttggggtataagggtggtccctagtttcctggcactgggccctgggatgattaaggcaaaagaagattgccttctgcgggggtatgggccaggtaggggaggtctggctctggctagatttagttcgcatgtcaaaggcaagctcctggctgggccctttgctagctgaaataattgctagccttgggagggacagtcactccccagccagaaagattttaagaggtcagaacatcataacatccagaaaatgttcagttgtttaaaatgcaggtacccagtctcactccagccttccaacaacctgcttgcctttccccttctcacccaggcctttacaccgtggcttactacttcaccacaggacggcttctgtgggggtggctggcccttgctgtcctcctgcccgggttcttggtccaggccctgagctacctgtggttccgagcagacgggcatccagggcattgctccttgatgatgctgcacctcctacagcttggtgtttggaagcggtaagaacagctgcctctttcacctctggagcacaattgcacaagtgcagtgagaggaatcttctctccatgtggattctgtcctcaagctcataaaagttcagcattgggaagaggttcaaagcggccacagcaaacccctgctctgatattggcatgcccgggtccagcctgcacttttttgagcatctccaacctcaggggctctttctctgtgaagctgtgaccttacgaaaggctttttcttgtcttcagatgaagccctgtcttgctgttttgatttgttggttgagccgttagttccatataaagcaacttacttaaggcagttccatctgcacacctgtcaccttagaacaggaaggtggcatagtttagtgaaccacagactagacaatgaagccagcctgttgacatttgcttcaagacttcgtctcaggaaaaagtcatttggatgccagggctagttttttctctaaagaagtagccagggatagttctggggcctggtgggcttatccgtgatccatagaccatcacgacaggtgagggctgatttttttctactttgagaacctggattcaaggagctatgagaagagatgtgtcagtgagtttatatcaagggcacatttcagctggcagctgctgcctcataattccattgggttgttaggtttgtttttttttttttttttttttgagatggagtctcactctgtcacccaggctggagtgcagtggtgtgatcttggctcactgcaacctccgcctcctgggttcaagcgattctcctgcttcagcctgttgagtaggcgggactacaggcacgtgccaccatgcccggctaattttttgtatttttagtcgaaacagggtttcactgggttagccagcatcgtctcggtctcctgacctcgtgatccgcccaccttggcctcccaaagtgctgggattacaggcgtgagccactgcacctggccacaggattttttttaagggagaaaaattcagggatcagagcggtgaagccctgcagctcaagtgttcattaaatcataggcactgagggttggaaaggtgttcaaggggtcgtggccaatgctgctgtgtgtcctaggggtttatgcctgcaagctattcccaagactttctccggaggcactgaaatgagtgatgagccccacatagagcatcactgtgagcagggaatggtgccgtcccgcccagagtagaatctcagctaggaggtagagggtgcttctgagaaagacttcaagcacccactctcagtttcactggaccctcagagttggaccctaaacctctaacagcaccgaaagcatatttgcagccacaggcattttgccaaaagctcggccttggtgttcaagcagtgccgttcccctgaaaagacagggcccttccttccatggcggagaaggcagagaaggatctttcggagggcctcatagggtcagagcctctcctgtgccctagctgccattgtcgtctccttccctgatcggcccagcccagtaatcaatccttaagggctctgggtcttacttggctttgaccatcacagtcgtaaggcatgagccctcgaggacagaggcctgttgagtgagtcagctaccatgagcccatgtttggcagcccaaagagagaggtaagcccaggtggtcacttagagaagcttcctgggtaatgaacggttagacaaatctgccttctgaggctgtgtggaccctcaggcctcatggaatccactgccttcctcagagatgagggctgccaggggaccacggtgtgtccaaattcatgctgctggtatttcacagtggaccccacactgtctttcccatgcactcttaattttcttaagtgatgccatgattttctggtgtatataaaaaaacgaacttgaataatctggtatatactagtgaaatcatatagataagtgaagagatacatgaaaattataaattaggaaaaaccattagtcatatatatttattcttgttttgaaaaagaagttaagatgactttaaaaatacacatccttaaaagaacaaaaaagaaaagaaaagaaatgagaaaggccaggtatcgagatgaaatgttagaaaacaagatagagccagaatgcacagctatcggaagcgggtcacaatttggccctaaggtttataacagccagtgcaagcataaaggccgcaagatttgcagtgtttctcaggttaaacatgaaccaaaaaacagaaatttacttccatagaggaaagctttgaaagttaaaatagacagcagtggatccattcctcatcctgaaactagcacatagggttcaaagacaacactgagtgaagcagtatttttagtgaggcaatccagctttccaaattgcaattctagaaaaggacctgtagggggagccaaaacaattgcgtttggcacaattttgaattgcctaagaataggtcactttgagtgtcctcatcacaaaatacaaaagaatctgctaactgagaatccagtaaaacacaaagttgcttataaaaatgcaaggattgaggcctggcgcggtggctcacgcctgtaatcccagcactttgagaggccgaggcaggcggatcacgaggtcaggagatccagaccatcctggctaacacggtgaaaccccgtctctactaaaaatacaaaaaattagccgggcgtggtggcgggcgcctgtagtcccagctacttgggaggctgaggcaggagaatggcatgaacccgttaggcggaacttgcagtgagccgagattgcatcactggactccagcttgggtgacagagcgagactccgtctcaaaaaaaaaaaaaaaaaaaaaaaaaaaaagcaagaatttggcctggcgtgacggctcacacctgtaatctcagtgctttaggaggtggaggcaggctgatctcttgaggccaggagttctaaaccagcctggccaacactgtcgaaaccccatctccactaaaaatagacaaattagccaggcgtggtcacgcacacctgtaatgccacctactcaggagactgaagcatgagaatcgcttgaacctgggaagtagaggttacagtgagctgagatcacgccactgcactccaacctaggcaacagaatgagactcaatctcaaataaataaataaatataaaaaggcaaggatttaagccataagtgtattctttttaacgttcccaataatacatactatgttcattttaagtctgactctgttcaagagaacctgacattggtgaccacttatttaaacaaagaccattactttcttctacttaggttttttacttacactttaatactgtatgttaccaacatctttttcatctttctttttaagcccacaaatccacttgtaaatgcagcatgagatgacagaagaaggcctatctcatccttagcatgcaccttggtttagcaatttttctttagtgaaagttcaaggttgtcaaaaggaaagttaaggtaaactctaaaggtatgtaagacaggttcagcataaatgggtggagatttaatatttaaaagtatataaaatatagccctagccctggagggcccagtcctgcctcaggatccctcgagtgaggcttgaaggctgttgcgatttccatcaatgtagggagggaacaggcgtttccgacacagcaagctgcagccgctggtgcaaagacatagatgcgtgccagaagtggtgtatatgggaaattaggatgaggttcttgagactaaagggtaagaatttcctagatggcaggaatgtggcaggagataaatgggctggaccatgaagaaacttttctactggattaaggagtttggattttatcctcaggcattggagacctgttggaagggtttgagcaaaggaataatatgggcaaatgagcctgtagacagatggcaccagggacaataaaatgcaacagagttgggagggacggggtccatgcaggcagccagaaatccaggcaagtgctgataaggacctggaatgatgcagcgactgtgaggacagatgtcggacaccatctcataggacctagtgaccaaatccccacgctctccatcccgcctcagcttcctccccggcttccctagtggctgtccaggggtctcagcctgaatttctccctctgcaatgggttcgagacagctcgtttcagaaaaccgggctagtcaccttcccactggtcctctgtttcttacaagagtagccccacaactcagcctctcctggcccccgccttaccaagcaccagatattcgctattcccagacatggaccttcatttcagtgccttgtaccctgtgccactgaccccagacactcctttaggctcttcctaccatctacctgtccagagtttgcctgtcctcctcttccaggaagcattccctgaccaccttattctctctgcctgtgactctgattccaccactacccaagccactcatgttgatacttatatttcttcctcttgaagcttttcgcatttgtatgttttctttccacactgaatcttaggtttctaaaagacatctttcatttcacttccccccttttcttttttttcacgagagtcttctgcctctgtcacccaggctggagtgcagtggcataattatggctcacttgcagccttgaacttctgggctcaagtgatcctcccatctcagcctcctgagtagctgggactacaggcacccaccactatcccagctctttgttttgttttgttttgtagacatggagtctcattatgttgccagggctggtctcaaactcccaagctcaagcaatcctcctgccttggcctcccaaaaagctgggattcatttctcttacttcgcctgtggtctgtagcaggtgggcctctcaaagcccaagaaaaatgcatgttgaacaaacaaagctttctggaagagcaagaagaggaaactaccccatgtcaggaacaaatgatttgagagtgaaaagaaaactactgcctgccctcatggttacattttttagtgtcatatgtttttcttaacattaagtttatgtcaggaatcaagacacagtaagaaatgggttcactccaggattccaaatcatgaaaaaggaaagttgtttttcttagacatctgtcctgggatctcagcaccatgaataaagccatttcaaagaggagtccccgaatcttctgctctggacatagaaatgtttgccacccatcagggtccagcttgtcacctgccagtcagagccttaggggtctctacagggagttttgcaggtgaccttcgagatgcatccagcttggcttcaggagttgctaaattgaagtgacctctagttcttaaattgaacaagacagggaagcagaatccagtgggtttgctgggcagcaggctcgtgtgcaggcggctgtggtcatctccttattgctgctgctaggtagacccagagaggaattggtgggtggtggcgaaatctgacctccaggtgagactcgaagcctgagagcccgctggtgtggtggggagtggcttcgtggtcatgggttctatgtggatcttcaggttgtaaggaaggtggtctgtgccactttctacttatgagatgaagtttccagtaaaggtgcctggcataggctcatgggaaacagactgaagcaaggacatgttctgacttctttcttgttgcttgattccttttccgagagcctcggaggaccacccaggctgggtgagcagatgtgtccccgtggccctgggccaccccatcctgtaatccacagtgcagagatcagcagctctctccgctgcctggttctcggcttccacccacccttgctggtgtccctttcgtatccaggccccttagtgggaacagtccccagggtgctgtccttggtctatgctgtcttcacacagtctcttctggccacttccagtccctcaaccacaactggtcatccagatctctccttatgggggctccacccatcctcacattcctcactgctgaagaaattcatatcgtggccaatccagcactcctcacctggcttatttccgtcggtagcaccaccatttccaagtcatttaggcctgaaacctcaaagccactgcaacttccctcatctcccctgttcagtcatcaaatcctgatctccaactccactatttcctgcacctgctccctactttccattcctaggactcccttcaccaattactgctggaagtattctattagctctgtttcctcctgatgttcctatcccctgttcatacacccacactacatgcgtgcacacacacacactcacactgcacacactacagatacacactgcacacatacatgaatatacacacatataccttcatgcacacacatatataaacatacacactatatatatgcaagcacataatgcctatatacatatgcatatgttttgcacacttgcacacacacatgcatacatgcacatgcagatacatacacacacacacaagcacatgtacaccacatgtgtgttcacccatatacacgcacatgcacatacacatacatagacacacaaatccatacacattcatctcataccccagacagtacatattacctctgccaaattcatttttccagagcaaaatccaaaccccatagcctgaagttcagggccctgatctacttcaccgggaccacatcagcctccaagctccgcatggtgctccagccacctggacctctggccactccccagcaaagcctccagatccttcttccctgtctgctcttcatgtgccccagttttcgcagcacagagttctacattctgtgaggatgaagacaagggttttttctactttttgtccttcaaagagatgataacacacagtaccttgcaacagacatctgtcgataaatgaattcccatcccaagaggatccggggtgggactcaggtcggggtgattgccgagcttcacagagctggcagtctgggttcccttgccatgcagccgctccagctcaaagagcccccaggtcaggtactggggtaccagacgtggggagagtgtggcctggctgagcaccacaggactcggggaacttacatagaagtgacgtcttctgcttgcagtcagaggctggcaacagcctaactagtaactctaggtgactagtaagggcataggatattgcttagcatgtagtatgtctctaaatgaaagctcgtcctattgaatctcgccacagcctggctccgtgtcacgtgccctctgctgttccctaggcactgggacgctgcactgaccagtctgcagaaggaactggaggctccccaccgaggctggctgcagctgcaggaggccgacctgtcggcccttcgactcttggaggccctgctgcagactgggccccacctgctgcttcagacatatgtttttctagcctcagacttcacagatattgtgccaggtgagtaactgtcaccacagagcacagactgtctgactgccgaagggggacaggaatgtgagcctgtttagcaaaaccctcccttcgagatttcctctgcttaggagcattagggcaccttgagctcactggcacagatgatgcttaaaactggcttttgctggtgcattgagtttacagagagttggctcccttctttcttaagggtcatgttctaaagtcagcccataagatagaaattgcccataatcaaaattatcctcaaaatgccttggaaagactgcctctccataaactcactgcacatgtttttcttgtgtctttaatcattagaataattcttggccgggcacaagtctcacacctgtagtcccagcactttgggaagctgaggtgggtggattgcttgagcccaggagctcaagaccagccaggcaaaaacccatctctaccaaaaaatacaaaaattagccaggcatggtggcatgcagttgcagtgccagctattcaagaggctgaggtggtagcatcacttgaggccaggagtttgaggctgcagtgagtcatgattgcatcactgcattccagtccaggtgacagagtgagaccctgtctcaaaataataataataataataattcttaacaaagccagaggcttataccttcaaagccatgtggaaactgagaacaactcaggccccagcaacatttgtctccagctcccactcatttcaggccattcacattctcattatgtctctccctgtttctctcagttgcttcttgtttccctctccctctccctcctgctatccccttttctcccctccccttcacccccttctctccctccccacctctccccttccatcttcatctctcccttcctctttgctgagtgtccacaattgcatatgcacaaattaaatgcttcacatatatgcctgcactgtccttccatccatctttatcaaagagcctgacaccatttgatgttttcgttcttttattaaacctccttcatatggataaaacagcaaagtacatttggggtggaaccatgttcagagccttgtagaatcagctttgttatatacagaggacttagaggatcaggagctgggacgtttttcttaaagggcgtagaaaggaagagtccagcccatttgctgggaagagcatttagtacattgagcagtggaaatatttcctgcatatccccatttcttcctgaatatagacaggtgtatttggacatagagttgttatgttacctactggtcaaagtggtgggttagtaatactctctgtgcagccaggctttaacaagaggttacacatcccattaaagaaatgccatgagtgaatcttcacaaggtactgttacttcggaatcttcagagcataccacatctttctgcttccctttcaggggtgagcaccctgttttcctggtcctcactctcctgggcactggtgtcctacactcgcttcatgggcttcatgaagccaggccacctggccatgccatgggccgccctcttctgccagcagctctggaggatgggcatgttgggaacccgcgtgctgagtctggttctgttctacaaagcctaccacttttgggtttttgtggttgcaggtgagctgagctaatgatctggtcatctgttgctgcataaccaatcaacccagaaatgaaggtctcaagaataaccacatatgatcctcaatcccaggcctgaaggctgactgggctctctgctgaatggatcttgcttgggtggcctcagagatggcaatggggtagcagatgttcagattcataaagagccttgacaggaattagcagctgagaattgcaatggcaaggaactggaaactgctagtcttctataaaaacaggctcagaactggctcagcattgcttctgctgtattctgccagtcaaagcaagcacaaccagcccagattcaagagcatggaggactagactgcagctcccgatgagtacacatccagggcaggaaggaacgcgtgctggctgtcttgggagatactctgccatagcttagacatcccagccctcaacactcccagctaaatctggagcagagaacttctcaggagactgttctgtgttacaggccaaaatcttttatgtagaaaaactgtcactgaaacaggagggaggtacaaggtcccacttgcctcacctgatataaaaatatacagtctatatgtcatactgcacatagcttccaaaagtgcaccatttcctttgaatgctgaatcttggacatctcctctgttgcaaataggacagctccactaaatccaagccctccctcctccctcagtctaggcacacgcaatatgaatggcaatgacagagagtctatctggctctggagattccctgaatagggcctgtgtgtccctgccgaggagagctgtcatctctggtcatcagtgaatatactctgcaagaaggaacagtttactcttgttttaagagaattggagacattaagaaatatttgccccttgggcctagagcaaacattgaatacagttattggccaaaaagataatttttttgaaaaaaagaactgtgcttctaaagagagattagctattttgttattctttttttaaaaaaaatcagcttgaaatccaaaatgatttattcgtcttaaaatatgggcataaaaattaaagctgcaccacatagagttctttcctttgcatgtggaggttttttgctcttgtaacaattttaaaataattggcagtcagttttataactgcccctttaaacactttctggaataaaaaggtcataggtatacaatatttggcaagtgttattgaagctactctttcttgtgtcatattcaaattaggtcagataccctttataaggataaaatgggataatacatgcaaagataaactgtgttggttttctgtccccctcaaatctcttctgggttttgatatctcttcttggatgctgagtcaaatgtggtcggagagccttccagcccctggtctctgtgtccttgcctgtccccccatctccttgcatggaccctgacgtctgcacccggcttctctgcaggtgcccactggctggtgatgacattctggcttgtcgcccagcagagtgacatcatcgacagcacctgccactggaggctgttcaacctgctcgtgggggccgtgtacatcctctgctacctcagcttctgggacagcccttctagaaataggatggtcacgttctacatggcaagtggcacttttctttatcctaacttttacagtgtatacagcaagtggggtgtgtgtgggtgtgtgtggggggtgtgtgtgtgtgtgcaccaatgcacacctatctattgaaaaggaatagcttagtttaagaaaaattcttaaagaaatgatagtcttgaacagagatgacaggctttgaaaatagtaacccaacctccagctgtggccctgcattcaatgtggcaacaactgaggcatatttggtgatgtcttctctacatcagcccacctgctgaatatcattacagttcaactgtataatatcatatactcaatgtctctgttaatcaactccatttttattaggggtttatgaataagatccaggcatggccctagagagtatcagaaacacaaaagtggcctaatacttcttcagattgctttgagtcccgtagagatttcttcatatttgaagaacttataatatttggtaagtaagtagacacccaaataaccaaaatcagacagaacgtagctagatgccaggagagaaaaaaatgtctgggactcataggagtagctgccagcatcacctctcgtcaggatgaccacagacacttttggcaggacagtggaggttgagctggattataatgggcaaaggagagaaaatacaatcacattggtggggcatgggttttagagtcagaaaaaacttgcactggagcccagctctgctgactgctaccaccagctggcttcagccaagaatttaaactgtctgaacctactttttcatgcacacgctaggaataagtcacccccctctcagtgttcctgtgaagattaaataagatctacatactcttcagggttcctgtaaagaccaaataaaataatatacataagtagctggcacaaaataacccataaattgtggccattattcatatgaaaaggagagacttctgtgggaggagtcaggcattccagggtagagacctgggtgaaggtaaaggcaggatgcagctcctgtccaggaaagggaagcgtcctagacacctgctgattttaggacccatatagcacagtgaccccacaggctatagagccaggcagagctcacaggacttgcaatgttggacacattactgagcctcaccaacctcagcgtccacatctgaacaccgagcataacagcgtgcgtgttgtagataggttcacttgtggcagggcccaggtcatgcatgagcagcctcccaaccaacatgatccccaagtgaacaaagaagtggaatattgattttctcatccaatttgctgaagtggcttattcataggtggacaccccgcctgccaatgcccagataagcaggagctcaataaggaggagtttgacacctgccaccttgtttgcttgcatttgtcacactcacatgtcagttgccgtgtcatctcccaggagtttgagggctgttagagaaggaaagaaagcaaatccttcattcttcccaaccatctcatacagtcactagatcactgagtcaagagcgattaaataggaaaagcagaaatcagacaccattacatttggagtgagatctaccacagtggcacgagtgtccttatctctctcgctgtgcacagacccatccaggccgggcagtcctagcccgggggcttggatccctacagcatgtgatggggaacatgggctttaggccttgctgcccgaccagctaaggcttgataccaggatccttcggttctgaactgtatgagagtcaccggggctccccctgcccccacacccagtttttgcatctctgaaatggttgttgctaggattgataaggtgatggatagaaagccaagagcctggtgcctggcacaggtagatagatgtagatgctctgaaagataaataaataatttacaataaatgaaacagacatcgggggcaagagagcagagaaagaaggaaaggaggaaggaaggaaggaaggagggagggaaggaaggaaggaaaggaaggtagggaagaggaaggaaggtagggaagaggaaggaagtggagggtaaagatagccaatatcaccataaagaggtgaaataacacataactccgaggataacctattaaactcctgacatttcaagagtgcctgccagtcacattctgaggtggggctgcaaccatgaaactgaagaaaaggcggagatgacaggtggacatgctcacctcgcacttcaccatgcacactgcccagacctgagtctgggcccctccctgtgccaggcagtgctgggcagccctggctccgtggcacgggccattcagagtgtgaggcagcctctcccactgttcctcaacacccccagctaaactccattgatccaatgtggctgagtggccagcacctgaaaccagtgcctctgggcaggttagaaatgcccagactgtgatcttggaagcctgaggccacagtgcagtggacagactggggcgccactccctgagatgtgcaccctgctggcacagacccgtgctgccatccgaaagcattaccttctgcggagggtgccgggacccacgcagccccagccctcgagacagcagctcacacaggaaagaggctgccagaccccaggccctggatgggccccagaagaagctgcaattcctgtctggaagccccagacttgggcagcgtagcccagggccaacccaagcatcgctcagctatgttgagcctattcctgggccactggagagtgtaccacccccacatcccttcaagaaggaacataaggtgttttgtatttgcttttgtttttctgagacagagcttgccctgttgcccaggctggaatgcagcagtgtgatcacagctcactgcagcctcgactttctaggctcaagtgatcctcccacctcagcctcccgagtcactgggatcacgggtgcataccaccatacctggttaatttttatactttttcgtagggcctttaaccaacaggccaccgcctggcagtggttcagaggtttctgctggaacggtctggcaggggctgggggctgggggcctccagtgcagctgggcctcagccctgctggttgtcagtggcactcaggggagcttttataaagtggcgattcccaggctccccctcagagattctgtctcagtaggtgtgactgcaacctgggaatccacgtctggagacagccacaggtgacactatgactggcctagctcaggatctactcaactgtcctcacctcctgctcagaggcggaagcctgcctgttgatcacttctgaatgtaatataagaccccgtctcacttctttcacccgttatgggtttattcacatcagcacacattgagcttcctcctgtgctgaaaatggagttagacaccacagtgtgagagggtcatgtctcagtgccacaaagacataagcaaatccatgcagccactgtgatcagagaagtgacgctatcaaaaccctacaggacacaagaggcagagcttgggaaagtcagggaagggtttacagaggggacctgcacgatgtgctatgtggtgagcaaggttcacctgaagaaaaggtgtggacggcgctagaacgtttcaggcaaagctgcggaagtaatggaaagaccctggagtgtctggaaatccacaggaaagtgagtgcgcacagcgtccgagggaaaaaaagccctgcgctagttaaaagcaatgaaaacagattgcactgagtgtatcgccatagggaagagccctgcatgaactgaacccaccttcaagttgtgcagaggtgacagggcttaaaagggagaaaaagggaggaaggaggaggaacatccgggggcttggccagagacagggaagtggaaatttacaaaaagcaggaaagtgggatcgtaaatgtgagtgtgccatctgtgtttgttcattggcgcttgtcacttgctgggagcagaaacaaatttctcatttctttatgacaggaggcaggagtcagtcctgttagggcaatgcacccaccaggcttggagtttgtatttgaatagatggctcttgggtacttgaggagacagttctgggtaatagaggatgtatatctcagagcgcagcgaaatgatttgcaactgcaagctttctaaaggaactgctcggaaaggaagtccagggtcctatccacccagcaccaagttttggctggaacaaacagtaccttctcctggcagcactgcgctttctcaggcaggaacttaaaggagactgaggtcagcatcgtaggggtgaggccttgagctgctggaaactcggtcagtgtttgttcaagtctctcggtgtggggaggtaaggggaatcatatgtgctgagtctggagttctcgttggccagggttgaagactcatggaaaagaaggctcagagaaggctgactggagtttggttgaggaaagactgtttgtcagtggaatgtcgtttgggaagagcatgctggaagatgaccccagaaaggaaaacttgcgctaagtggcaaacaggaccatctgctctgttgagaagtagggactggatcctgaagttaaggtggggctgtttcaaggtgcatcggggaggaatggcaagatgcaatctctgggtgaagtgggtcaccctgacattggtgtggaggagagatttcagagagagaatgaagataggggttgcctagacaggaggcatggggccagaaccacggaaatggcgggaaagacaggaggcaggtgacggagttgggacaaacttaagaatctgaaccaccagaaccacacagctgaggagtggggagagaaagatgccttctgtactggctgctggccaaggcatttagggcagaaaccctgcccattgcacacagagggactgggagaatggatgttcataggattacgaagcagctcctcataattttttttatttctctccttatttgaatttttgagagtgaaaaacgaagccaatgaataacctggcaaatcttttgaagagttttagcaaatcagtatataatttaagtgttatttttaaataaataaaatacacagtatttaatataaatatatattaaatatattaaaatatatattaattatattttaattaaataaaattaaattatttttaattaaattaaataattatttaattaaataaaaataaattaaaatatatattaaatataaaacacacagtatttaaatatatcgtctttgaattatgtcatttgtttacttattttaatgaagacgtatctttttatatttaaaaattggaaagcaaagttaataagctgacccagatgggcgtacaaagagccttctggaccatctgccattttgaccagctgcagccacggggccaggctcctttgtcagcctgcgagctcccgtctccggctgccacctggtggccgcaaagcaattattttaaggaaacaaaatcctaaagttgttagaaagtttgtgaccctagctccctggaattcagtggcatcatgagctctgcagctatctttcattttaacactaatgagtgcctgcagttagtgtgaggatggagaaatatgcaaagtagaaaataaaagtcccctctcagcccataatgactctctaaaggcagccccacagccatttgagggatgcccttacatttcctgggcctttatgattctgcagacactttaatgagccaccctgagaacagggtggctctctctttgccagagaaggtctcagtgggacatagccctgctcctgggtactcctcagcagcctggagtctccagtgggcactcaggatggaggggagggggagccgctgcagactcacgggacgggggtccctaggcagtgtgcacctgacgaggtgtggtgcctctgtcctgggtcccgcaggtcatgctgttggagaacatcatcctgttgctgttggccaccgactttctccagggggcatctgtggaccagcctgcagaccatagctggggtcctgtctggatttctgattggtaagtcccaatgtcaccttcttctctgcatcccctccccaacgtattttttttttttacaatgggctcaaagggtaggaaactgagttcagatgtggttaactggagaccaaggaaccaggctcactgcgatgtggggggcagagccatgcccatcagagcatgagatactgagctcagcctcatctgccttgcttgactgtgctcggaacctcaagcaaagctggggctatccctctctaccccaaagcccccgtcctccccggagcttcctgcagggttgaggacgtgacttctctctcccctcccacctaggggagctcctcacatcttcctgacatggcaccccctgcagcccatagacaagcaccccgggaagtgggtgccctagcagaggaggagaggaaggtgaggcacagaggaggttgagtccccgaaagatccaatggtttgtaacagatagagctgagattcaagcccagctccagtgcaggcctgagcacaggcctggcactgtcatcagccgtgttttatgaatgcatggccccaaggtctgtgtcacacccacggtgatgacctcgcttcccagattggcatgagttccgcagggattccgccccccacttgaaaggtgcgaacaccagcctcctctcccagcacagcaggcttccaccactgtcactctcaggcctgcggtgggaccgtcaaagccagcacctgcacctctcacgtggggcctcgtgcttctgcaacatgggccaggacagagattccccagtcctctgcaacaactcctgccctccctccagagcctgctctctgtcacccacaccctgaagaggtgcctggaagtggcctcgggttcttttcttgctcacagcagccgggggttggatgtggcctgtgtgagtggcctggacctgggaaaggaatgacctggacacaaacacttagtgagatgcaggggctgttcacgggtcagagaaatgtcacacactgtggcttcgtaacaagcatttgagagccacaggccaccctgggtttcagctctgttcttcttcatgagacgtcacgggtcctcacttcttccagcttcaggtagctgagacaaccccttctttttcaaatcaaactttttagataattgtagttttaagaaataatacagagctccccgtacccattaccaggttttcccccagtggtaatatctcgcaaaacggtggcacaacatcacagccaggatctcaaagtagtacgtcgaggtgcagggagaacccttccatcaccacgaggacccttcatgtggcccccttcctctcgcccctgccacctccttccctcctggcaaccattattctgttctctgtttctattattctatcacttggagaatgcgttgtgaaagtaccacacagtgtgtgcaccctggggatcggtcttgttcacttggcagagctctccggagagcctcccgggttgctccttgcttttgatggctgagtcgcatcccatggtttggacggaccacagcttgtttcatcgtcgacccatggacgggcatctggttcatcctttttaaaataatcatttgaatcgcagagcattgatttctaagctgtgtgtgtggataaatggcctatgggaaactgaggacatcgcgctgcccgggtgagaagcaccactctcaccacattgcatcgtggtctgggtgttcctggcatatttcaagcaatccttccttcagggaggggccatgtgatacttggaatgaaggggccttgccggccgggaggtctaacaactcatctggattttccagttcacgggaggtatagctgagtcctgggggcagtgtggtgggagggaaaatgtcccctcatctactttctggattttaacactgactcagaaaagatgtcctacaccactccgaaaacctgtcacactcctgagagtggatgcctggtttccttccagttccactccagtgagaagacattttcacagccagtatgctggcccacggcacagctggagggcagtgagtagggagtccatagccacgggcagtgagtagggagcccatagccacgggcagcactcagcacccaggtggccaccggctcagagccttgtctgccgctcctcctccggcctctgatggagctgccaaacccctgactcccagccgacccttgggaatcctaggcaggaagattgaacccaaattgtagtccaaggagcacaagcttgcatccaggctcctccccttttccttccatcctgggaccaatattcactgagtaccaactgcgtgccagcctggggatgccaccaagaaccctcaaaccacatggcctctggaaagattgtgttcactgaataagtgtgcccaggacttctgtgatcaggggcctttgttcatctttcctggccttgggtggctgcttgtaaaagaagggtgacaatatgtccctcaccaggcaattgtgagaattcaaaacagtgcagaaactggctgagcaggacctactgcagaggtggcactgaacatggagaaagtccacctccctttccaaggttggagcctggccactaaccagctgcttgatctgggtctcccagtcccccaagacacaagagaggatttggggctggggatgtccttcaggcagtctttctagctctgtcatgctgcaatctcctggccttctcaggcattacttcaggttttgtgctgtttataatgagcaccctgaaaccaggcactttatccagtacaacaggaaactggaaataacgtgggaggcttactggaatgctctgttaaagaaattattgcagcagtcaacacttctgatcaaaataaattaaactgacaacaatgtgattaagatgtttatgcacaaaggaagtgttgttgttgttcatggaaattccttgatatggggtttttgatgaatctgattaacctctgtttaggtcttacttgtttttgaggttatttcttaatgccctcccttcccccagctttgtaacccatcaaccactgtattgacagtcgaatttgcagtgtatggtccagttacttgaaagtagaatgcttatttctgccaaacattttgtacctgtgtgtacacacgcacacacacatgcatgaatgcacactcacacacacacacgtagatgactgaactggagctgccctcaagacaaaagcatagaatcaatcggatttaagccttgttattcatgtttaactttagaaacatttacagcttacagaagctggaacctacttaaattcccccgaaatatccagttctgaggctccaacaagagtcctattttggatcccaaattatcttcctctacacaaaagggccagaacctgaaactgcacaccagagggaggatgcagacttcaaagaacataaccttgtggtctttttgttctttttcaggcagtgtctcactggtaatttattacagcctgctgcatccaaaatccacagacatctggcagggctgcctaaggaagtcctgtggcattgcaggaggtgataaaacagagagaagagattctccccgggccacagatctagctgggaagagaaccgagagctcaggctcatgccaaggggcaagttatgaaccaaccattttagggaagccccctacccctgagcaggtccccccagaggctgggctggggacccaggttgctgtggaggactctttcctcagtcatcaccactggctgtgggtgaaacttgccctaaaaacaggaaatgtgtctaagatcaatgccgcctttggagataacagtcctgcctattgtccacctgcatgggggttgagtcaacaggactacctgcagagaaaggccttgtctgcccagcaagagctcccatcctcatcccgtgacccctcaaccttagagaacagctctgcgtttgaaggtgtccctaaagcagaggccgacccattggaaacctcaagttacgtatcttttgccagcgatcagcaggatgaagcacctacccagaacccagcagccacgcagggggagggcaccccaaaggaaggagctgacgctgtttctgggacacaggggaaggggacaggtgggcagcagagaggaggggaaggacagcagagttccacgttgtacttcagcgccactgcagaagtggccacatcctcacaacaagaaggcagcccagctactctgcaaacggcccactctggaaggaggctgggaaagagcagccctgcccagcctgcatcgccccacccagtgggcttggcgcccttccccgacaccatggccgacattagccccatcctaggcacaggcccatgtagaggcttctgccccagtgcaggcttccctggaagaaccctcagtatctcagagctagaggagccgctggagcccaaaagggagctaagtcaccatgcagctgttggtgtgtgggtgtcattgccacagctgaggactgcccatgagccctgcctcacgtccacccctaagtctgagtctatccaaacggactgcagctgcagggaacagatgaagcaagagccgagttttttcatctgaccacagtcatggtgggataagacaacaggctgacaaaccaagctggccatttggtaccgtgagaaaggaaatcccacttctgacacctgtgtccttgggcacatcactgtcacctctgaatctccatctgcatccctgaaaaatgaagaaacagggctggatgattttgcaggtccaatgcaaacatcacagaccccacccatgcataggagagactctaacatactttagaggaggagaaagagattccagtcaaaattgtctgctaccttttatgagctgtaggttcccttattttatctttttgctgtggcttctaggaaacacaaaggtaaaacccagattcctattttatttgaggttcttgttacaattagctttgcctcacatttagcggttatgaatctcattttaatatattctaactgtattatgttatgaaatctcttggtaagataatttgcatgctttctgggagtaggtaaggcctgtgtgcttgtaataactaacataactgaaagtgcaaatgtcattctaagattcccatatcttttggttaggggacaatattagagcttttaaaaaggaagggtagactcacttagctcagcctcacccatgctaagggcacatgcacacattttctgcaattcactctcagaccatcagcatcctcctggccagctgcataaatgtatttttctgtgaaatgtgctgctcccctttgtgcaggctggccagccaagagttcccttccagctcccactgctgctttccaccccatctcctttatgtccaagctttgttcccacttccattcaatgtgagacactatccatgatttaagcccatccaaaaagaagggaggaaacgtccattcctctcgcactctccttctctctgactcctccactctaaagtgttctttgtggctaggtatttccataatttctttaagccttcctttgtagctgattaaggaagtctagtcataaactatcaaagagaaaggcacacagagagctggatgctatttagggatgggtatttttgttttgttttgtttcatttcatttgtttatttgttgagacagggcctctctgtcacccaggctggagtgcagtggcatgatcatggctcactgcagcctcaacctccagggcttaagcaatcctctcacctcagcctctcgagtagctgggactactggcaggtgggcaccatgcctggctacttttttgtattttttgtagagacaggttcttgccaggtggctcaggctggtctccaactcctgagctcaagcgatctgcccatctcggcctcccaaagtgctgggattacaggcgtgagccaccgtgcccagccagaatgggtagtttttattctctccaaacacttttggattagggtacaatattagagctctaaaaaggaatagtagaataacttagctcagcctgacacatactaagggcacctgcagacactttctgcaataagctctcagaccatcagcatcctcctggccagccacataagccaatcggggatgcagacaagtggctacaaactttccatacaacaggtgaagataacgagactttgggtcggatgcaggggctcacaccggtaatcccagcactttgagaggctgaggcgggaagatcacttgaggccagaagttcgagaccagcctgggcaatgtagtgagaccccatcactactaaaaatacataaattatcctggtgtggtggcacacacctgtagtcccagctgctcgagaggctgaggcacgagaatcagttgaactgggaggcagaggttgcagtgagctgagatcgtaccatggcactccagcctgggcgacagagcaagactctatctaaaaaaaaagcttgttaatagaacaaaatcattcatagttccattcactgtgctatcccagcatctcagtccttcctccatgcagtctctcgcccagccaggtgagagcatgagcacttccctgagtcctcaccagccctccccatttgtcctccaagactccactcaaacatctcctcttggtgccttcctgggccctccccagctccagctctcccagacctaccctctgtccccaggttgtattccactgccctttgccctctggtgacctcttcctaaacttgaagccctgcctccctgaaggctaattaagggttgcagtcctccttctgggctaactccaaggtccagcagagtgtccagcaaaagtaggcgttagagcattcaacagcatgaattcactaacgagcggggctgtgggcatgaatttcagcttgagtgcatatcctggatcaacggcatttgtgttatggggtaaaagtaagggtgggatatggggaatttgctcattcttttcaaactttctagcccttgaatagcctggaaagctagaaatactcttcattcattcattcatttaaggaatattagttgagtatgacaggcactgagtatgcagaaatcaaggcatgtacttgctgttcgaggccctgtggaccaacatcggcttctcagatggcttcctcacttcatgcctccagaaagcatattgcccggtgatgaaaaggatcagaaaatatacactatatttattagagaagactaataaatggacacttaattcaaaaatgcctgctgagcacctatcaaatgctagtcattaggatcacagagctacacagaagaaatgtgacaggtgctcacggcgtcagtgggagaagcaggtgagagctttatggagtcccctctgagacggctgcaggaacccacagaaggtcagcttaacaaggacatgattgtcatcttcagggacctgacactgttctgtagcgagagattctattttcttcctgcagtttcttatgagccatgaagaaactccttagggctccagacaggttctttaagacagagttacccaaaggtggacaaggctgtccctgcagacaagtgcataaagccagaagagccccttcgtgaaatgactaagaaggaacctcgaggactagaagatgcagctgaaagtgactttccaggtcctgacctggagcttcagtggctgcgcatgggcagcaaggagccacagcagctggagacttcaagtctgttccaggacattttccattttttttttgttttttgtttttgtttgtttgtttgttttttggtagagatggcgtttcatcattttggccaggctggtctcgaactcctgacctcaggtgatccacccacctcagcctcccaatgtgctgggattgcagtcatgagccactgtgcccagcccactttcactattgagaagaaaggaagaaccagagaatgaaaaccagtgcatcgggagacctgaagacgagcatgtcggctccctgctctcgtggagcctctatgggtcaggttttgcaattatccacaataaccagccttgagtatccatgacgcttcaccccaggagaactcatgcctctgcctgtggaaggacacagaggacctcagtggggatggaagaagggccttctccttgtcaccagctcccaggactgaatactgactgctgtcttggggagaagggactggatggtgctttggacctcactagcccccatctggatctttatggctgggcccatagagcacgaccatgacatctggagacagctgtgctaatgcccttcagacaaagaccaccaggaaccccctgtaactgaaccagttgggtttatgactcttctcggcaaagaagcacgcacaccgtgggggactgcggggccgctcagtgaaaggagattggaaaggagttacaggatttgggctttgctgggtgaatctgggtgagtctagggaagccgggtctactcaggtttgggggcaatgctgtgacccggtattgcagtcagttgcatctgtagggagggagtcgagcaagcataaagctgccatgggtaaagaagcagtcatcactcacttagtgggaaagggggagcctggtgttttgtggttgcatggtgacctttggtcttgctgtgtcacggtctccagtggccacgtcagaggcttctcacagaggtgtcctgtgagaagctttgtggccaacaggagaacaccagggccggccttaagcatcggaccaggtcccagagttccgggactgctcttttcttcatcatattagtggtagttttatagatgtttggtagcctaaatattatctattggatcacaaccaaaacagtagcttttcctgagtcccagcggcgggtcactcatcttccagctatgtctggacccgagtttgcatttcagcccatcccgtccttagtgcagagcggacctcacgtagaccggctgcatttgtccacagcgtacactgatgtccggagacagcggaaacagccatgtctatcacagaagcccaaggtcacacaaccgtgacccacctgcccgggggcgaggctgagccagtgcagatagccggatgctcctcacaggtccgcaggaaggacaggggccggcgctgcccaggctgtgccacgtccagtgcgtgagaagctcccgcttgagtcaccacgtctgtcccgacagaggtacgacctcctcctttccctgacacagggagtatgggaggcaaagccatactcgtgggagaactctccaagtccacagtgagcaggacgcagattctccccgtatttccaccagattcaccctccatttccaccagactcgcccttctttcccaaccaaccaccctccatccccacccttcacacccactcacccccattcccacccacttaccccccatcctcaccctctcaccctccatccccccgcactcactcttgtcccatccactcaccccgcatcccccacccccactaggtcctttccagcctcccccgccataaaactgtgcgccctgaaagatcgctcctcgcctcagggactcctccctccactcgtgcgccgtggctgccctgacttggtgccgcggagatccatcctcaagcaaacaccagggaacttgtgggccgttctcctgggctgcagtcttctcctgtctctgtctcctcctctgatgcctcttcctcaggaggtggccgtcacccacagcttcacaatggcatttcccctcagagcactgatcctccgtctgctgcggcagctaccaggtcgcctctcttcattttttaagtccacgtcacccccctcttgtcccgtgcaggtacccctcttatgccctacaccacagactgcactgcaccgctgtctccaccaaaagcagggaacctctgctatccaggacctgtggaaaattaggctcgatttcaatgaatgtttccataccgattataagctccttagggcaggaaattttgttcaactctctgtccccttgagaccctgcttgataaatggctcatggcaagcactcttaccgtggaattcgatttccaggcttttctgaatgactcaggattttacctccagaagcaaagcttctgaacacccattttgtaggccggtctttgtggaaacattttcactccctcccctgtcctctgtagcggagaactctgacatctcagaacatggccgcttctctctttcctgctcagaggagctgtttacaaagtgtggggtagagttaggaaacccaggaggaatggcagagcgctccgcctgcatccctgagggcgggcgtggggctgctgtcgacccccagagagagtgctcgccgcccttggtcccccgggtctgggcggtgctgttggtaaggactgcagccaacccccagggacctggcaggagaagatacctgccctgcccttctgctagggccaccagcatcggccagacctaaccaaagacgtggagtctccaggcagtctataaaaaccagctcccatggcccggggcagggcaaagagtcagtctggaggggagaactgaagacaactggcactgctaccgtgctgagatgcctcggggacttgtcttactcgccgccaagcacttggcccctgcaccaaatggcccccaaactgtggccttttaaaatttgtgtgtccacttctcacagtttcctctctcttcatgcatatgaaaataaaactattttatgtatctaggacttggattctggactgctggtgattgtctttctgtgccctttgcaggcgcacgcaacataactcctttagacacttctattaagaagcagaaaagaaggaacggaaattttacatcttctgtctccctatgacaacagaagaaagcctagaaaaaaaatataattttgagacccttttgcagttatcctataggagcagcgcgactgaagaagaaccagctacacctcctaattgaattatgttcactttttaaagatggatctattaacagcataaacagcagattgaacagcataaaagctcatgggcgtaaaacagcgagcacgcattttccactggggtctgcatgtcatctaatggggctgtggctccagtcacctctgcgcacatcccaggcttcggggcagtggccagactggaggcagaggttggaagttccccgaggggcgagtggaaactctgccatcctgcctcatgcatggcctcgacaagcccagctcccatggggcaggaagcacactccttccatggcggtgggtgagatgggagaatgttctgtcacacaaggtcagtagctccatgtctgcccttttcctccatcttatgcccctggaactcatagcaatagaaattacagccgcagaaatggctcacaacacagtcaccgaaggcccagatccagaagtggattctatacataccctgaaggtcaggatttataaatccacaaatagattcaatatgtatgtcctgaagggtctgtttgtagaaatctatttgacttacatttttaaattgatagagatgttctcctgccactctacagagttgtcaagttcatcagctggtgtttttggccattgccctattcttgccttcgttttgattctgtattccttcctttcttttaacctcacccagtcccccaattcctaaaagtcggccattttcacagtacttggaaaggcaaccagagcaatctgagagcttcataaaaggagaagatccagaaggcaaggccccttgagtgaggcaggatgtggggcctggacaggaagctggagctccacaaatcagcccccacattccttctttcctgcgccctttccttttcagcatagagaagaggttttggaagaacagccaagggcctattaggtagggcttgcagaagaaaaaccctcagcagtagcctctggggagggcctgatacccgtgaaatgtctcattctcttcatgcctccaaatggccagaggatgggttaacccatgaaattgttgggcagaacaatgacttgtctggttttccatatgacattctgccataccaagcagggattttcacattccttctgagccctttcctgagtcagctctcaagctaatgccgctgacactaagtaggattttcgaagcaccaagaaagaattttacttgaaaactcaagtccgcttgctctctttaacacggactgttataacagcaaaaaccacaattactttcacaccaacataatactcggctgtcctcctaactttgattctattttccataggatgtgggatggccaactgtcctgccttccccaggatggagggatttcctggcttatgagattttagtgccaaaactggatggtcccaggccagttgggatggttggtcaccctaataccagttagccatattcagcctttctactttcgtattagacatcatgtcagaaaagaaagacagtatttcctggttaaaaaaatctgaaaggcaatacaagcttacctaagttagctcctacaccaccaaaccccaaccccccaactgccatcagtcctgcaaaatatcaatttgactaacatcccgcttgctaatcatgactaccaaagtctatataatagttaacttcaagctatagcaatgccaggagtgatcctactctaaagtcaaagctaccatccagattttaagttaacatctctcagggaggaaatcttccatggaaaaataccatggaaaaatccactactttgaccacacagatacattcattatggcacaaccgtaattacaactttgcctgtcagggtttccattataaatgggatctgaatcttggtggaacgcaattctttccagctggagtgaaccatggacaggttttcagcccgttggggatttttctgatttgtctacaaattggcaaggctggggttggggaagggaaagagggggaagatgagattgggaacagaataaaccatatggaattttgttcttagtgtgccctttaaactgaaataagggaacacaaacaaacaaaaagacaaacaaccaagaccaattaaggatatctttcagaccctaaagtcttagattcaaagggatgctttgtctttaagttactttaaaagatagagcatttagagaaaagaagggagatttgttctttcttcgtctttgttgttgttgtttcttttttttcttatacctgaagtttggccaagtactgaagacatgtacttttttggctcactgtgcctttgagggcaaagcaaagaactgtggaaagcgacgtgggatgtgagacctgggttctcttccaggttctttttccagctaatcctgtgaccaaagataaatgacctaatctttctgagactcagtttccttttctgtaaaacagggatatgatcattcgtctggctaggtcatggaattcccatgcatatctacaaaggcagtggatgtgagctgtctcacccatgtggtaggagcctccttttggcttttctggtttctcaagctgagtcccccaggtccctcccgagaggatggagtcatcgtctgcagtcaggggtctgttgttgactgggaccagggaagaagggcggcacctgtaccccgtcctccctccccgatactgcctcacctggttcatcccaaaggcaaatgcacactgcaccctgaggagggtcaagcttgcttttgttgatagttttacagtaattatgccaaagccataaaatcatctaaggagatcttgccttcatctggtgaccttggaggcttcccaagggcaacaacgtcatccatggaatgtgagatccctgtcttcccctcttacccctagaacttctaggaacagtgaagaaaaagggatcaatcttagttgttagttttgttgttgttgttgtcatttgttctttttgtttgttttgtagatggagtcttgctctgtcacccagggtggagtgcagtgacataatctcggctcactgcaacctctgcctcccgggttcgtgattctcatgcctcagcctcccgagtagctgggactacaggcatgtgccaccacgcccagttaatttttgtatttttagtagatacagggtttcaccacgttggccaggctggccttgaactcctgacctcaagtggatctgcctgcctcagccttccaaagtgctgggattacaggcgtgagccaccgtgagtggcctgtttgtttgttttaagtaacagcccttgcagaatgaatgataaagttccagttagatcatcagacccaacgttccattctcaaatgtcttaagagttttgaggtcaatacacatatattttttgctccagcagtagggagtcatgtgacaaatctgaataatggagttaggtggacaaaagcctaaggtgaatttcgtaaggttatcaaaaacgttcaggatttgtagtcatttattttcagtgactgtcagcgaaaagcttagtctggcttagttttgacttcgtcttgaaataaatgttccacggccaccttctctcacttaattcatggtaacattgagccgtaattctacattgcaaaaagccgttctttgtggacatcatcatcacaccgacatcctgttgactctcataataaagccgttctgcggtgagctagcgaaataggcgtgtgacggagttcagcgtatttcacgttcaggcttggctgcaggagcggctggggctgcaagctcactaattctcagccctgtggaatgatgggactgaccctgaacttagagccgcccccaggctggaacctgggctccccggcgcggccaccaggtggcactggcgccctccctcgcggacccaggctggtgctctcgtcctttcaagcacaagcttggaggcctgattttcaatcagttgctttcaaacgcacaaacgccggtaaggaccccaccaaggggcttgtgaaaagctcagcagtgcaggacattttgcattttcccagcaagttgccggcctgccctggtcagagcgctgtgtgtcggggtttatgaagataattaggtgttcagatgcagttaccaactttcagtaagaaggaatacgacagcttttcatttgcaacagcaggtgcccttaaaggtgaagtgagcattgacgaagcgtccagggctctctgcttgttcatccacgggcgggtggttactgtggggacggacacgtcagcctccaggtgctgtggtcattaaggaaaataaggtcaccttctgtgtctcttcagggacagtgagttctggaacgggtcaccagggctgcccatgttcagctctaaattctatagatctagaaagtgcttttcatttctgtgaggtgcccctctcagacactgggacgttactcagtgctaaaaagaaatgagccttcaagccatgaaaagacaaggaggaaatttaaacgcatgttactaagtgaaagaagccaatctgaaaaggctgcatattccaacttatgacattctagaaaaggcagagctatggagacaggaaaaagagcagtggctgccaggggttcgggatgagggagggtgaatagttggagcacagaggattcttaggacagtgaaagtcccctgtctggcaatgtagccagggatggatggcatggtacatgtgtcagacccatagaacgtgcaaccccagagtgagctgtaatggaaacgatagactccgggtgatggtgatgggtctgtgcaggttcacggactgtaacaaatgcaccactctgggccgggcccggtggctcacgcctgtaatcccaacactttgggaggccgagttgggcagatcacctgaggacaggagtccgagaccagcttggctaacatggcaaaaccccgtcgctactaaaaataaaaaataaaaaattaaaaaattaaaaaaaattagccggtcgtgatagcaggcgcctgtaatcccagctactctggagactgaggcaggagaatcgcttgaacccgagaggtggaggttgcagtgagctgagatcacccactgcactccagcctgggcctcagagcaagagtccatctcaaaaaaacaacaaaacacaaaagacaaatgcaccactctggcgataacaggggaggctcgggagagatgggagatctctgtaccttcctctctattttgtctaaacctatagcttctttaaaaaattaaaatctatttttaaaattgttaattatgctgtctcagccacagaccaaagcctgttcttatccagtgaaactacatgcatcaaggcctgtacctagtgctagaaatacgaggtccagctcttgagcccagtggaagaaagttgcacaatagcccagtatccccttcccacgggctgctgcgagtatccgcgaggcccacccgtgaacacaccagcacaggtgtagcccgtgacgggtgctctgcacgtgtttgctccaatcctgtgggtttgtctgaagaggaccctggctgagtaggttgaaatgagaagggctcccaggtttcccggccaccctccttggcggggcatctctctccgatctagtcttgtgatgtatagcagcatgaaggtgcaatcaacctgctctgtccctgaccaggtgtgtgacttcagcaacttacttaactttcctgggtgaagtttccctctctctaagatgaaggtgataacaatggcctgtgccataagcttgtgtgcaggatcgagtgaggggacacccacaaagcttctagcagtaactggcccagattaaaagcacaacgtgagtgaacattatttttccggttggcaggcatgtggggaaaggtgagcgagccacgagtttactgcctttgtgactacgtgtaagttacatctttcctcaaaagcgcttccagcacccactgagcagccttgctctgccgtgtgctccccgggaggggcttgacccacaacagcggcaggaaccaaaacaagcttccttcgcccctcacaggactgcctgtcaccccttttggcaagaatgctcagattttcgcagcccctcacaggactgcctgtcaccccttttggcaagaatgctcagattttcgcagcccctcacaggactgcctgtcaccccttttggcaagaatgctcagattttcgcaaagcaaatgtgaaactcccatgaggtctctttgggtcaaaggtaaacagaaagtcttagaattttctttagaaaaataaaaggttcccgtttttttctggttcagagagttcctggcgtgcttcttcttgtttttcttcatacttagggacggcagaaatgatacatggcctccccacaattgaggggtgctctccagtggaccatgatatatttactgagaaatttttaataagtaaaccacagacttgaactcatgcaccctcataaaccagcccgttctcatggggagagttcaggagtttttatggagcaatactatgttctcatgagaattttattagaaatcagagacttgagatgcatcaagcaggaaatttatgaggttacatgggaaccatcctttcattttgtcattctgggttaaattacttctttgtattctgttgatttactttgcaaattttagttgtgaacattgttctgaattctcagcaaattcaagccagctaactatcgatttcttgaactttccacttttatccttcaaataagataaataattgagagtctagaccccaaatctatgggaaacacagataactcatgaaaaacgtggccaagaaggtctttccacaacatcaagaaataaacaagaagcttagggaaaaacacttttagaaccaccgacaattctttatgcctttaacttttccacttaatagtttcttcaaatttatttaaaaattgttttgcgaagtacccagctaaaattttactcgccaaaataacctgttgtttatcatcatataacccaacttggaaaatagcccaaacccagaatagatgtttgtaccggtgaagtggagaggaagtgctctaaacaagttttttctctgggcttgttccaacatctcattagttgtctgtgttaatggtgtgaggaaagacgccaggccaggctggccttggctagcatggagaaagtgagagagccacacaggaaccagccttctattaaccagctgaccccattgccgctatttgagctggattcctgggtaaagtcccaaaattaggtaatttgtcttcatctctaaatttaattcttacattggaactgtgtatttttccagctgaattctggctttggggtttaaggctgcttggctgccaccatgggccagttggttggttttaaccttttctacccatcatccaaaagctcctagccatctactttggaaaaaaaatcgtagtacaacaaggcaagaaggcaccctagttgccaggcttcacgtttcttggtaccaaagactggtatgggctgtcctgcccaaagtcagctcttctctggactaatagaatttggtcatccctccaaaagcaaattgaataatcattgtcaccgttaactaaccttttctaagttatttctcatgtgccaggctctatgctgctaatgagcatttaccactcaaaactgctccatgaagcaggtgctcttgttctccccatttcacagatgagaagcttgaggctcagagagttaaccgcagcctccatgatcacacagtggacttggctcatactcaccaggctgtgtccagagtcttcagggaaggccatcaacccaggcggtgggagcagacaggaaagaaaagcttctgtcctcaagaagcccatgctctaacttcagggatcctgagaacaaggctggtgctcagataccagtgactgcctcataggacactgtcattgtctggggaacaagtgccctgggtggcaaacaagctgatggaaagatgtcaatgtcctaggtgatcagggaaatgcaaactaagccatgagataccactgcacaccgagtagagtggccagaaccctgaacgctgtccacaccagatgctggggaggctgtggagcaacaggactctcactcattgctgctaggcacataaaatggtgcagatgcttagggagagagtttggcagtttcttgcaaaactagggtggagtggtgcatgcctgtagtctaagccacacaggaggctcaggcaggaggatcacttgagcccaggagtttgaggctgtagtgtgccatgattgtacctgtgaagagccactgcacacccgcgtggtatctgttaaacacacacagacactaaactaaacttactctcaccatatgatcaagctggtgctacttgatatttacccaaaggagttgaaaatttaggtccacacagaaacctgcacacagatgtctgaggcagctttactcatagttgccaaaacttggaaacaactcaggtgcccttcagtcagtgaatggataaatacactgtggtacatccagacaatgggatttgtgtttttgtttgtttttgagatggagtttcactcttgttgcccaggctggaatgcaatgtcatggtctcggctccctgcaacctgcacctcccaggtttaagcaattcttctgcctcagcctcccaagtagctgggattacaggtgtctgccaccacgcccggccaatttttatatttttattagagatgggggttcaccatgttggccaggctggtctcgaactcctgacctcaagtgatcctcctgcctcagtgtcccaaagtgctaggattacaggtgtgagccaccgcgcccgacccagacaatgggatattattcagtacgaaaagaaatgaactgtcaagccatgagaagacatggaggaaactcactgcaggttactaagtgaaataagccagtccgaaaaggctgtctcctgtatggttccaactctatgacactctggaaaaggcaaagctatggagacagaaaaaagaccagtggttgtcagggcttagtggggagggacggatgaacacaggacttttagggctgtgaaactactctgcatgatactgtaatgttgggtccatgtcgttatacatttgtccaaacccacagagtgcacaacgtcaagactgagccctaaggtaaactggacttgggtcatgatgacaggtcaacggatgttcatcagttgtaacaaatgcaccactctggtgggggaggttccagggggtgcagggagtctgtgggaactctctgtaccttcctctccattttgctatgaccctaaaaatgcttttaaaaaaaagtattaggccaggcgcagtatctcacgcttgtaatcccagcacattgggaggctgaggtaggtggaccacctgaggtcaggagtttgagaccagcctggccaacatggtgaaaccctgtctctactaaaaatacagaaattagctgggcatggtggtgcctgcctgtaatcccagctacccaggaggctgaggcaggaggatcacttgaacctgggaggcagaggatacggtgagccaagatcacaccactgcactccagccttggtgacacagcaagactcagtctcaaaaaaataaaaaagaattgttttaaaaccctaaaagagcaaaatgatgccctgagcttaggaaatattcatcccagcacttctggagcaaattgctttaaaagtgggctgcaccatcttaacaaacacaaaatccaatcaaataacacatcctactcactggcgtgaagcacacatcccatcctgtggggacagtgttgattaggagatggaggacaaggaaggcttcctggtggaggaggctctgcagaggacttgagggatgcgggtgagtgtctggctctgggcaggacacagatgcaaggccaggggaatggacagggggctctcactcagcctgtggtctttgccctgggattttgcctctagattctccccaacggctgccctcttgttcctgagaattgttacgttggttttcctccacctcaaggcaagtgttttggtgacaggccaaggaaaatacccactgaatacaaagcaggctcctaaaatatgcccagacagcaccatagcaaatgctctgactcaccagtgccgcaccacagcagcctgccttggtggcgcctgacatcccgggtgctggggcatgtggcagtgccacattgccagggggttcagcctctgcggggctgctggaaaggacagacaggactggcgggcctcctccagccccaagttgggacatttccagccaccacactacgaaaagtatcttccagccttgggaaccccggtccctggggtgagctccagagggcagctgccttgatgctagaggcaggaaggcgtgggccgcccaggagcgggggcccctcagtgctgtcagaggaaaacatgagtccagaggaccctgacttagctcaagcctcccccagcctccaaatcccagctggctggatggctgtggtcctgcaagatgaaggaaatatactcatcacctgagattccaaacaggcacccctgggtgggctgactgccagccagtccccaaagcccctgttataagctgggaaggtgacctccaaaccaggtggccctgccccacctttcccgatgtgaaggactgaatatttgtgctcccagatttatctgctgaaatcctaactcccagtgtttactctcaggaagtggggcctggggaggtggtgtagtcatgagggtggagccctcctcagtggcattagtgcccttataaagggggctaacagtgagaagaggacacagggagaagatcccatctgtcattaaggagacaggtcatcacagacacggaatctgccagtgcctggatcttggacttccagcctccagaatggagaaatttctgtggtttatgggccgcccagtctgtggcactttgtgacagcagccggggtggacaaaaacacactgtctccttttttttttcagacggagttttgccctgtcacccaggctggagtgcagtggcgtgatctcagctcactgcaacctccgcctcccagattcaagtgattccccagcctcagcctcctgagtagctgggactataggcatgtgccaccgcatccggctaatttttttttttttttttttaagtagagatggggtttcaccatgctgttggccaggctggtctcgaacttctgacctcaggtgatctgcctgccttggcctcccaaagtgctgggattacaggcatgagccaccgcgctcggcccctgtctcctgctattaacagttaccgtctttggcggttactctgcggaacgcctcccagggtgcatctttttattttcctgaaacatctgaaaagggtacggcaaagccagagcaaaggggttgagcagctgaacaactgtctccttccctcagggaaaaataatgactcaggaccagcagccatggcctcagatgaccgggatattccaaatggggatggagccttcagactctgccctcccacctcagaagatcaagcagaatgtaggagcacacagatcaaaggcatcgggcctggaatctctgagcctaatcaaaatggaaaacagcttcatctcggagtgaggagcagaaaagctggccagagtccaggtagatgacggagccctccacgctgaaaatcaacccatcttttcagctgtgttcctgctccaaaaggaactagcatttgagcacgtatagcagcgggtgttaaatctgctaaaatgtgagctcctggagaccagggtcctcacccaccctgccccccactgtattcccaagtctgagtttgttttatgttgtgctaacaggataccacagactgggtaatttataaagaacagaaatatattgctaaggctgggaagtccgcgatcaaggccctaacaggttcggtctcaaatgaggctgcaccctccagaggggaggaagactgtgtcctcaggtggtgaggacaggagggcctgtcctcatgctggaccaagcctcttctaaaagggccttaatcccactcacgagggagcatccctcacggcctaatcacctctgaatgcctcgcctctcaacaccatcccattggcaacatctgaattttggaggcgacacattctaactgttgcaccccaggacttagagcagtgcttggaagatcacatgtactcaatacatgcctagtaaatactgtttatgcctttgtctctgcaatgaagtggtaacaaggcctcagctcctcctctttagtcataatgagcccaaagtaaggagcactcctggagtgtgtgacagaagaatagggaattaagggaacggggctcagcaggtgcagccagttcatagaagcaggagagcagcaggtgcagtttataggctacatcctcactcacataataacaagccacttcagcctctgattggtcgcaggccaatccttcatggggtgtagccaattggaggcctctaaagggcacggactggtgttgctgagtttctttagctcaacagaaacccctaattaaggaggctcttgaggcacttgctcgagtgcgctcccaccctgaaatgtcttcaataaatctatgctttcattaatctgttcttttattgctctgtgcattttgttcgattctttgttcaacgcaccaggaacctggacaattctatccagtaaaacgaggatggattcttggtatttgaagcgaattgcaggtccccaaaacaggtaaaataggccgtgtgctggacgggcccaccccacagcaaggagacacaacccattgctgatgggaacagagcctctccctaccccatccagatcacaacaggccacattgtgactcataaatcagagacatgatggcaagtttaacctcatgcttcaataataaccattttctaggatccaggagaaaaatcagcaaggcaggacatgaatttcagtgtaaatgcaccctcttcattctgagtggggctctttatgcttttctggaaatgcttgatgcattggcccttaattcctcatgttcccccatggcatttgccccacacagtgtcctctgtgctttccctgaaactcctgcttagctgggaagatggaacccatccgagtggagctccgttaacgccccacatttctcattcacttccccatctactgtctcctgctcccacaaacacccatctccctgcccgagcacctttgactctccctgcgtcctccctcccttcctccgtggtttaccccacctcactttctagatgcttcccccaagactccaaacatctctgagggtccaccaggaagaaatggctcttgggaccctcctcaagccaaagccacctttctctccctttcctgcatcttcaccaattccagctccaccccttgccttggccttcatcctcagggctctccccaaacagccagtgacctccagttgacacagaataggtatgatctagaagaaaccccagaggcatccaatccaacccccccccccaccgcttttaaggttgacggagctggaggggacacgacctgcccaaaattgcaggagttaggcagggctcaggatcgggacactgatctcctttgtcatgttcagagctctctcagcccctagacagctttttcatcgcaggaccactgaccagatagttcctcttacgatgccatcaaatgcccctgcccaggctcaccacactcttggcacagctggcctccactgtccaagctcccccatcctctcctgtctctctgactctcctactctggctaatcttctccccagccctcaagatgctgccctccgcccactgaccccctccctcagccagcgcactccagcccatcactgtaccgatgacggcgttgatatcatcacccgctgacccctccctcagccagcgcactccagcccatcactgtaccgatgacggcgttgatatcatcacccaatgacccctccctcagccagcgcactccagcccatc

SEQ ID NO: 5668 - DNA, 523128 bp, Homo sapiens
  PSD3 gene - 18432349 - 18915476 of chr8; NCBI Entrez Gene ID: 23362; Build 35; sequence includes 20,000 bases upstream of initiation codon and 20,000 bases downstream of termination codon of the gene
aggaacccactaaaaaccttcaagcaaagctgagagagagccaagggaaaagggaatgagaaaatgagtactagggaggtgaaagggctaaacataaatggtacaaggaaagaaaaaaaaacagattttaaaaaaagaaaaaaaaaagagctcaaagcagagaaggaaggaagagacgttttaaattgtcctgattttcacattacatctacatagttcttggaaatggaagagaaacactattcttagagagaatcaaaagtaaacttcgaaaaataaaataggtagtaaaagacaaaagaaaaataccagtttgctgttagctgttctataatcaatcatttactagaggaactataacagtagaggcggaataaactagtatgtccggtatgtgcactttccatgtgaaaaaaattaaagtagaaaatctcacataaaaaaaatgttggttgtgtatctttctctatctatgaaataactttttaaaaatcacataacatctttttttctgaaccaaatggattcagaataggctcctgggtttgtctctctgtgtgtggttttgttccgtttgtttgtttgtttgtttgtttgttttgagatagggtcttgctatgttcagtcttgcccaggctggtcttgaagtcctgagctcaagggatcttcccacctccgcttcccaagtagggattataggcaggtaccaccatgcctagttagttttttgttttgttttttactggtgacatttatgtggcattttcctcaaataaaacttttttgaccattaaactagccttcttaatactttcagaagttatttaacaataatatgagcatattcaacttatattcacaaaaagtgagatgtaatttctacactctaacattaatgtttaatgttcatcagctataagttactaatattttctttggaaatattttcctacctgaaaaactttaatagcagatgaatgtagcttacattacaacataaatcaacttggattcctttcttttttttttttttttttgagacagagtcttgctctgtcactcaggctggagtacagtggcatgatctcagttcattgcagccttggcctcccgagctcaagcaatactcccacatcagccttctgagtagctgggactacaggcatgtgccactgtgcctggctaattttatttattttctgtagagatggggtctcactaccagttcaagacccaggctgaccttgaactactgagcacaagcaatcctcccaccttggcctcccaaagtgctgggattacaggagtgagccaccacacccagctgctttcaattttaatttgtttctaaatattttatttaacatatgaacacgagtgataggcagataaaccacatctcacttaccatgtgtgtgtgtttgttggggggtagtgcaagtggatgaactgttgaacttttaaaaataaaaattcctcaacaaactttatgtcttttatataaaataaaaggaaattatttttaactgtttgacaaatgaagacagtgtttagagtaaaatgaccaggtagggtccattggtttcagattagcatcctgtgttggtcccctcgctccaggtgttcagaggcctgagcatcccattcccaagtcatgttcagtgtgcagaaaggatttccctaagcaggctatcatttctccaaaatagaagagattgtgggatgcgtctaattaggaaattttcaaagtaaaatattatgatgtttctatccaaacaactgtatcaggaagagtctttaaaagggttttctcatctgtaaactgagattgagttagataatgtctaatgcctcttttagttctgttttagttcagttctatgagactaagtgttttgctcgtgggtttatttttctgcccctatttagttaacatacataaacaaattgatcatcagaatgtcacccattttcctcccaagtagcacccagcagcactatgatgagtcaaatatagttgttgttaatggatttgcatcctaagtctccttattagagagccttttagtccatttgttgggagggaagggaacaccctcacctacatatgtgtttgatacttttttcagattgttcttgactttgtcatatcaaaaagcagaggtcagctcaacagaaaatattatagaaggactttgcatttaccgtatagtactctgttccctatgtgatttttctccacaaagtagtatgccaaatgttattaaactgataaatgctttcaagatacttgatccacatttctttgaacaaaataattctcttccagctttcaaacgtataataaataatatgcttattattgatacttgattgagtgtagtttgtgctaggtattagtcaacggaagtaatcatcccactttaatagaaacccttaagtttcagtacatgaacacaatagaaatttatttcttgcttacttgacaaaatatgttggtgaatgtcctggttttgctggacactgataatcctacagtagacagagaggagaatgcagatgctgtcttgcagattgtaggtgctaggcatgaagtggtatatcgtgctgctggtacatagtccatttgccagaactggtagcatagccccacatagatacaatcagactgggaaatgtagtcttcctttgtgcctaggaggaaattgagatggtttgagaaacacacaggactgtttctgctatgatcttctatagcaaggagttacgtttagaaatgagttgaagaagagggacttgaaagagaaagcagcttatccaggtatatttttcataaccaaaattaggatcgctctcaaaggctgtgacaaagaccatattgaattccttggatgatctagaaatggagtggtagaaggttagaaattaagttgatacggggatggacaggataaatgataattcatagatgataaacggtaattaaaaagaggtttaattggttcacagttctgtagactgtacaggaagctggtgctggcagctgcttggcttctagggaggcctcaggaagcttacaatcgtggtggaaggtgaagggggagaggacaagtcacatagtgaaagcaagagcaagagagaaagtgtggtcggcagaggtgccacacacttttaagtaaccatatctcatgagaactcactatcagaaagacaacaccaagccatggatcattcaccccatgatcaaaacacctcccactaggccccaccttcaatgctggggattacaattcaacacgagatttgggtggggacaaatatccaaactgtatcagcagactaatacaatagtacattatgatcaaatagggtttatctcaagatgtaaatttggtttaacatttgaaaactaatcgtgtaattcaccaaaattacagcataaaaaagaaaaatcatatgagtatctcaaaagatgcagaaacaggatttggcaaaattcaatacccattcatgataaataactttcagcaaattaggcatggacaggaacttcttcaactcgacaaaaggcatgtaccaaaagctaacattctccttaatagggaaagactaaatgcttttcccctaagatcagaaactaagcaaggatgtctgttcttatcactactattccatattgcattaaaattcctgaccagtgcaaaaaggctctttacagagaataaaactctttattcacaaaagtcatgatcagctatgtagaaaatcattattaagattttaatttagaaactagtagaactaataagtgagtttagcaaggtcacagaatgcaagatcgacatacaaaaataaaatttattagtgaaaattttgaaataataattaatgaaataatcccatttacagtagcatcaaaaagcatgaaaatacttgggtataaacttaaaatatgtgtgatatggtttagctgtgtccccacccaaatctcatcttgaattgtagttccctgtggtaagaggaacccattgggaggtaatttagtcatggagatgttcaccctcatgctgttctcttgatactgagttctcacaagatctgatggttttataaggggcttttcccacttttgctctgcccttctccttgctgtcatcatatgaagaaggacatgtttgcttccccttccgccatgattgtaagtttcctgaggcctccccagtcatgctgaactgtgattcaatgaaacctctttcctttataaatcacccagtctcgggtatgtctttattagcagcatgagaatggacaaatacaatgtgcaagtactatacactgaaaactgtagaacattgcttaaataaatcaaaggaaatataaataaatggatatagagtgttcatgttttagaagacaaattgttgagattttcaattccctccaagctgacctacagattcagtgccatcccaattgacatcatactggacatttttaatgaaactaatatattgattctcaatttatttggacatacaaagaacctagaggagtcaaaacaatttttaactggagaacaaatttagaatacttacactacttgatctcaatattactataaagctagtaatgaagactttgcattattgtaagtatagagacatagatcaatgaaatggaagagagagttcaaaagtagttcacatatataatggtcaattgattttcaataaggtaaatgcaaaaggataatcttttcaagaatggaattagaacaacaggacatctatctgggaagagaggaaactccacccttaactcatagcacatgtgaagattaacacataatggctcataaatgtaaagataagagctaaaactataacaattctagaagcaaacatagaagaaaatctttgtggcatgacattagggaaagatatctcaggacacaacatagcacaaaccataaacaaaaatggcagattggcttcatttaaatttaaaacatttgttcttcaaagacacccaagaaactaaatggcaagccaaagccagggagaaaacatttacaaaatacatatctgatacataaattgtatccaggatgtataaagaattcttacaaatcagtaatagtataaaaaatgcatcttaaaaaatgggagttgggcacaatggctcacatccataatcccagcgcttcgggaagccaaggcagaaagattgcttgagcccagtgatagcttgaggctgcagtgagttacaatcacgccactgcactccagcctggacaacagagagagactccaactccaaaaaaaggtagattggcttcacaatctacacaatcttcacaatcttccaactccaaaaaaaaaaaaaaagggtgggccggggggggggggtggtgtgagaggtggcaaaagattgaaacaggcactttatgaaagaagacacacaaagtgaaaataagtacatgaaaggatggatgctcagtatcatttatcatgaagatatgccagagaaactacaatgaaatgctcagaaagctaaatgtttttttaaaagttgacaataccaaatgttggccacaatatagaatgctggaactctcatacattgcagatgggaatgcaacacagtgttaatagcatagccactttggaaaactggcagattttttaaaaagttaagttaaacatgcattaaccatatgtcccagtaatatcactccagggtatttatccaagaacaaacatgtacacacaaaaaattaaacatagatgttcatagcattttatttgcaatagccaaaactggacagtactcaaatgtccatcaactggtgagtggaaaaacaaattatgtatccatacaatggaacactgtccaataaagaggaatgactaaagatccatgtgaaaatatggatgaatctcaaaagcattatgctatatgaaagagggcagaaacaaaagagctcataccataggaatctattaatacagaattataaaaaagacaaaactacggagagctaaaactctgtcagcagttgctctgatctcagcatccacagggatgggattgctgacataggggcgtggaactttgcagggagcatgaggagggggtgaaatatcctcattgtagtggaacttacacagctctatacatttgtcaactctcattgaattgtacacaaaattgttgaggtttacactatagaaattatatttcaataaagctgattttgaaggcaaaaatttttctctggggtttctgactgtggattaatacaaatcaaaaaaccaaacagctgggttcccagaacttacaagtgaagtggctcaaaaagctccactctgtcagaattcagccctagaaatgtgttacctcttgcaggtaactcagcagttatgtccagaatgagagtctttttctttttctttttcttttttgtttttttcccttggagacctctgatctgacagaatgagagtctttaataggaaaattgagagagagctgatagatttccttcctttcagaaacaaatgtacagagattttccaatgtaagggttcataatgcgtgtattgtgcaatgagaattctatttgcagtcctcttaccaactttgtcgacaatgtttacaacatttctctctttagagccactgaaatcaaagaaattcttaaacaacatactattcttgcccaaaataagaagagagaattctttcactcactcattcattcagtaaacattttcctttctttctttgtatatatatatatttttgggtgggggggcaggctcttgctctgtggcccagggctagagtgcagtgatgtaatcatggctcactgcagcttcaaactcctggactcaagcgatcctcacaactcagcctcccaagtagctgggactataggtgtgtgctgccacagcctggcatttttttttttttttttttttttgtagagatgtggtcttgctatgttgctcaggctagtctcgaactcctggcctcaagctgtcttcccacctcagcctcccagagtgctgggattataggcatgagccaccacacctggtctcctttagtgaatatttattaattgcctcctgcatgataggcaatatacccagtgctggaaactaaaagtaaatatataaataaagtgttgtctctgtcttctggagagctctaacttctcttaggtttttgcattcacaattcagaacactgagagacagcttctgcgattagcccttgtcactgaaaacttacaaaaaaaaacctctgagagttatggagataaagattgcttttaataaagctctttaaatcctagaatgttgtaatttggcagtcaaaaaggccatccttcctattcagagaaaagaaatgaaagcctaagaatatgacggtcctatgggatatggtttggctgtgtcgccacccaaacctcatctcatcttgaattgtagcttccataattcccatattttgtgggagggacccagtaggaggcaattgaatcatgggggcaggtctttcccttgctgttttcctgatagtgaataagcctcacaatatctgatggttttataaagggtagttctcctgcacaggtgctcttgcctactaccatgtaagatgtgactttgtttctccttcgtcttctgccatgattgtgaggtctccccagccacgtggaactgtgagtccattaaacctctttcctttataaattacccagtctcaggtatgtctttattggtagtgtgggaacagactaacacaccatggtaaaagaaaacagtttctctattcacactacacttctgacactaaatgtatgggtttttaccacaccaagtaattgtccaattctctgaagatgccaactgggaatcctgaaattatgacatgatctacctggaatttgcgtcatacccgcaagttaaaatcccacaagactttccccaattcagatgccaacagtaagtctggggttgccaccagtacttctgaccaagtggccataaatcagaggttcccattgatactggggggtaggagaggtaaccccaaatgatggcaggacctcaaccctggccagtgcccaggctcttgacacctggacaagtcaaggaattcaccatcaagaaattcaaggacaccgtcaagaaactcaaggacgagtcagaaaatagtgaaagtctggagctttgtggcaaagtgaaaagacacactcaagaaaggggagtgtgagtgtgtgtactcaagagagtgagtcatgcccaacggggtttggagtttctacctttatgggtttctttaaccaaggggtggattattcatgaagatttctagaaaaagataaagatttctcagaactgtggtgtcacccatgtttacaccaaatatgggtgttccatgaactattatggcactagtgggtgtgtgatttagggtgttaatgagtgtgtaatgagatcctaggtgaaacctacgccaaatccagcaccatgttgagtctggttggtcttagtcaacttggccctcatcctgcttttcagggtcttattggtccctagtatatgcagctctttcaacagctcctttttgctagtcatgagactgctgcttggaattttctgttctgctatgactatcctgtctcactgtgacccctttctcaggattgataatttactagaatagctcacagaactgaggctcacagacactttacttatgtttactggtttattataaaagctacaactcgggaacagccaaatgaaaggaatgcataggacaggggactggggatgcttcagggttttcatgccctctctgggcacaccactctcccagcacctcaatgaattcatcaactcctaagctcataagtctcccagttcaagaccttctatagagcttaatctccagaccccctctccccttcctggaggtcggttgtgtggctgaaagttctacccctctaatcatgtcgtctttctgataaccaactccatccttgggcagtctaggggctccatcctaagtcacctcattaacataagctcaggtgtcatcgtaagtggcttctttatgaataaaaaatgaaggactcaggaaattccaagggttttagaaaccaggacaaagaccaaatatattttgttttatcccacacagttagacaatgagttagtgggaccccttctgtcttctgactctgattcaacatttcagaggcccctggcatggtcttcattatctcccttcatcactccctgcagagcagcagtgtctctaagccctgctgtcctcttggagacattccagggtacttttacaatctaaaaacatgcaagcataggtaatttccacaggttatacgtgaaataacgtatctttgggaaaaaagattataagtgaaatgcttagttcagcaaaggaatgttttctatggaatccccctttgatagaaatattgcttttgaaaacattttattattggaataatttggaaaaagtgatttatttgtgctccgagggaaatggggactttcttctcaaatgtttacaggaattattttgataataaagcattttctgattgggaggatgcagataatttttcaggcatgaaacagaaaagcagctgcagctatgtacttaggaaaaggtttggtttttgtttttaatggtcaagtcagtacagtacagtgcatagtgctgtgctaaaaagctttacactcacagaaaattaaatcagggcaatcatgtatgtgataccttgggaccaaactttcatttgtcgtttatccggtgtatcctatgtgccaaagactgtgaagcagtgctgtcaatagaattctttgtattcatggaaacgttctagagctgcaatgtctaaatacagtagccattctcagtggctcatgcctggaatcctaactctttaggaggctgagactggaggatcacttgaggccgggagttccagaccagcctgggcaacatagtgagaacctttatctacaaaaaaattaaaataatattcagtggggtgcggtaatgcatgtctgtagtctccagctactcaggaggctgaggtgggaggattgcttgagtccacaggaggtcaaggctgcagtgatctatgactgcaccacagccctacagcctgggtgacagagcaagaccctgtctctaaagaaataataaataaataaataaataaataaataaataaataaataaatagtggctatattcagtagccactaactacctatggctactgaacacttgaaatacggctagtgagactgagaaatgaattttaagtttaattttctttcaatccatttaaatttggctggccacgtagtctactagctatggaattagacagcatagctgtgagaaataggaaatacaaagtgcctgaatattcacaatgtggttgtaaatgattgagctagatgtggatggaggattgtttccagcaatatctatccacaaaggacatctctcccatctttcagaattattaccttcaaatataagactctatgatggaggtgattaacttgatatcctatgagcacatatatctacagtgagtaaacaaaatgctatgactctttcaagctaagaagtatgagaagatggtagagtgggaccccttctgtcttgggtgctactgaggtgacagtgtaatacacagcaaagtacgtccaagtggatttgggacaacatctaccccatgcacagattaaaaaaaaaaaaagggtcctgagactttgttctacaatcttggatcccttgtcagtcaaatcaaaactataaaaataagtgctaatgagagaagaacatgaggagatggtgatgacagctgttgcctggctctactctccactggaagagagctgggtgctactctccagccccaagcctagtaaaaggagttcaaagagacctgttggagaaatcccaaatggttcctggaaaacactgaagatggtggcctcgctcatgctccagaaaaccaatggaggttgcttcttcccacgaaacctagagtgagagggttgaccaaccgctttgggatagggactagggaagcccttgctatgtggatgggatcagcccacactcccagagttgctgaggcaaggggcatgtgtgagtgtctcttgtggaagagatgtgggccacatgcaatagagttggcatggagtctatcttcttggggtccacccagtagggtgggtgagagagggcaaggctcagcaggaagaaatgttccagtgggtacataggactgaggaactggaatagaggaccccacttaatatggtttggatgtttgtcccctccaaatctcatgttgaaatgtgattcccaatgtcagaggtgtggcctggtgggaggtgattgaatcatggggacagatccctcatggatggcttagcactatcctcctggtgataagtgagttcttgctctgagttcacatgagatctggttgttttaaaaagtggggtacctccccccaacccttctcctgctctcacaatgtgacatgcctgtccctgcttcaccttctgcaatagttataagcttcctgagtctcgccagaagctgagcagatgttggtgctctgcttatacagcttgcagaaccttgatccaattaaacctcttttctttataaagtaactagtctcaggtattcctttatagtaacacaaatagattaatatatcatccaccctccctttcacaactgcactcttccagttgaagcagaggagaagatttaatgctaagtcaagtttagactaaggactgcatagtttaattattgaattgacactatgcttagaggacctacaagtaagctgaataactgggcctgcaaagtttttacataatgccaggggaaagtttctcccactgaataaaaggatcacagcagatagttttggtcaaccaggaatggaacttattcaaaatcctggttatgatacttacatggatttcattagattttctctttacaattccaagaagctatgggttttttttttttttgtaacaaaaaagcaaataaaatataaatcaatttctgtcagcttggaaacctgtatattgaccaaatctgtctttttagttaattccagacgtcattatttatgcaaaaaaaaaattgggagtgagtattagtaacaccgggttgggcataaaacatagcttgagacaaactgagattgctagaattacaggcatatagcactatctctttcattcttcctgaaaataatagaacagttttggtaaaaagagaagtgatgattgcaggaggtagggagagagcagaacgcagacactgctgattgaaaactgtagaaaggaaaaggtttcatgtaaaaataatctgaacatattccattaaagaacattcttttgttttcctcctacttcactgactgctcgtttcagattcctctgcatgttcttactcatctccctaatttctgagcattggagtgcattaggctctcctcttttctctttaccatccactcctttggtgatctcattcagtttcatggatgtaaatatcatctctgttacagctcccactcctacctgtcccctgaattctggttttgtatatccagtggcttgcctggcactcctctgctgaatgttgaaaagttaactctaacttaacatgtccaaaaattacagcctgatctcccatcctaaatcttgttacttccacagtcttccccagttagttaatgtaactccatttttctggtagttcagtcccaaacccttgagtcatctttgactctcttttataatgtacattcatgcatcagcaaattctgtgagctcaatcttcaaaatatgaccagaatctcaacatttcttacctccttctttgccaccaccctggcccaagccaccatcatctcctgcttgaattgttgtagtagcctcctaatttacctccttgcttccaatacataataccgggtgattctggcaaaatctaagtcgatcatcctacccctctgctcaaaatctaccaagggcagttaagggtctttacaacaacctataaggtcccacttacgacatctctgaatacctttcacctggctcactcagccctaggcacactgaccccttgctgtgctcaaaacacgccaggcaagacctcagggcctttgcacttatagttacatatttgcatggctttccccctcacctcctttaggtgtttactcaaatttcacctctcagtgaagtcttctctcaatatcctttgcaatcatctactctcctgacgctgtactgcttatgccttatccctttccttgttttgtttttctccaagacactcagcatcatataacatcacatatatttacttatcttgcttattttctgtcttcccaagctccatgagggaagggatgctttgtgctccgctagagtcagtaaactatacctagcacatggtagatgttggataaatatttgtcacatgaatgaatgaaagaataactacccataagaaggataataaaaaataaactgaacctttattatagagacttaacctcagttattcgggtcttgggggaaaggtgagctgagtctaccctatgccccggaccaccctctggtctaacatttcttgtgcacttactatactccctcctcagttttcctcttttctccattctcttccgacccctaaggacatgaaccacatttctgctctttccttcttgtctcccatccctctcacccacccagcatacactcagcattcagtcgagtcccaccaggcaagtaccgtggtgaattttgtgtcagacgtattctctcagcttcatcttgagcttttgaaatccaagcatatcatgattttaggtatgttgactatttctgcattgggtagtggcaaattttaattgaaaaatttttttgttgagcctcgactacagaccaggcacagttctggaagctaggaatacaataacaaataaataagactggcacttatgttctgtattctaatatatcagtggtttgtatgcagttattatatgatctataaggcatcctatctgtgcacttaagcagttgtaggcagcccgcttattgaaaatactgtagaggttagagttgcttatgtatttaaaataaaaaccctttcctttaaatgcatattttaagactcttggattgcttgagaattgataataaagaggagtgagccatagatcacaatggaaaaatacttagtttttttcttttttgacgtgcaatgactcacatctgtgaaatggcaaaactcataatagagataaaaaaaaatgagttgatgagttttaagtttaaagcattaacctgaagcctggggaactcatctgttttcatgattccttccatctctgttttttttgcttggcatttatttccagagctaagtaaattacctaagctttcaccaggaataagaaacttatcttctggctgggcgcagtggctcacgcttgtaatcccagccttttgggagaccgaggtgggcagatcataaggtcaggagatcaagactatcctgtccaacatggtgaaacaccatctctactgaaaatatcaaaattagcctggtgtggctgtgtgcgcctgtagtcccagctactcaggaggctgaggcagaagaactgcttgaacacgggaggcggaggctgcagtgagctgagattgagccactgcactccagactgggcgacagagcaagactctgtctcaaaacagaaaagaaacttatcttctgactctcatgaggatagacttgggtagtcaaatttttgatgttcagacacacttgattcaagaaaaagtattttctctggttttggatcaacacctctatctttaatgcccaaacaaattccaagtggctctccacctctaccttttgcaagatgttctcagcttcagatttattagcgcatgcgtgctttcatgtacacacacatctacatatctcttaagctttcagtctaaaacaatgaattgactattggaacatttctcttgattcaaaattatatgttttttcttttattgaagtaaaatttatatacgagcaatgcacagcttttaagtgtaaaattctatgagttttgacaaatgtaacatcacccaaatagaacacctgcatcaccttaggaagatcccttatgcctcattttttttttttaaaaagagcatttaatattaatcattgcataaaaaatgaaatgccttgaaatcctacagttatatatgaaagaaacttgagaggtcttccaaaatttgaaaacatattaaaagtgtaaatgttattatcagtaataaatgcgagggtgggattttcctaaattgtcaataataaaattgtgatcaaccatgctagagaaaagactgggctatctattcaacccatagaaaatgtcacacaatcaatctaccacttcacacccactaagatggctgtaatcaaacacaaaaacaataatgagtgtgggtgaggatgtggagaaattagaaccttcatacattgctctggtaggaatgtagagtggtgcggccactgtggaaaacagattggaaataaagttatacagtcacgatataacccacaatttctactctaggtagaatggaaaagagaaatggaaacataacagctacatgaaaacttgtacataaatttttatagtagtgttattcctaacagccaaaaagtagaaacaactgaaatgtccatgaactcataaatggatcaataaaatgtggcctatccacacaatggaatattatttagcaataaaaaatgaagttctgatatatgctacaatatggatgagcattgaaaacattatgataagtgcaagaagccagtcacaaagaccacatattttatgattccatttatatgaaatgtccagaataggcaaatctgtagaaacagaaagtaaattagtgtttgccagggactgaggggtttggagggaaaagaggagcgaccgccaatggggatagggtttctttaggggatgatgaaaagtttccagagttgactgtggtgatgattgcacaaatctgtgaatatagtaaacacattgatttgtactctttaaatgggtgagttgtgtggtatgtgaattggatcttgataaagctgttttaaaaaaatctttccaatgagattatcaagagtatgtagccaggctgggcacggtcactcatgcctgtaatcccaacactttgggaggctgaggcagaaggactgtttgaggccaggagttggacactagcctagccatatagggagaccccatcttaaataaatgtaaagttagctgggtctggtggtgtgtgcctgtagtcccagatacttgggtggctgaggtgggaggattacttgagtctgggaggtagaggctgcagtgagctgtgattgcaccactgtactccagcctggtcaatggagtgagatactgtctcaaaaaaaaaaaaaaaaaaaagtatgtagccaaaatacttgaggaaaaagtattgctatggcttgaatgtccctgccaacattcatgttgaaatttaattgccattgtaataggactaagaggtggggcctttaagaggtgattgggtcataagggctctgctctcatgaatgctgttattaagagagtgagtcagttatctagagaatgggcttctgacaaaaggataagtttggaccccatttgcttcccgtctcttgtgcttgcttgctatgtgatgctttccaccatggaaccaccctcaccatgtgctgttgctgtgctcttggacttccagcctccagaactgtgagagattcatttcttttctttattaattacctagtctgtggtattctcttatagcagcagaaaacaggtgaagacaaatattactgaagtgttttaggaagtttattactacaaaatattatgtaggtggtagataaaactattgtgtgatttttctggatttggtaatgtttgtgggatttgtcaactcttagaaatttgtatttgagatttttgtcattctaaataaacgttcatgttgtactaaaaaataaatattcaataatctgggcttttcagtgaccttcagaaataggaaggattaactgtatgcatgaataatacatgatggaatttcatcttccttttcttcttttgacctgcagtatataatgtcttgcctactatatagtctctccacaccacatacattagggctcatgggaagaggtgggggaggaatatgttattggataaatatacactagcccatgcctaggtggtctgcgtgcctcctttctttttttaccaaggcgggtgcttgtgtattctgacactgaacttgagcactgggggctatggtagcagaaatggggattcttacttcatttttaatatttccaaaagcctaacaaaatatttacacacaaaatacatgctggcaaaaatgaaatgtcaatgtttatttgatttgctttaggcttcattgacttagtagtggtaacactggctaatttatgctgatcagaacctctaaccattttatctttgattatttataactggacgaatgaatgattatttaatagatgtgatcagctttataagtacaatcttaaaatattttggcttcagggataaaaccaattaaaaatttcctttgcgatggaaattggaaacacatttctgtggcttcacttatgaaatgctcctctattgaacattcactataggccaggagctttccttaatttatcatgctaataacacttctgtatggcattattaacccaattttataaatgaggaaacagaggctcagattatagatgtctatgcccaagtcccttaactagaaatatcaagtaaatctatgtccaccctgcctcctatatgattacttttttttgtttgtttatgagttggttaatttcccaggtaaaggccagtaggccagtggtcaagcctcagggtagcaactacattttgtactgggtcttacttttgatgctttgccaacaaaaccgtcaaggaaggcaggagttgactgggaataggcacactgggactgtctctgtagggtatgtacgcaagggtaaagggagatcacaaacgagaaatatgcctgtattcgtccattttcacactgctgataaagacacaccggagactgggcagtttacaaatgaaagaggtttattggacttgcagttccacatggttgggaggcctcacaatcatggcgtaaagcaaggaggagcatgtcacatcttaagcggatggcagtaggccaagagagagcttgtgcaacaagcgctcccatttttaaaatcttcagatctcgtgagactcattcactatgacgagaacagcccaggaaagacccgcccccataattcaatcacctcccacaaggttcctcccacacacctgggaactgcgggacttacaattcaagatgagatttgggtggggatacagccaaaccatatcaatgcccaagtgactggggtgcttccaaacctacacagctgctcacactgctgctctggcagggggagcatgagctgcggacgtttttctgaagttggagtgaatttgtataaaggcatacactccctcatgctggctcctctggtgggtgtccaaggcttcctttgatagatgcagatggggcagccaaggcaaagtaggtgacttatgtggccttggtgcatctcagctatgctcaccgggcagcccatgctgacatggtgggcgagatcgtggggccaccagggaacctgactccactcccatctctaagcttggccaagtcagtcacttctcgttattggggcgtcttctacctgtcacttgaaaaagactgttctttggaacaataaggcggtaacacatacacaggaccaccctgtagccggccacacaggttccgcctccaggtgcttggatctacttaacggacctcccagggggaaagatttgcggtctctccgtccctctaccaggggagggcgccgttccagcccttgcctctgcggcacagatcaaaggacggaggaaaaaaggtgcgggtccggggcactaatgttcgaaaatgcagttttaagtgacctctccccgcgcacgcactgtcggtgggggcagtcccgaggccaggctgcggggcgcctggggggactcgcctcagggggaaatggccctttcagggctcgacgggtccccgggactaaacgctccggccgcggatcggtgccgggggagcccggtcagagaggccgggaccccgagggacgcctaggtgcgtgtcccgaagcccgcgtacctccagccccggcgagacggcgcccaactcgcggctccagtcacacggcccttcctgagaggaaacaccagggaaagcacctctcacttttctcagggtgggaaaactgtgaaggaagaagacaaagcaacaggcaggttttcgctcgcgggctggaggctgggcccagggcgggcgcgcggctgcgggaggcagcggacggtccgggccgctcgagggctgcactgcgagggtctggatcgcctccagcctcccccggaggccccgcccctgccctggagaccccgcccccgcctcggaggcccagccacctcccccctccccgaggcgtcggccccgcctctccgccctccgccctccgcccccggggcccgccaccgccggcccgcctgcgccgccttcgctttgacgttactgggggccgggcgggcggctgccgcgggctcgcagcctcgccagcctccgccagggtgcgcgcgggccgccgcctctcggcagtcccgggagctcaacaaagagcacgcggcgctggccgccggcactcgcgccctgaggctgcggccccggagcgcccggcggcggtttcggcgcgcggccgggctggcgatggaagatggaaggaaggagcgcagcggtgagctccggggccggggcgcgggcgcggggtgcgcacgcggcgccgctgttcgacgtggggtttgtgttgctttgtcgccgctctgtcccccaggatcccggggccacctgggtttgtgctgtctggataggtgcagggtgcgatttttctcttcgcgcttgcttgctttgtgttttttaggagcccagcagggtcaactttgtggtgttaaggtttaggggttttagttcatacctcggctttgaaaacctcagactttggagaaaagctatcaaaagaaggcaacatgaaagaggacctcgtatgccgatctttctttgcccggtcagcttgtatttagggactatcacgtttctgtcagaaagaaagaaaaaaagactaaactaaacaaacttgaattgagcgagcaaacggacaagggaagattattcggtgcaattcccaggagcttttacagatgtttaagtcattctgttttacatgcatttaactttatccgccgttttcagctttccgttctggcgaatgatgttctgaattttttttttaaacacattaacaccgattagaggacgtgggtttagaatgttgttggtgacctaaataataaatgtttcgttttgccattcccctcgatgtcaaaggatgttaaacgcccactaggcagaggatggaatgggcaccacgatttcattttctagacactggttctcccgatagcgggatccaggatttccgctccagaataactcttgagtgggtccaggtgttggtgtagggaagacggagatctggaaaattactgtaagtgggattctggcaacaaatgcctcaatgcgttcgttgtaattgagtatgtgcaaaggattttgcaaagcccggtagctaggtaagtaggataggatttctgctttcaagaagcgtgcttgagagcttgcctgggagagacttatgcgtaggctaccatggaggatctcagaggaagcttctggcctccgggcttggaagttctcagagaggagctggcagttatgctggaccttgaaagggaggggttgattggatttttgtgagatgtgagggaaaggatgtcccctgctaaaggaaagggaattcactttctacccttttccaagaaatgatcctttcttttctgagagtatttacaaaccaagaggttttcttttcaaaaagtcatgaaattcctcttcagcagttaaaagtgcaacatgctcaacatcaccagttaagcaaatgcaaaataaattagcaccttttcaaccagtttttagtggctggctggatgtccttccacaacctttttatatccatccacaagtgatttgtcttgtaagatatttcattaatagaagctttttgtactaaaaggagtagagtggtatcaagaaagggacttggatctgtaggtaggacacctagcttagaggctttgccactgactgggtgagtttttgccaccgtcttgggcaaattatttaacttctgtcgctacagtttcctggtagggtgaggggattaggtagatgctctttcagagccttctagccctaccatttgatatttccatgcctagacacgttttatgcattacttattcagtgatgtactcttaatttcacattctaaatatctgtttgtgtgttctgtgaatggatcagcactcttatcctgaccattgaatgtgggagagtgattagagctacaaagctaaaataaccttattacggccaaattccgtggttgaatgttgttgttgtttttttttttttaaatgcgagcataagaagcttgatttgccaatcttaatgtgtgttttctttaaagaaagttttgttgacactgttcatttgtgaccaaagaataacatataccttattatgtacattgcacttaagcaattcaattctgcttttaatcagatactagtaatttaaaaaattgagtaaccttggaaattcttacaggctagtaaatcttgggaatttggaaataaaaaaataaagtaagatggaagtagctcattgaaaaagaaaaatttaaaggtactttcagtcaatggctctgccctctttctaaaaccttgatatttacatatttgtttgccagccctgatggaaaattatttgagtggaatttagcgtggcattacattgaaaaaacatgtccatggtactactacttttggaggtgattttttttcttttatagaaattcaggtgtgatttgtcatgcattattcataaactaagacaccagtgtggtgataggttaattgcagtcttggttaagagatgctgaggcaaaaccatgtgaatattaaaatgtgtatctgctttggcttaaagactggtttgtttgaggtttacatggggtaatgtcatttggacattatgaaaagagtgtctttgggtttgggttggattgggaggtgagttatggatagtgatcgtttccaatttttggaaaggaattcagacatgattgaagttgggtcagactgtaaaaaataatctggtgaccaaagtctgtggagtttagtatgtgaatcaggcttataggaggctggggatctagtgtgaccttgaattactgctgttgtgattctcaccatttaggggttcttcccggaccgtctgggccaagcacagaggtccttggcttccctttgctaagagtggaagtgttttcactttgaatattgcctctcagttcttcctagttcttttacagttaaaccagcctggctttcatttaggagagtacaggatccatgtgaaattctccagagcatttgttcggagtgcccatatcttgacagcttgtgttgtttgtgatattgtatgcagactcagggatttgctggaaagaatttaagtggtggcattattttttcaaagagtgtttctgagttacgttgaccatctttcaaggacatttttcacaagctccaaattaagtagtgttgtagtggctgttgcaatttacaatggagaaaaaggataatttgcagcatatagttaacaagttattcttaaatccaaattaccaaatgtccatgcctcatttgaaaataaggcataactcaacattaataatgaatctttgcgtgtgctatcttatttatataaaaacagtgcatgtccctgcagtgcttgtttgctctaccaaaagaaaggtttttcactgcgcccagaaggtcaacaaacttgggcccagttggtgcctagtggggagggactttgttgacacatcagggcacagaggtggcagagcattttctctcttggtgacaccggtggtgtgagggatccgcccgctcttctccccttcctgcatgtcaggctgcggccatggcagaccactcactccttgaggcttacttgaggaccactcactcctgagccatctggtttgaaattccctttcctctgagtgtacatcagtgagatgaatcagaataatttatacatgttgaaggatatttttaaaagattattattggagttagggatttaggataactgggaaaattaacattttgacctaagctggtgttcttttcttacatggtattttcacacgggtcttctgagaaagcagcattttctaagtttcttgttaagtcctgatttttctgttgttgttgttgacacaagatctcactctgtcacccaggctggagtgcaatggtgcgatctcagctcactgcaacccctgcctctcagactcaagcaattctcctgtctcagcctcccgagtggctgggaccacaggtacacgccactgcgcccagcttaatttttgtatttttagtatagacggggtttcatcgtgttgcccaggctggtctcaaactcctgagctcaggtgatctgccttccttggcctcccaaagtgctggaattacaggcatgagccaccaggcccggccaagtcctaacttttggaaaacgcttatttcgagtgatattttcctggcatggggcgtttttacaatcacagctaatgtttattgagttcttacttgggttgtctcccttattccccatgacaacccatgaggtcagtagtgtcattatttccattctgaagtcaggagaggttaaggaacctgctcaagatcccacagtgagtaagtggcagagctgagactttaaactcaggtcatccaattttcttaaccaccattctgtttttatgtctcaaagttagcattgcgtgttgcagaaactgagctctttggctctaatatttagattattcgagtcttggaatctgaatattggatgactaattcatcaccgaccattatacatttgttggcttaatagtgggaccagatttgttgtttggctcaagagatagaaatggtgtaattaaacaacaacaacaaaacccctggggtgtctaaaaggatctctgtaggaccacatgtaaggagttccacgtagttatgtgtcattaattggaattcacaataaagcagattaacaaattaaaatggaatgtattttaatttctttttaatttctaatttaatttctaattgcatcacctcagagaagtgatctagatgcttcaaccacagagggtgttgacacagtgaaggctgcttttccttgttatttcttcccatgagctggggcttagagattgttaagaaaaggagcttgaaacaatgaggaggaggatggggaatgagccgagggcattcataagaccaggcggcagctgctccctgtttccctggccttctgttctcagacctttgctaagaaaaagtgaattatagaaatcgagcagcttggttttcttatgcctgtttggtctgtggacaagagaagtagaaaattttaatagaagcagctgtagcttcttttgtttggcctctaggagattactggttaagggccagtggaactgcttttctctgtatatggaaacttacatgcttttttgaatgtagattttcaaaaacttgtactttcaagaagttatttgataggcacagttttgattgagtcataggacactaggagagtggaaatttaggtataagagtgatggcacagacgatgccattagatggctgctgtcttcgtgactgtgttattttctggcgaagttatattggaaaaatgcttggaaattgacagcaggctttgtgatcttccagagtgtctcctctgactctgccttcatgtccctacaaggtgcaagtagtgagtgtttgaagaggcaagatatttcttgcatctgaaactttgtttgaatagcaaagttacttttgggcagatttttatgtttcgccgattcatttctagtggctacaaaaggtctgtcagccaccttccccacccgctgatgcttatatctccctataaaaatctcccttggccgggcgccatggctcacgcctgtaatcccagcactttgggagcccgaggcgggtggatcgcctgaggtcagcggagttgagaccagcctggctgtcatggtgaagccttgtttttactaaaaatacaaaaattagctgggcatggtggcaggtgcctgtaatcccagctacttgggaagctgaggcaggagaatcacttgaacccaggaggcggaggttgcagtgagcagagattgtgccattgcactccagccaggcaacagagcgagactccctctcaaaaataaaaataaaaataaaaataaaaaatctcccttgaagaaaaattaaccattgctttccatgagctaatatctgaaagtatcaaggcagagtctgaagtacagatattattatgctgttgatttaagcattcagcaaatattaagtgcttacctcgtgctgagctcagtgtacactccaaaaaaccttgtccactgacctaggcaaacctcacttggatcgtactagtgcgagtcaaacttcacaatcagcaaatactgaaactacagtacctaagaactcagaacttgtgaactttatagaatcgatgcagttactgcctgaatcagcattgttcaatagagcttttactatgatggaaatgtcccatatttgccctgtccaataagatagtcagtagctacatgtggctgctaagcatgtgaaatgtggctagtgagatttaagaactgaattttaaattttatttaatttcgataatttaaatagcttcaggccgctagtaactactatattagggcaactttacagcaaaagtgcttttttaatagatggcattatctgtcctgggctgtcatttctcactctctctctatttattttttttgagacagggtctcactctgtcgccaaggctggagtgcagtggcaagatctcggctcactgcaacctctgcctcgggctcaagcgattctcctgcctcagcctccagaggagctgggactgcaggtgtgcaccaatcatgcctggctgtttcgtatttttagtagatacggggtttcgccatgttagccaggctggtctcaaactcctgacctcaggtgatctgtccccctcagcctcccaaattgctgggattacaggtgtgagccactgggcccagctggctgcagttgactttttgttgcaagctgtaggtggttccctaatttctagccctctttgaatctgcctagtatcacagtgaataatcaggtgggcagtgctatatatcaaagctaaggtgttttggggacacctgcagagctgtcttggaggcccagttgattttcattgtagatgaaattgacaggaaaaatgtctgaatagcatctgtattggcaaggattgtgctgagttttaaagataggtaagtgaaggtgcccgtgtccagtggttagaaataaggaacattctaataaggcagtggaacagaggaaaaaggtcttactctttatccccaaatactctgtagtgacaagtctggaaggtagacagtcacattcgcaggctccaggatttcttcagagttagccatgtaggagtagtcttgaggatagcagtgtgaaattctcatggttagacctctgttgaaatacattttaattttgagttttgtaatttgtggtggaaccacagtatcaaggcataacaatacaaaagcgtggggataggaagaggagaaagaatgacatctatttagtatttattatgggctaggtactatgtgaaacatagtatgtgtgagtgtgtacatgcatgcatctgtatgtatttatatattctttttttttttttttttttgagatggagtttcgctcttgtcacccaggccgggggtgcaatggcgtgatctcggctcactgcaacccccgcctcccgggttcaagtgattctcctccctccacctcccgagtagctgagattacaggcacgtgccaccacacccagctaatttttgtatttttaatagagacgggtttcaccattttggcccaggatgatctgaatctcttgacgtcatgattcgcctgcctcggcctcccagagtgctgggagccaccgcacctggcctatatatcctttatagtattgaaaggtaggtggtgtctccattttcagagggtgaaattgaggctcatggagattaaatgggatcctttttttaaacaactttattgagatattcacatactatacgattcacccatttaaagtgtacactcattgatttttagtatgttcatggagttgtgcacccatcaccatagtcaattttagagcatattcatcacttcaaaaacagcccaggccaggcacagtggctcacacctgtaatctcagcactttgggaagccaaggtaggaggatctcttgagctcaggagtttgagaccagtctgggcaacatagagtgagacccctttaatagcaaaaaaatttaaaaattagctgagcatggtgatgtgtgcctgtaatcgcagccactcaggaggctgaggcaggaggattgcttgagcccaggaggttgaggctgcatgcagtgtgtcgtgattgcatcgctgtgctctagtctgagtgacagaatgagaccctgtctcaaaagaaaacaaaaaaaccccaaaaattccagacccatgagttgccacctctccccattgctcctatccctcatcacaggcaaccactaatctattttctgagtctggattttgctgttctgcacatatcatgtaaatgaaacaatacaaaatgtggccttttgtagctggctttttcctcatgttttcagtgctcatccatgaagtagcatgtgttagtacttcattccttgttattgctgaatagtatgccattgactagatgggtcacattttatttatccgttcatcagttgatgggttgtttccacttttgacagttaggaataatgccattctgaacacaagcatacaagttttgtagccattctagtgggtgtgaggtggtatctcattgtggttttgcttttcgtttctctaatgactaatgatgatgaatatattttcacgtgcttattggctcgtattcgtccattttcacactgctgataaagacgttcctgagactgggcaatttgcaaaagaaagaggtttaatggaattacagttccacatggctggggaggcctcacaatcatggtggaaggcaagaaggatcaagtcatgtcttacatgtatggcagcaggcaaagagacagcttgtgtgggcaaactcccatttttaaagccatcagatctcttgagacttattacaatcaagagaacagcattggaaagactcaccccggtaattcaattaccttccaccggcttcctcacacgacacatgggaattgtgggagttccgattcaagatgagttttgggtggggacaaagccaaaccatatcattggccatctgtatattttctttggagaagtgtctattcagatcctttgaccgtttttaaattatattatttgtctatttactcttacattttaagcattgtttttatattctgggttgaagtctcctatcagatatatgctttgcaaatagcttctctcattctgtgggttgtcttttctgtttcttcttcctgacctttgaaataagtgaagttctttatcttaaacagagcaccagagggcttagcacagttctaggccctcacgtattttccaaagtgagttaacaaaactttcagtatgatgacttgtgtaacaaatattgttttttaaatatctggttggaagaaggatggagatttaacctttgcctgagctatttgagagggaccacaaagctctgcagacttgagactcttatgtatactgaaaggaaattttggaagccagttctctggagacttttatgtatagaaaatagtcttctcctcctggattagacagagaattgcttgaaaggaggacaccctacctagaagacccttcttgatctttttagatactgtaatgtcatgatctaaatagtgtttcccaaacttgtctgtcaagaattacctggtttcagatttctagggctgcctgaagattctggtacagtggttctgaaggagcagtcttcctaatcaccccatgcaagtcttaagatcggaatgtttgggaaactgatctcacctggtaataatgatgaccttagtggttgcccctagaacctaattagttctctttagtgggtgtggtctccagttgacaaacatccctcgccagggagattacaaggagctgatcaagccagtctggctacattgcttacctcagcactgggtcttgatccaagacaacccaagtccccaaccccccaccccctgccagtgtggtagagatgtgtcataaaaatttaagccaggctcacagacattttcaagttgtaaagttgccaccactctcttgggaggaatcctccctccttcttccctcctcttttaaaatgtgctcatattttcttaccattgctgaatctctggaggcctcccatagtcacacagatctccatgaaactcaatggggagaaaagggcatggaaagaaaaataaacattttacataatctctacactttgcttgttttatgtggttgattaggatctcctgaagaatttcaggagagtgagaagtgtgaagttgggagggggagactcacttacctgacctctttatttttgttttttaaagacggggtcttgctcagttgcccaggctggagtgtagtgactactcccaggcgccatcatagctcactgcagccttcaactcctggcctcaaacaatcctcctccctcagcctcccaaatagctggaactacaggggtgccattgtacttggccctgttcttctcttaaaggatattctgtgttaccagaggcagtgcagcatagtggttggagtgtgcccttgaattggatagtctgatttgcttctatctgtgtcaccttgggcaagttattttaacatctctgtgcctcactgcatcattacctcatggaatacctcaccaacatttagtggttagaaggggcttagacagttttggaaagacagtaagtaggcagtaaatgtgacctggatggtaggttatacttagctgagtgggaactggaattattattgcccttcttaaagtcacacacctattaaacggcaaaactggactttcttgtaccctagactgtgattgcctacaggtgtgctttatggaagccaggagaaaaattctaatacacttagctctctgtttctatgggttctgcatcatgcattcaatcaacctcagatcaaaatatgtggaagaatgttgtgtctgaacatgtatggacatctgtttcttgtcattatttattcatgtagtataacaactatttacatagcatttacattgtattaggtattatacgaaacctagagatgacttaaagtatatgggaagatgtaaatatgttatgtgcaaatgctacatggttttatttttttcaacttttaactttcagtgtttttctatagaaaaactgcacataaaagaataaagaattcatgcagtcatgccaaatgaccatcacaatcaatcttgatggtactcttcagtagatactagaactactaagttgatatatgcttgttccttaaaaagtatacctcatcaaggtgaaataaatgcgataataggaacggtaagaaccatgtgtttataagtgcctcagggtcaagctcttacagtaagaccagaaagttacacaccctagaacaccagcaactcacaaggaagacgggggagttgtcgccttccttccttggaggtctttaggctgggaaagttccatgtaggtgtgattttgcttgaagatagagatataaactttatgacctctcaaagtcactttctggccaacagctttagcagttctaagaaggaacagtttcattttgccttcaagggatgttccttttctgtgtcctaaggcagggtgatcagttagtgagagaggatgatatgtttgcaccaagctgctagcagaaatgagtgtggctcagctccagtcctggcccttctccccttgtctagtcaacctcagccagtgcagggtacccggggagggtcaccgttagtcggcctcaaaggcgctgttgctggctttcacatattcagacttcttcttgtgccttgtccacagtttctgggggatgctggggacaccgcaggaagtactgtctgtcagtgatagggaagcttctgctccttggtgaatggttggatactctttggtcatcctgagatgtctgaatcctgtcatctgaataccttccttctctgagcccggggctgctgcctccaccaaggctgaggctggagctttccttgagatccaagacactggaggaatcaaagatttttccatgtgcttgattcctatacagattcgatgcttcgggtacaaatctccacttgttagccagtcagtcaaagcagagaatttctaaaggcctttgcaccgagcagcgagaccaggcaatagggtcagccaatgagaaaactgccactcttccagagacgctggaactaaggtctaaataagatcagtgtgtcagtgtaggtgcattgactgcaacaaatgtaccgctctggtgggggttgataataatgggggaaactgtgcatgtgttgggggcaggaggtgtatcgaaaatttcctcaccttcagcttaattttactgtgaacctagaactactctaataaataaagtctacgggcctgggcaacatagtgagaccccacctctacaaaaaagaaaaaatttagccagatgtgatggtgcgagcctgtagtcccagctacctggaagactgaggagggaggattgcttgagcctaggaggtcaaggctgcagtgagttgtgatcacatcactgcattccagtctgggtgacagagcaagatcttatctaaaaaaaaaagtcattttaaaaagataatacatgtggaagcatttagcactgtgtttgcgcgtggcaggtgctcagagaatgtgtgcgcttagttccttcttactcattacatcactttgtataagagatttgagcacctttgaatccccaaatctatgaccaatccccacttatgccccactttaccgatggacgactatatgtggtgctttggcccagggtcctcattcaatatgtttctttagcgaatgagttaaaccccataggctgttacatagctaagtacaggaaccctattaagaatatacggcagagtaggtgctctgatatttagcttcgtctaacggcagaatagaatttcctgagtcagcaggatttctggcctgatcacttttttgctattggcttcacagtggcttcatctcctgttttggagacagggaattttccccattccctgggctgcttttagagcttcaggtgtgtgactttcattaatagctctcttgcaaatggcaatctaggacataaaagataagagtaatgtgttactatggatttcctcacccagctctttcccttctggcagagacttctgatagaagtagataaaggcttaggctgtgttcaccgggtgtgatgtagcagtctcagagatctgtttcattcattcttttgattgtatcaggttttttttctctctcttttttttttttcagacagagccttgctctgtcagcaaggccggaatgcaggggcatgattctagctcactgcagcctcgaactcctgggctcaagttatcctcccacctcagcctcccaagtagctgggaccacaggcacacactaacatgcctggctaatttttgtattttaactttttgtagggatggggtcccaccatcttgcccaggctggtctcaaaccactggcttgaagtgatcctctcaccttggcctcccaaagtgctgggattacaggtgtgagtcactgtgccaagtcatattttttcattttgggtgcaattcttcctaccttctcggtgtggcttgtatatcagttgttggcctctcatattgctgtgtcctgcttgggaaagaaagtctaataaaatacaatatcatattctaaaactggagcttatgtaaagataatatagtttatagatttaaaagaacttgacaggcctagaggaattaaagccgaaattttagaagcgttactaaaacaaatgtatctgtgattagtcagtgagaaaatattatcatttataaaatcattaagtaatgattcagagggaagttcagtaagattcagaggggagttagaaagataatggtaattccattttttaaaaaacttgggtggtgtagttagtatacagaggtatttccttcatgaatatttgtattttataaatattttgtaaagttttattttgcctctgtttagtaaaaaataattttaaaataaaaaatttgtcagtagaattctcttgtggccatttaatggcttctttctaaagcattccatttagcaatacacctctctctctcattatgcttatgtttgttttacataatatttaagttacataattttggtagcaagtacaaccaggacaaatccattcaggtgcaaacacaactgattcttggtaatcgccacctcagtcatgtgggcagaatttcatgagcttgctgtagtcttaagaccacagcctgagcgccaggtactgattttttcattctgtttctttatctgtcaccagctgtgagcagcaggtatgaatgggcatcagccagcatgtcttcccgggtaacttgtgtcaccttgtgagacatcctggagttggttaattggagggtggttaagaatttctgctgtatacataacttcagaaacaaaagcaaacctgttatggtctaaggaatgaaaagggttattataaggtagagacattaggacattctttccattttgttctaaaatcacttttggcatttgtctgcctcacatcacttatgttgtgtacaaagctgcttccctcctgaataatttatttctacatctaaaatgtttgctgagattattttgctttcctttcacctggaagataattttaggtttttaagaaatgtggtttataaaaatgggacccaccatgtccatctacagagtgagtgagttactaaagtataacaaaaacgtttttttctgtcttgtacttgagtccagaagttcactgaaaatgggttacacctggaatttatgtatcataactataaagtgctttgtactttgcatcataatttctctttcatctaaagaaatcaaagtccattatattagcctggctacattcacctgcttgcagaaagggtggaccttttgggacccatttttttgttttttgtttttgtggagatggaatctcgctctgttgctcgggctggagtgcagtggcaagatcttggctcactgcaacctccgcctcccgcgttcaagcgattcttctgcctcagcctcctgagtagctgggactacaggtgcatgccaccacacccagctaatttttcgtatttttagtagagacggggtttcaccgtgttagccaggatggtctcaatctcccgaccttgtgatccacccgcctcggcctcccaaagtgctgggattacaggcgtgagccaccgcacccggcccaggacccatcttttaaatgagctctggtgaagcaaggtccagggttttgagaaagcctagcacccttggagtgtttcagggcatctctcagttaagagagctttttctttacaatgggccagattttgtatgtggttaatttaattatcaaattggcgcagctttgtcttttccacggtatctgaatatatgtgcataccaagtgacttatttaaaatacaactcttttaaaaggctacagggcgtactgtaataggtcatatgcagttctgtgtcacagtcacttttccttcattcatacattcattcaacagatggtgtttgagtgtctcctatgaggcaggcattattttaggttccagggatacagtggtcaacaaaacagacaaaaaaataagtaaaataaaaattaaaaaagaaaaaaatccttgttcttacaaggtaagacagacagtgtatgagttgtgtctgcatgtgcgtgtgtgtagtatgttgacagtgtgaagcccttcagggaaaaataaggcagaggagggagtttgggagggggtggagttgcagttacaaatgggtggtcaaggatgaccttgttgaggtgacgcatgaggaaagacctgaagaaggaaggtaagtgcaccgggaagagggcacagcaggtgcagagccctgaggcagagccatacttcctgccttccaggaacagggacaccagtgtgactggagcacagtgagcagtggggtcggaccggacaccgtcgccaggtcctgtggggccttgttgctattgcaagggcttcggtttggactgagagtgagcagagaagcctgttagagagtttcaaataaagatgggacatgatctggctgatgttcttggaggacatgctgctgctgtgtctcatgagaatagactgaagcggggaagagtggaagtaggaaaaccagttgggaggctgttgtaacctaggtgagtgagggtggtggcttggaccaccatggtatgttttgaaggttgagtgggaaggatattctcattgtctgaatgtgggatgtgagtgggagaaagcatgggtgacttgcaaaatactggcctgtgcatcttgaaggatggaggtgcattaactgagatagggagaagctgattttggaaaggatcaggagctcagtcagggagctgtctggtaggcaggtggatatatttatctggattacagaggaaggggctgggttagaggtgaacatttgagagttgtcagaatatacaaactggatgaaatccacagggagcgaatgtcaatagaaaggaaaagaagttgagggccaaaacctgggctgcttccacactgagattgaagagatgagaaggcaccaataaaggagaatgaaggaaagcagcgaatgaggggaatcgagagtgcgaggtcttgccagccatgtgaaaaaaccacttcaagcaagatgagtcagattctcccgggaagtaaagtaaaatgaggggcaaatgagatttgacccagggatttagcaatggagatgtcattgctgaggttgataaccaactgggattatagtgtagtagtggggaccaaatgttgatcagtgggtatgtaagagagcgcagaagtagagaaacggaaacatcaaatgtagaaaaatattgcaaagatttttgctgtaaagagaatgtgagaaatgtagctgcagggagaaatgaggtcaagagatgttttaaaaatgcaggaagtaacagcatgttcgaataccaatgggaaagacagtaaagaggaaaaaaatatgatgcttcatgtagtagcataattcccaaaggacctttggtgtaatttaaaacagcccaaatcatctagcttactgttgtaaacactaatttttgttaatgctgttgatttttttcaacataaagtccttatcttcccatctccatcaaaaatcaaaactgtttcttttgtctgagccgttaaataaatgtcttttgggtatgaattgtgtctgctcatcttgttcaacctcagggagtccctagttctgttaatagttatgcaatatgcatggatctgaggtacactctgtccacatgttttcagtaactgatgacttctttagctctcatctgaggcacagattccccaccgtccattaagcatgtataagatcacattttccaagaatttattcagtcaactaaatgttcattgcatgcattaaacacaaaaggccccatgtttccaggtagcaaccacagggcaacagatgggtaataagagtaagaatttaaagaaaccggtgtccttggatcttgtgtggatgaccagttgtttcccagacattactgtggaaatcacctggggacattgttgaagtgaagattctgattctttagttctggagtggggcctgagatctgcatgtttaacaagctactaggtgatgctacggatgctggctgatatggtttggctgtgtccccacccaaatctggtcttgagttgtagctcccataatccccacgtgtcatgggagggacctggtgggaggtaattgaatcatgggggtgggtttttccctgctgtttctattgatggtgaataagtctcacgagatctgatggttttataaaaggcagttcccctgcacatgctctcttgcctgccactatgtaagatgtgcctttggccgtttgctttcctccatggttgtgaggccttcctagtcaagctgagctgtgcatcaattaaacctctttcctttagaaattactgagtcccgggcatgtctttaatagcagcctgagaacagactaatacactggtgcacctcattttgagtagaaagagatcttagggtaatacttcctggtttatttttcctccttagattttgcttctgctcttcctctacttctctattattgccacattgggccttttccagctggaactttcagactcagaacaacaatatattgttgtagcatttgttgatagcatttcagtatctccgctttccactctgcatttttattgatctttgcaaaaaagctactggcgtctgggagttttgtttagtaattagatagctgaagagactaggccaagtttcatttgcattatgtagggaaggccagacttctgggtctcattcacatcccaaggccatatttgtcctagacctctgagtacatgctttggagctataggcaaagtcccagtactggggccaatttgccagttcagttgtcagcttttaaattctctggattcctacttgctaaggccaaatctcttcagtaaacagctcccttgctggaaagcagtcctttggctttgttataaataaattttgtcagcttgtggaaaatagaataaacctttgaaagtcaccactggctaatgaaagcttcttagatggctctagactggacgcggtacttaaaaagtacctataaaaggatatgtctcggtgggggttggagaagagtttgaaattaattatctgaactctgaaaattcctgtaaattctacatttagtttctgctatactttagaccatagatcttgtcctgattttaatgaggcatactttttaggatcttctgtatgggtgctattcaatagaaatatgatgagaatttcacaagtaagtttaaattttctagtagccacattaaaaaaaagtaaaaagaaatcaatggaagtaatgtaggtaatatattttatttaacctactgtgtccgaaatattgtcattttgacaaaagcttagtgataatttatattctttgcttgtacttagaaatctggcctatattttacactcacagcacatctgccatatttcaggtgctaaatggccccatgtgactgtcgtattagacagcacaggtgtatatgcagagcagctgcaggtatgacaagcacagttttatttgtttctttatctcataattctctgttaataccaacacatgatttgctgtagtgaggcatatatggttagttaagtattaaaataaagatggatttttttacagtaatcttaaaatctaccgtaaaaacaaatggatgtttcagaaaatagataattataaatatgcagagaatacaaacatgttgattgacttcagcaatggctaacagagatgaggacctataaaaattgaaaatgtctgagacttccagataatacatttttagcaatgttgtttaggataatttactgcccctcataaggtagataggtcctgtcatgactcacattttatagatgtgaagcctgagaccagagaggttaagtaatttgccttagatcacacagtgggtaagtggtagatctaggatacggaactctagtcagtccggttccagagctcactcccttcaactctgtgccagactgccttctcagcacatgtcagtgatacatacatttgcttcatcttttaaatggtatgattgagggatagtgctctttagctgaaaaaagtgattgatataatcaaattatattgatataatcaaattgtttgatataatcaaattgttctggaaaacagaggataaattaactccttaaataaatcataccctgtttgccattaatttaagtcttaatttcagagttactttatcttggtttctgattgatcttcgatttaaattgagcctcagcattttttctacctatccctgatgtggggaaaaacagctaataatgtataaggcaaactttcagtgttattgagagctaaagcatacaactgaattggggggataagctctaatactcatgaaatagtattacaatttattgttactagcaatcacagcagcagtagccatttattgagaggttactatctgccaaaccttgtgttaagactttacactcattatcttatttaactgttaaagcaatgctgtcaagttggttttatcttcatcaataaataagtgccagaaacagtgccactatactctgaaacaatgagactctgagaattattttattggattctgggtgtcacatttaaagggggacattaacagtgaacaggtatgtgagtggtgaaaaaatcatgtgatgtcaggagaggtcatagaactgtgatctttaacctaaggagagaagacttagtggacgtaatagttaccagtaagtgtttggaataaagaatatgatctaaagagaaaactgactctggcaaaaggagtacactcactctgtctttctctgaggactacagaaaagacatttacaagattttcttattttggattttaatccaattttaatgggacagaggctatgtcactccctagatattctggattaaattattgcatttggaagatttggattatacaagaaattaggaattgacctttggatgaggtgtctatttctgattttgtaataaattgcgtcctttaatcagattatttttatgatagaaataattattgagttgttttgtcaattaagttggagattgtgattaataatacaatatcagagctcagacggaccttagaaatcttggagtctcatgtcattttgcaaatgaggaaacagaaagaaaatgaattaaggacaaagttggacaagtactcaggtgttgacttcaagtccactacttaaaaaaaattatggtttctaatgtatggatgaagaagactgaatcatttctagtacatttttaaaggtcctgttgaatcttcttcagagttaacaaaatgaagtagcctgaagttcatttgttctaattagggcacacttgagtcctttttggttatcttatctgaacttggagttcagtgattttcctaaagaaaagctttcagttcgtcaacttcttttattgttagtgttttatttccctggaaacttgtgcatctttttattgaaaggataagaaaggatatagtggctctctgaatttatccattcattcaacaagtatttattgaggtgtgtgccagacacttccaagcacaactgtagggtcattagcttttactgtgagatgagaaaccatcaaattgttttgaacagaagattagaagattttttttttttttaagtatcactaacaaattaaaaggattccctgggagtttcagcaagctatagtcccacttgccttgatttaatgagacataccttttgatctcagcacacaattgggattaactgcagtttgaggtctgatccttattagttatataactgaattcacaataaagcctgaaactttttcataaaaacagggtataaacctgttaaaaatgttctaccatagactggtttggaaaccattatgaattcatgatggaatttgaccgacctaggtttgatggacattttcactgatgattcaattttgggcaaacgtattagtttttctgagcctcagtttcttcattagtacaatgagggtaaaacttgttacgtaggagtgtttttgagggttgaatgatttaagggaaatcgtgattgtgaaatgctcagccccatgtctggcgcattgtaaatattcaataaaagcacagccattattttgataatttagtcaaggggattttaaacatggataaaagttgttttgaagctagattgagggtgctaattcagacccttaatttatttttactttagagctcagacaaaatgtctttaatgcctttgtctaaaggtcctgacattgaaacaagcattaaaatgacacctctaacttaattaacactgtttgttttgcatgtatatgaattagtctttttaagtgtcactggctgttttggtggtgtcccaaattgacaaatgctccctccctcattccacaggtattaccaattttggaccaattctggtggttcagctatcaataaaagcagtcagagaaggccctgcctgtaggtcacagttgaccctagccacaggacacccagggaagtggtgtactgtgaaacctccccagggagtttcaggagtgtgtgtgtgtgtgtgtgtgtgtgtgtatgtgtgtgtgtgtgtgtgtatgtgtgtgtgtgtgttttctgttgcccaagattattgtccgagagagtaaacacatcaccttatgactctgtagccaagttcacttctgtagtaattttttgtttgtgtatttttaccactgaaattcagtctgacttagttcaatactgcatctaaaccagtgtgtggtcaaaagtattaaatttgacttgctaatctccacgcgggatgagggagagaccctatgtaaaactgaattgggcccatgtaaaacccgtgtttctggtgccccattttccttgggctctggccggcagcttcttctaccccagttatgtatttcactttcctggggctgaagtatcagctagctgagctgataaatttatctgggttaataggagagagtaagaggatcatctggtccttttaactgtctttggaggcaggattttgcttcccccactcctcagttatttgaaagcactttggcaaaactgagatcactgcatgactgttagtgtaacactgcagcttggttgatctgttcgtgaatgtgatcatcaggggaattacagatcatggaaaggtaggtggaggacaggcctctggagaaggtattcataggcacaggcaaccttttctgattgtgtaattactttaaaatattctgttttaaaaaatttcaattaaaatttgtttccttattaccagaaatatcctggtaattgtagattgcccgggtggggatgaggagaagttgccagtttaagccaaaccacatggagtgagaatgagggaaaggtgacttcaagaagaaaaaaggtgttctgttaccaggagaaggattgctggccaggcaggaacagcagatgtccctggcagatgaaatggcgctggccagaggaagcatatgccgtacagaggaatatcaagcacaatggccatgggcagaaaagagcgtcgcatatgaagaactgagagaaggccaggcggcggagccaagtgaggaagagtgggtggagcggtaggaatgaaggcatgggattgcaaagataagctagggccagaccatgcagggccttacggctaaaggagggtacctggattttatcctgtgaacatggaaggtcactgaagaggtttaagcagtttagccttttaaaaaaatcactctggatgccctgtgaagaacggattgaagagggcaagaaaggaagcagagggattaatcagtgagcttttgtaggtgagagatgaagatttcttggacagggatggtggcagctgtgatacagacaagtggaaagataaatgagccacattttgtgtagatcaacagaacctgatgattgatggggtgtaaggaaaggaagaatgacatagatttctgcctcaattaatggggattcttggagttgccatttattgagatgtagcactcttgttggatattgctttgtgttacatccttccacctagactataagcttcttagatcaaagataaggcagcatttcatctttcttcaccattgattctagcacagtgctgaggcattagaatagccacttggttgggcatatgtcaggtgggaagttgatccaaaccccacttgcagggtggctcttgagaggcagcttaaaggaataaaaagtgccatttgttaggatatttattgttgttggtttttagatttgtttgagatgatgcaagttatgtaagaagaaggtactatgagcatagaaaatgtaatcagacctcagaactaaggagatttgcccaagataatttattaatagagctgggacattctctaatccctagtattctcattaaatcatctaacctatacttgctattttgagtaatttttgtttcctgactaaaatctgtgtttcttttttctttgatgctcttctacatgttaaaaataaaaccaaataccaaatttattcacctttgatgctttgagcttctcagttccttctggtctctttttgtttttctcctttccaaaactcattctgaaggacccatgaaaagagactgaaagcagaagaaatctgtccagtcactcagcaacacctatctgaggtaataaggcaaatgaaaccacttcaaaaattgtcctagaacaaaaaatggcttctagaacattgtgcagtgtctagctccagtgcacaggaggtgctcactggttattgagactcagccccgctaccttgtgtttttacattcatggcctttgtcatctctggcatgctatttatttcttcataagagaattttaaaactggaggaattgaatagaggccgtctgaaaaaagaatacctacggaacccaatttatctttacctggagtcccgaccatgcaggctgctgtttattagaacacagtgacagtcacatggtgggctcggccctggcttgcagtcagctttgaagcccccatggcaaaatggcaagcgcttacattcccggacaaacacacgctttttattccatgtcatttttccattgctgtagacttgtaaaacaatggttaagagaatttcagaaaccaaagttattttccctgctcttatttgcatatttctgttccttaaaagtttctaaggtaaaaaagtccccaagtttggggactctcttccacaccttcaaatcaacactttttaaacatgtgatagtgtcattaatgttcttgtgaacaatggcttaagtagtgtgattggaaatagagctctggaggagcttggcattgggggttgggtgagcatttttgagttgggtaattagtcagctacaaccatgtagaacagaagtgatgattagactaattaggaaaaccatttcctaagtgctgtggtagacccaagggcaatggcctagaaatgccgccttccctgatttatttgattgatgaaaagcaggttttccacttgcgggcttatttattttttaaattagagatttgtttgtctcattttcatctgttacagttttatttccaagataacagagaggcaggagtgtcttattcgcagtttgggaatagggctttcgtgcttttcctttcattccctttactacacgattctagtggagcagatttatcagggcacttttagtcaaatctttgcaaaggactcacatgttttatgtattcagaattcaattcaagcagcttttctagtgacaggctgctttctggtctcctttatacacctaacttattcatgtgtatatatatatatgtatttatttatttattttttctaacattcattggtgcttactttgtgccaagcactattaaatgcaagggattcaagtatatctagcaattaagggctttgttttgttcggtgttattgccccattgctagcatggtgcttggcttatggtaggtactatgtaaatatttgttgaaagaatgaaaaacttaaagcctaggcccttgttttgtattttttgtgtacactcagatttagattatgtaattgcagctcattttgcaaaacggatttattattttctttctttttctttttttttgagacagggtcttgctctgttgcctaggccggagtgcagtgatgcagtcacggctcactgctgcctcttgggctcaggtgattctctcacctcagcctcctatgtagctaggactatagcacgtgccaccacacctggctgacttttaaaaattatctgtagagatggggtttcactgtgttgcccagggtggtcttgaactcctggcttcaaatgatcctctgccttgtcctttcaaagtactgggattacaggcagagatttttgggaggccgaggcgggtggatcacgaggtcaggagatcaagaccatcttggctaacacagtgaaaccccatctctactaaaaatacaaaaaattagccaggcgtggtggcgggtgcctgtagttccagctacttgggaggctgaggcaggagaatggcgtgagcctggaaggcagagcttgcagtgagccgagattgcgccactgcactctagcctgggcgaaagtgcgagactccgtcttaaaaaaatatatataaaaaaaaaaataaaaaagaaaataaatttctctaaaataaatctcatttatttcctggtagttttaaaatttaagctaaacctcaaaaaattttcttctaaaacataataaataataccgtgagtgttgtatatcttttaaaaacaaaagggtggagtgaaaatgttttaccaaattattaggtatagtttgcaaagcactattatgcatagtatgttgttcgcctccctgtgacggcaccattaacccatttgtgccggaggttgcaaattttttttgtgaaaagatcagaccttggcgatgaccttgagcagtaggatatacataactcccacaagcttagcgttccattaatggaacactaagcataaatgggttaaagtaggcccacggtgtgtgaggtccagaaaagtgagttgatttttttcctcaagtcctcatggattaggcgtgggaagaagttccttatctgcccactgctggctctttgttctgcctcatcttggtcttcccttaatggagtactctcttttgtacccagtttgcaaatggctacgttagcccgttgggtttaaagaatactttaggggcattcagcgataagtgaagtgtctaactcttcaaaaagagccatagtaatatatctgctgaccggataaggaaatacagcaccattaataaaatgcttgtgagattttttttttcaaacattgaactttttttttttttttgctgagaccattttatctcaagaaagagcttatggacttcctgagaatgtgtagtgaagcagaaaaagccagagagaccttactgaattccctgatccttgagtgtatctttcggatacaaaatggggtaataataccaaccttgcaagcgtgttctgggaattaaatcagaaacacagtgcaactcatatgaggtacccagtatttgacagtaaaggcaaaataaaagcactaacaaaaacaagtgaaaaacttaacaccaaggggcgaaaacaatttatgtgcctttgaaaacttgataactgaagttctaatgacagtcatttatatctattcattaatgcagtttctccagggacctctactgttaatccaatttcagttattctctgtatgtgaaagcatcaaaattattttctttttaagataaaactcctaaattcattttgaccttgcacaattaatctaagttaatgaggttttgttacatcattatccaatgtgtattttaaggttctactgctgtgctaccctacattttgtgacctaggaattttagatacaactgtaatcttggtctttaaatagaactttgagtaacaaagtgaggtaggatattgacagcaaactataataataaaatgtaattataatataatactattaatttagagttagaaagtatccattaaaaaaagtatccatgaatgtccaaactaaataggaaatatttatttggcttctaggaaaatgaaatacatcattctaatattttaatatttagaaagaaaagatctcattacaacttaaaaaatgattttttactgataagtgccattgacttcattgaaatgcctgcttttagtagtcaaatcccagaagaaaatgctatttttaggagtatgtttaactgaaaaagctcatatttctattcaagtttaggcaattactcttgacaaaagacaagtaaactaatgtttcatgataaagtccccaagtatctcagacttaagcaaagaccccaaatcatagtttgtagctttattgcagctttcattcaaaatatgttttatatcatctcttaactagggaattcctggtgccttcctattaggataaataagcaagaaacacaataggacagtgattgtattcttaagtattagggaatttagggccccagatattctatatgcagacctctgtgcttgtgtttgttcattttaatgagactccaaaggctcataattttacaggaggtatagtgtttcagttccagaaccaggtaaagacagggcagccctccactctataaaagcaaaggatgaccgggcgcggtgactcacgcctgtaatcccagcactttgggaggtcaaggcgggcagatcatttgagctcaggaattcgagaccaacctggccaacatggcgaaaccccatctccactaaaaatataaaaattagccgggtgtggtggcgggcacctgcaatcccagctactccggagactgagacacgagaatcgcttgaacctggagggcagaggttgtagtgatccaagatgacgctaccgtactccagcctgggcaacagagtgagactctgtccccccaccgccaaaacaaaaaagcgaagcgtgatgggtcagggttaggaccatttcctggtgacattgagctggttaagttggtggatctatgaggggaaactggctgccttcacagcctccaaggtctttgccttgtgcactgcagcttggccgtactaccccacagtcaggttggcagaagtatgatcttttttgtctgtcttatgggataatagtgaatatttacttttattatttggaaaatttcaaatgtgaaaaaatttaaaaacctcaacatttttgtagctacaattaaggaattataatacaatttggtaagactacaaaattcacaaaattatattgtggcctcattttaaaaactgaaagttgttccttcaaatgctcaaatagtttctttgataacattttttgagagcattctttaaaaaatgtattactgccccatttttttggtatttttaatgtatgcacttaatactgtttaactttttaaaataattctggttgattgttttcaaatattttaatgcagtgatgttgtcttcatgggctataaatttgtaccataatgtaaagacattatgttaggatcattttaatgtatgaatacctgggctttaagtaaggatctgttgagaattgtgtagttcagttatgtggtttaacaactagagagtcagctctattgtaaacatgtaggcatagcttgttttattgtgctttgtagatattattattattattattattattattttaattgaagggttgtggcaactttgtgtggagcaagtctttcagcatcattttcccactgtgctcactttgtgtctctctgtcacctttttgtaattcttgcgatattttaaactttctcattattattattatacctattgttatgatctgcgatcagtgattttttttttttttttttaaataatgagatagtgtctcactttgttgcccaggctggagtatggtagcacaatcatatttcactgcaatcttgaacttttttgggctcagatgatcctcctgtctcagcctccttagtagctgggactacagcacatgccaccatatccagccggttaaaacatttttttttttgtagagacggcgtctggctatgttgccctggctagtctccagctcctggactcaagcaatcctcttgcctcagcgtcccaaaatggtaggattacaggcatgagccactgcaccagtcagtgatttttgatgttactcttgtaattgctttgggacaccaagaactgtgtccatgtaagatggagaacttaaaaattgtcgtatgttttggctgctccacgactggtccttcccctgtcccgctattccctgagacacaacaatatgaaattaatccaattcataactatataatggcctctaagtgttcacgtggaaggaacagttgcatgtttttcacttgaaatcaaataaatgattaagcttagtgagaagggcgtgttgaagccaggccaaaagctaggtctcttgcaccaacagttagccaagttgtggatataaaagaaaagttctggaaggaaattcaaagtgcttcttcagtgaatatgtgaaagataagaaagcagaagccttattgctgatatggagcaaatctgagtcatctgaatggaagatcaaatcactacaacattcacgtaaaacaaaacctaattcagagcaagcctccaattcttggctgagagaggtagaggtaaggaagctgcagaagaaaaattggaagctagcagacattggttcataaggtttaaggaaggaggccatctttataacataaaggtgaagcagcaattgctcatgtagaagctgcatcaagttattcagaagatctagctaagaccattgatgactgaggctatgctaaacatcacagtttcaatgtagacaaaacagccttctattgggaaaagatgccgtctggaacttacatagctacagagaagtcaatgcctggcttcaaagcttcaaaagacaggctgactcttgttaggggctaatgcagctggtgacttgaagttgaagccattgctcatttaccattctaaaaatcctagggcccttcagaattatgctagatctactctacttgtgctctataaatgtaactaccaagcctgtatgacaggacgtctattagcagcatggtttactgaatatttgaagccaactgttgaggcctgctgcttagaagaatatttatttcagaatatcactgctcttcagccatgcacctagtcacccaagagcgcttatgtaaatctacaaggagatgtatgttgttttcatgcctgttaactcagcattcattctgcaaccaatgactcaaggagtaattttgacttttgagtcttattatttaagaaatatatttcataagtctgtagctgctatagatagtaatttatctgatggatgtgggcaaagtcaattgaaagccttctgaaaagaattcaccattctagatgccattaagaacatttgtgattcattggaggacatcaaaatactaacatgaacaggagtttagaagaagttgattccaaccctcatggataactttaggggtgagttcaagactgcagtggagaaagtagctacagatttgatggaaatagcaagagaactagaattaaaaatggagcctgatgatatgactgaattactacaattccaggatgcaccattagtggatgaggagtagcttcttatgaatgaacaaacaaagtggtttcttgagatgggatttactcctggtgaagatgctgtgaacattgttcagatgataacaaaggatttagaatattccataaacttagttgataaagtagtgtagggtttgagaggattgacttcagatttgaaagaagctctactgtgggtaagatgctgtcaaacaacattgtatgctacagagaaatcttttgtcttaagagaccattgatgtgacaaacttcatttttgtcttattttttaagttgccacagccacctcagccttcagcagctaccaccctgatcagtcagcagccatcagtaatgaggaaagaccttccatcagcaaaaagattacaacttactgaagcctcagatgattgtcagtattttttttagcaataaagtattttttaatcaagatgtgtacattgacattgttttctttttagacagaatgctcttccacagttaatagactgcagtatagtgtcaacaacttttatattcacagtgaatcactggagtgattcactttattgtgatgtttgctttattgtgatattcactgtattgttgtggtctggaattgaacccacacaatctccagagtatgcctgtatatacagaatcttaacaggaagtcttctaaatacttttcaagtgctagcttacttgttccttataacaacctgatgagtttgttttatggttatctctattttccaaagacacagggatgttgagtaccttatccaaggtcacccactagtaagtgatagaatctgggcttcaattcatttagtctggcactggagcctgcactctttaaatcaccatagtagtctttctgcttcaataatgagtggactttttttgtatgtgtgttggggggtgacctgtgacttttcttgcgtctttcctgatttttacatgtcttgaaaccactatatttcattcatctgttcattcaacaaatatttattgagtatccattatgtggtgctgagggctagcagtgtcctggtggacccttatgttacagcctaggtgcccagcagtcattgactgttttaacttaatgtctaggagggaagacagacataacaaagggaaactcacgggggaggggagcagggacaggggagccagggtgcaaataactctgaaactaggacctgagaggtgtaaaagatttagccaggttgggaagagggtgtgaggagaagagggtggtattccagttgggggagtagctaagtgcgaagaccagcgatcagaagctgtgaaaagagttcagggaactgaaagaggttcactgtggcggaagcactcagtgttccgaattaggagtggggatggtgaagggtgtaaatagtattcaggtgttttaagatcaggcagaagcgtcaaataactgattaactttacactttgatcagttggatatgtttattgtaatttctaggataatgaaagcccaaaagcagcatatagcatctaaacttgagcgtgtgtggagggagagagggaaaaataaaaacaaaactaagtcaaaaagaggcaagaaaggagagaaggataaaatagatgagatgaatagcacaaataagatggtagatgtaaaccctaatgtatttgtaattatattaaatgtgtatgttctaaatgtaccaattaaaagataaaagattgtcagactgataaaacccaaccaaccaaccaaccaacgaaccaaccaaccaacccaactaggtgctactttcacttgacagagagggaatacctccaggagatgagaaatgacaagaggtgaccataagataagctacctccatctccttccctgtctgtctaccctggaagccaccacattcttaggaaagccactggacttcccactctaagtgcagcggaggtgatcctgggagattagcactgtctgggttactcaggtctggctttctcaccagcttgtgaggaactttttggcagaggtggagtctcactcacatacctcgtgccttccatagtgtttggcagacagtaggtctttaagtagcatttatcatgtgtgtacatttgatttccatatgagattgtaaactctttgcagggcagagaacctgttacacctttgagttttccataatatctgctaaaacatagatcagtgtataattgccaaaacatagatcagtgtataatgagtgattcttatttaattctgtcaagattaaatctgatttctgtagaaggatactgttccacctttcaatgatttggaggtttgtttccacagcagagaagaaataaaaaccactttctgcaataaagacctgataacctactttttcttaagtagattttacagtaggagagtatattcttttatttgttcttttctttcttttagttgtagcaagaatttctattaaactcctctcattgggccagagactcttgtggtgttagtgaaaaacttgtcccttgcgtaacaccctgtctacacttgtgagttcattggccagtcactggcctcaactccgagctctaacaagaagaatatattcatttttattttaaagagcatgatttatttaatataaaaataaatgcttcactcatgtataagctgtaaggagatattagtagtaaaataataaaaatattttccttggaagaactgtgggcagaccatatcaaaacagcaatttctggttttggaatgaaagatactattgattctattaatccaaatgccaacagttctctggttgagtaagaatgtgctccctaagagaaaactcacttggcatcatgtaagagctgctcattatgaatagaaagaaattacataatccaaagtgaaagcaagtcattctgcttttaattacagtgtataaaaattaaaacatgggccgagggtctagttggatatacttcttggcaacagacattttggaagcctgcaatgaaaaatacaacaaagatggctatgtgctggccgccccccagtgtcttggtggtttcccgtttagtgactgtattcagttattgtgaaatcacagaattttaaagcaggaaaaagacctcagaagtctcttcttacccattcgtcctccagatgagaaaataagcccacagtggtaaagggattatagtgaggtcatatagcgaactccagaaggaacacaggcatctggactcctgtctggctttctttgagactgaactgcttcactgctgcctggaagctcttctgtggttgtggcttcttgctggccttagtgtagtgataagggggtgggaatgagggtagagggtaggagagaggaagggagagaggttgaaagagagaatgagtcattgtcattgagagggattgagagacagagaagatgatagagaaagacgtatgtctgctttgctgcttctcagaagtggtaccaataaagcagtgctctgaagcagtgtctgctgcatcagtgagctgcggagcctggcagtggttgaggtgtgggaacattctatacctgccactggctcctcctcattcctgcgctgtaaaccccatgttgaggttactgtgtctgtgtttattgcctctagtccagtccaaccatagatgtagccatctcaggttatggagagatgttaaggagaggaggggcaaattgaaaggtgcatgttttagaatttgttaattttcagattttttgaatcttagcaaaaggatttcctgagtataacctcacgtttccctttctacttccaaatctgaacaaaatcctgtgaccttccttgcttactcagagctggacatagtaagagaagtcatcatgcaaaatgattttctggaagtattttgaatgttttagttattctttcccagttcactcagagtccgttatggatttgctgctgtgaaaaaagtgttgaaacccagcgtgtggacgtgcagtgttgcttttagccttgcaggcagtgccctctggccttttcagcaaacttcagctctgagctgtgttacctgctttggctcctattgcatttacctggggcgagattctggctttcaaattcctccctaaagtcaggtgggagcctggcccaatggagaatggcagtcttaggtactgatgatcaattgctgttttccttgctagcgtcatgatatcgaacgtatgggttctcagtaaatcatgtattgttcacttgtttttgctcaaaagtccatctctggttacatcattggaagcctctcagtttaacctcttcctttgtgacttctatgcttggaaataaattacgacagttaaaatcttattgcataagtaatgtgtgttgattttaggaaaatcagaaaatagggataagtaaaaagaagaaaatataaataatttataatccatctcccagagagaccactggtaatattttagtgcatgtctaaatttttaatgtacacttatttacataacattaaatatattttaataaaaatgactttgggctgtatatactgttttttactaacatttctcatatgacatgttctatacatctctcatatcagaatacaattttgtattttcaaaagacaaatctctctatctttttaaatacagataagcataaagaaaataaaaaggcccattatctctcagtccatgtgacatgttaaaatgattagtaataaagcaaataacattagttggctgctgactatatgccagggggactgttttatctgttagctcctttaatccccacaaaagccatcagaagtagttgctattattaatcctgttttacagatgaggatactgaggctaagtgtttaattcccaaagccatacagctagtaggaaatgagctcagatagtctggctcaagaacccaatttttttttttttttttttttgagatagggtgttgttctgttgcccaggctagagtgcagtggtgcagtctcagctcactgcaacctccgccttctgtgttcaagcgattctcctgcctcagcctcccaagtagctgggattacaggcatgtaccagcacacctggctaatttttgtatttttagtagaaatggggtttcaccatgttggccagcctggtctccaactcctgacctcagatgatccacccaccatttcttaaccacactcataccgttagactttaaaaacaaagtcaaacaatagtctttctctattttttaaaaaatctttctctatcagcatgtacagaactacctcattctctataacagccacatatacgtcctttgtatactttggtttaactgtccccttaactattgatggacaatttgattgttttcagatatttgcaattacaagcaatgcggcaatattgtcatactaatggtactgtttattgagtgataaaatcagctactatggataaatgcatagaacagtgcctgctacatagtacgatctgtgatttatattattattagtaatactgcgtgccatgcactatgcttgaattctcaaaatatccctatgaggtagattattgttattatccctgttttacctttgaagacattaagacataatgaggttaaatagttcttgtgtcatgtagtaagtgaaatctgtgatttggacccttttggaacttggctactgctaactacatattcccagcttcaagggggtcagagatggagaaagccttggtattggtaaacattagtaatgtccacatatactcctaccacaagggtatgaaattgcctgtgtcactgtacctttctagtcctgggtatcacagatgctacaatttttaattggtgaaaaatagtatttcaatgtaatttgtaatttatttaataataaggttatacaatgtatctttattgggcatttgtatttctttttttgtgaactgtcttcgtggttttattggatagttttatttttaataatttttataagctctctgtaaaataaagaaattagattttgaattctcctatgcattgcaaatgtctttctagtataagcattttaatgactgtattttacattttatggtgatattatagtttatgtgaatggtgggacttttgttgcttacagtttttcattacaatgctgtcaagagcatccatttattattttctctggaaatttcttagaagtgtaaatggtggatggaagggaatatacatttttaaggcattgattcgtattttctgtctctctagaagaatgataaaagtaggttgaccatcagggtatgtcagggtgcctatttctcaataaccaatgatattacataatattatttttaaaactcttggccaatgtgtatttttttttatgagttagcattgagacattttccatatgtttatttgcagttagtatttcttcctttgtgaattgcctgttcatgccttaagaaggattttgactatatgtgcaatttttaaaattttgtaaaatcagttatctaacagtggaatgaaccttcccaacactgatggtattagagcaaaagatactggaactgttgcaggaaaggaatgaatgtttattaatttactatcataagtcaacctttatacttgttatctcttttactctttctattttaatcttatggataaagaatgagggacttgggtaagccaagtgacttatctctagttccatagttgtaaatggcagaaatcggctacaaacgctcttctgcgtgacttttagcatatgccttccatcccaccaattatagccttctactcctgagccatacagaatcacatcagtagtaagttagctggctgaagcctatggtacatattggcaaaaaaaaaaaaaaaaaaaatttcagaaaatgtttatctagaattattctgtgcatttcagaaacttggtgttcttttatttttatttttctgcaactattttattaagtaccctgatatattagggatgtagaaaacggggggactaggcagagaccttttccttaatagctctgagcttttcctcttccccacccttccaacccttgtcccttttgaaagctttgcttcccacctgccacccagcaggcctcagcactgcagggagtgaaacctctgccagcctcttgtcctttcctcactgttgtgtttcttttcatactctggtacttagaatgtcgctttttctctttctccaatgccatggcaacagtgcatggtaactgcttcccttctggtcaaggaaaaagattttgtatttttttttccctttgacctgtttgtaattagcactgcggtccaccctttcctccagtgaaaagcaaggaaataccaggctgtagtcaagactgcaggacctgctggatgtatagctagcaggtcttctgtgctcctttgcagcagtttaaacccaagcccagcctgatcattgattctgaaacagcactcaaccctccacccctgttcccctgccccttcactgttttttgttttttttttttgacttgatgtgttatattggaggttggttccttcagtctccctgcactagaatgtagggtccaggggagtggggtttccttttgcttgttgctctgtgtgttccctgggactagcgcgtagtggggctccctgagttcttgccgaatggcacaggatttggtagtggaaagcctgatttcatttcatagaatttgctctccttgcgtctttttctctcttaaaggcagtgtctgcattctatgtggccctccctgggaaatgtcagtttcagaggattttgaagtctatcagatcccagggcctgagccaagtcagagcctagttggagtgcattgtaattgacataaaagatttgcatttgaaataactcagaggttggtttgaatcctgttccccacatgtttttagtcactgtctgagtttgaggaaggctttttgagcctttttctttatctgtaacatgggcataataatgcctaccttggcttgaagtgaagattaactctgacaatctatggagagaactggtacatagaaaaataaatgatggtggtaatatggttattagtattttcgttttcttctgtgtgattttctattggtaaatggagttattttatcatttgtattgtaggctactcaatggttaaaagctagattgggtggctttggagtgtgatggtctgggatcctgtcctgctacttaacagcaatgtgacactgtgcaagagcaggcctccatttgtaaagaacagtaaatggtcataatagcagtatcgacctcagaatggacagaaagatttgatcagcacaaagtttggttcatagtaagtccttagtaactcatattctatagtttaataataacagcagaatgaaagaagcttaaacttcatctagtccaactctaatactcccacttcatgtctaattctgccatctagagcaatagagatccaattggtatccttttcagatatggcctttcatatacttaggattgagtcctgttatgaactgacttgtatctccctaaaattcacatgttcaagttctaacccatagtgtgctgactgtatttggaggtagggcatttgaggaggtagttaaggttaaatggggtcataaggatgggcccctaatccagtaggactggtgttcttccaagaagaggaagagacaccagagtgtatacacacaggaaagaccatctgaggacaagagcaagaaggtggctgtctccaagccagtaagagggccgccaccagaatccaacccagatggcaccatgctcttggacttccagccttcagaactttgagaaaaatgtctgttgcttaagccactcagtcttctgtcttgttatagcagcctaagcagacaaatctagatcccttttcttttcttatgtcatcatccccatcttgagggggttttcagttgcctcttcatcattgtcacccttgtctcaatactttcacgtgtcagtgttcttttcaaaatgggaaacctggagatgaactcagaacccccagatggtccaagcattttgggtgccggacactgcccttacagtggaatcgcagattgtgtgaggtagtccatcgaataaacccccaagactcaggtctacattatcctatattgggtctgttatttttgtccaaattcgaagttttgtcttgttaatttcagcttttatttgtttcagaatctagaaaatcatttttttaaaacctcgttggacaggacctttgaagggtggcccagccagcctacctacttgcccagtgatgctttccatgctgtgtgtcttagtttgagctgctgtagcaaattatcatacacagcgtagcttaaacaacaaacatttgtgtctcacagtcctggaggctggaagtttgagattagaatccttggtgagtgtcctctttctggtttacatgtgtccttacatggtgtaaacagagttacctagttttctggcctatttttatgaaggcactgatcccattgatgagggctccacccttatgacctaattaccttatgaagaccctacctccagataccatcatactgggattagggttttaatgtatgaatttggggggaacacattcagcacattgctctcttcctagcagtggctgcctccattggtggaggtactgttttgttgtgaaacttgttccggggttggattccttcaaatgttcccaggaattagctatgttgagtcaaaatctgaccctgtgataactgctgctctttgatcacatctgtctgtttgttattcctgcacctggcagtctcttacagactccctgctcccctcctgttacctgttctgaacattataacagcgttgtatttagtatcattgcagaaaatcaattccatttgcttttcacaagtggaaattagacaaatggatctggaagtacataaataaagtaggagcctagttgacagaaggacactctatttggtttgttttaatgaatagctttcatcagatcatactctatgaaaatagattgaggaaataggctattcattccttattatttgaattagtaagagtcatacctttcttttctgtttaggatgataggcattaaatcttcatctgactctttatagtattttgtttatttttattttttttgacagtcttgctgtgttgtccaggctggtgtgctgtggcgtgatctcggctcactgcaacctctgcctcccaggctcaagcgattctcctacctcagcctcctgaggagctgggattataggcacccgccaccatgcccagctaatttttatatttttagtagaggcggggtttcactgtgttggccaggccgatcttgaactcctgacctcaagtgatccacctgccttggcctcccaaagtgctgagattacaggtgtgagccactgcacctggcctgtttatagtattttagaacaggaagggaccctccgaatcctattttccacatccctccatggcagaattatctttttatgtgccaggtccccttcctttttgagggactcaaaggcagatgtgaggcgggactcaaactccttgtgctgaagcccgggggctgcagcctcattcccctacctctggccatcagattgggcctgtgatctgagcacaatcagccccacccattctggtattttctcaggagagtggttctgtttgtgaagactcttggggccagctaggccagttgatggggtattgtcctcatgacagtattcagggtccagagcccaggcgcatgggaggggactgtccactgaggggaggccgtggtggctgcagtgactcggtcagcctgtggtgtggcaggaccttggctgagctttgccctgcttgttcccgcctgagcctgggtgtccggccctcccagagacagggagcttccccaaaccttgccagtaaacacacaccttttctacctaaactaacttgagtccattttgtttttaatttgtaatctacataggaaggtccttatttgactgttttaaacttgtggcctaggattctggggttttttcattcctgcctaagcacatgtgaggtctgcatggtctcattaaggaatgcattccctggggtggataattgctatttatgtggcagttaggaattttttgtctttttttttttttcttgagacagagtctcgctcttttacttagggtggagtgcagtggtgtgatctcggctcactgtaacctccgcctcctgggttctagtgattctcctgtctcagcctcccaagtagttgggactacagcctcccaagtagttggtactacaggtgcacaccgccacgcccagctaatttctgtatttttagtagagacagggtttcaccatgttggtcaggctggtctcgaagtcctaacctcatatgttcctcccaccttcacctcccaaagtgctgggattataggcacgaaccaccgcatccagacctctcatctttaactgattgattttcagaggacaattctaggaaagactaaatgttttcaccttttcaaaacaggtgctgttaagagaaggaagatggacggggagcatgccaggatgttggcatttaggacatgggaagttgtataaaggtgaaactatgtctgattgtctggtagaaaaattacagtctaattagaaatgctgaagtttttccagacctttagggaattcatcgaattgcaaataaaagaaaataaggaatgttggtttgccggtaattagatatattgggggaaatgaggttgtttcttttcttttctttgttttttttttttttttttttttttgaggcagagtcttgctctgtcgcccaggctggagtgcagtggtgcgatctcggctcactgcaagctccgcctcccgggttcatgccattctcctgcctcagcctcctgagtagctgggactacaggtgcccgccaccacgcccggctaattttttgtatttttagtagagatggggtttcaccgtgttagccaggatggtctcgatctcctgacctcgtgatccgcccaacttggcctcccaaagtgctgggattacaggtgtgagcccgcacctggccgaggttgtttcttgtttttccttttacctagcgtttctttctttcttcaaaaaactagatagtgtttattaattttactgtgcaagcaggaatatacataaacttttaaaattcttaaagctataggtattttgcgcactgttttaaaaaatcccttgtggggagatttttttttaaatatttatatggagaacatgtatctgttgtgtctacagacccataatgatggaactattatttcctcctaaatatttgctcctcgtgactagaatttttggactttgaaagatccttgggtttactttaacttacaggtatgtttacaggaattcaggtctgtggagtaagatagccaaggctaatagttatgaaacatcccatatagtaatttgaatactgaatttacctaaagatgaacattcaaaagatcaagggcatttcattaatgtagtcttaaattattttgctaaacaaagaaggtatatgacctctctttagaaatggccactaataaaaagttgttggtataacataatttttttaacaaggcctaaaacatgcatacattgtctgtcattacagagtcccctgtcacccagaacttttctggttattaacacaaatttatggtgtaccgttgatttctatgcaattgaacgtgaagctaatgttatagtcattttattgctggctgctgttgcatcgaaatttagatgtcttattttcaggtttgaattaagacaatatgtgctttgtaggacactttgtcaacgaatatttgtgggagagggatttttaagagaatgtatggttatgatgtgactgcttcgcactttacagctgttattaaagtagattccagtaaggtaagtcattctggaaggcatttctgaatattacctccttcccctcaagaaatgtttattaagttaatatgttttatgttgtaatttaaagatttaaaagaatattttccttttcatagtagacactttggaaggctatatacttatttctgtgatgttataataactcaatacatgctactaaatcttttttctttggaattgtcttcatatcccccactgcattttaaaaacgtatccccagtggtgttgggcctttatatttttgtgggtggagtttttttttttttttttttttttggagacattttttttttgctctgtcacgcaggctgcagtgcagtggcgcgatctcggctcactgcaacctccacctcctgggttcaagcgattcttctgcctcagcctcctgagtagctgggattacaggcacatgccaccacacccagctaattttttgtatttttattagagacggggtttcaccatgttggtcaggctggtctcaaactcctgacctcgtgatctgcctgcctcggtctcccaaagtgctgggattacaggcgtgagccaccacacctggcccaggccacaacattttaaagtatgctctgcaagctaggtgacagcaagctgggaaatagtttttctttagtcttgagatgtctataaagaagcgtgcatcgtgtgatgtgaaaactggcgtcgaaggttctttcagaataggaattccaaatgatttgctcaggattccttgaaataacgtgtgtggttttctaaggtgaccatttgaacgaggacaattgatttagatatacacattctgcttttaaaataaagtttaaagtcttcttgaaaagtttatggtctcctgtaaactttgcctcagtgtcagagaatcctgatgagtcagaattggacttgcagggaggttttctgagttggagaatctcagatgttgggtagaaacataaggttttcttaattgaagccagtggctgccctgaagtggtgcacagttttgtgtgcgtgtgcagaatttccttctctggcaatttcaggaactatagaaatgtggacataaatttctgtttataaatctggagccaccgtgaggagcttgagatgaatgtctgctgtggtcagagtgctcagtgagttcctcaaagcagttaccagtctggttttggtggtttaggtttggatcttttgctagccttttgtagaacttggatattggaagcaattctcctcgcagctcccaggaatatgtgaatgggccctcgatacccaattctaattctgagcacttggaaaaagtctgtgttgggagaagcctgtatcttccgtcacctgattttcctgataacctgtgtgtatctttcacatgcctccatttctggttaccaactttatcatgtgactcttttggcagctagtagatatttttagtaaatataaaggaattcctcctaccaacatctgaggtcatttgcctttccttgattttctaattttctggttgaaatagtaaagagaaccctaccctgatggtcaaaggttctaagatgttttgtggaccagctcataaaggccttcagcagggcaagtctggtatctgctgggctttctggaaatagttaagtgagtcaataggtagctttgatgttgtcaggtttaatatggaaatagcattttactactagtaatcttaagattttttaatagaaaatcctggccaggcgcggtggctcacgcctgtaatcccagcactttgggagtggatcaccttagatcgggagtttgagaccagcctgaccagcatggagaagccccgtctctactaaaaatacaaaattagccgggcatggtggtgcacacctgtaatcccagctattcgggaggcagaagcgggagaatcacttgaacctgggaggcaggggttgccgtgagccaagatcatgccattgcactccagcctgggcaacgagagtgaaactccgtctcaaaaaaaaaaaataaataaagaaaaaagaaaatcctaagtgggattccatgctgataggtcttacagcccacgtgaaaagaaagccaagtaaaagcttttatggcaggaaatgttcctgtctgcctggaatggtttggaccaggcaagcagattggaattgtttttcctcttaagttgctttgttctgtttttggacatgttttccctgaactacacttaatagcaaagtgcacctaccatcccttctccccctacccaagccttgcttgtgagtatctcctaaagcagcatgcttttaggtatcatttattttaagactaatttgaaaattttatgccaattttgcatttcatttaaaaatatatttaaatatcaaaatcagattttaaatgaccatctattcaaattgagccccaagaagatgtgcccgttggtccggaaacgttgcgtcctcctggggcacactggtttgtgaccctggggatctgaggagtcccctgtttgagaagaacagttgtagggcataactggaagccaggaggtctagggaagtatttttaaaaatgactctatttgtgttttttggtttttttttttttttttaagacagtctctctctgttgcccaggccggagttcagtggtgcaatctcagctcactgcaacctccacctcccaggttcaagtaattctcctacctcagccttgcgagtagttgggattacaggcgtgcaccaccacacccagctaatttttgtatttttagtagagatggggatttcgcagtgttggccaggctgttcttgaactgctgacctcaagtgattcacctgcctcggcctcccaaagtgctggaattacaggcctgagccaccgcacctggcctgaaaaatgactctgtttgacagcctagtataggtgtggaaactctgtgagaagtggaatggcagtccacctggaatgtatgtggtatacagctgcttaattaagaaatccatcttagtgagcagcattttctttcaaatagcctggtatagtcaactctttactgagattcaagtcgactgttttctctgactgagtgctagctgtaatcctgggaaaagttatacagcacattggtgatttgttttttccatcttatatgggagattaaaatatttgttgcctactcccctcatcaggtgttgtgaggattaatgagatcattttagtaatgtgccttaaactcacaagaggaaatgggcacggaaaagcccaaaccccgggtgttatattaccaggagcttaactcaggcctggcatttacgctgctgttatgtgtccatttattttgttcacgtgttgcttttcgcattacaattctgtattaagcttcagatccatctcatgggtgtgaaaatatccacgtgtcaaaatcaagagtgggcctgttggcttcacatgttttcacttgccatccatctccagaatcttgcaagcttgacctacagcttgttggattggacactttttatgtacaccacttactgcattttgcagcttcgagtctatctgtggggactcagctttttcaataactctaggctgtaatttttgagagcattgtttaaaccttgtgctctacttgagtagtaaatggtcacagtggcaaccgggcatgggtcctttctcactagcgtgtgtgatgcttgctgtcactgtcacccccgccgaacggggtaatgggatgagagaacaaggccttaccagcacagcctgtgaatggctccatagaggggacgctggttcctcaagggcgcaacctattcccttgatttcagctggaggaacttctcttgggccttggcatgatgtgctcatacatctttaggtagccaaaacctgacatataactgagtgtgaaagtcagttgccagcatcttcagaaggacattatttctgaatgaccagtgaatgaggttattgtcatagaaaacagcaaagtttaaaataatgttgctatttgggatggcagaattggtgggggaggaaatgagatgggagaaatataattttaaactataaaaattccagtgaagtataatgcttaattgttagcatattctaagcaatgagttagccgcatttaaaaatagctttttaacatgaatgaacctttttatgagccgagattcagtgaagaataagttggtcatgcaaatggtgttttaatagtttatattaaatattttagggctgggatttaaacaaataacattttagagctgtaaaagcaaaaagtctgacctgaaggccacacaaataattatagttcctgaaatatagccctgtgaacaaatctatgccaccttgtttataatctacttcctttgagtttcaaaataagtaaaagggtggcttggatgtaaaaaggaggccactggctttgagcgagttgagagcagtggtagacgcaggatcttttgtgcctctctggggaaaattaggcagttcggaaccactcaggacattccagcagctttggagatcaaggaaggcctctccataaagaagtcaagagtagctggttgttcatgagaccacactttaaggagataatcattgcctctcttgtgaattggttctgaggcaacacaatctttgaagtaaaaaaaaaaaatgctccaggttttaaggagtaaagcattagttttgtgcaaaaaaaagtcattaaggttattagttttgtgtaacaagagttattaatggccaggcaatgtagctcacacctgtaatcccagcactttgggaggcctaggtgggaggatcactcgagcccatgagtttgagaccagtttgggcaacatagtgagactccacctctacaaaaaaaagttaaaacaattagccaggcatggtggcacatgtagtcccagctactgggatggctgaggtgggaggtcacatgagtctgggaactccaggctgcattgagccatgatcacaccattgtgctctagacttggttacagagcaacactctcaaaaacagaaacaaacaaacaaaaaaaacccgagttattcattagatttagagaatggtgtttcttgtaactcttactttaattgaggtattttgcctataaatataggcaagtatatgtagaaactatgcatgtgtgcgctgtcttcttactaagacattatttcttctcttcgtgaagaaagcctgcctactggggctaaattacctgaaacaaacaccatcattcacagagagacagtaagtaagcaagataagcatagaatatgtagggtaaatgacccatctgatctgtttgggcaagcattatacctctcactcttttcaatgacatatttgcttcatgtttcgataatgtggtgtctatattttaactatgaacaaagtcttaaaatattgctatttcattaaatttggagtactgttaataaattatttatacctgaaacattgctgttggccattcattctctccccccatttcttattttctcccagctagcgttgtatagcagaaattcttgtgcaagacaaatgtaaggaactaatcagtgattctaatttttaaacactgtggtggtctctgcttacccctctgaatcggtttgagagaagaaaattggatttgtcttgttgatgctttgcaatttagttggcgagtcgagtatgtataaaataagaaaaaaagagaaaatgctaagattcttgagtgggaatccatagtccacagaaacgtcagaggctctggtatttgcatgagaaaagttttgaaggaaatttttagtttagaaacacaaattcaggaagtcaaattctgtggtttttagtaaatggaaatatatatggtgatatggtttggctctgtgtccccacccaaatctcatcttgaattgtatgcccataattcccatgtgttgtaggagggacctggtgggagatcattgaatcatgggggcggttcccccatactgttgtcatagtagtgaataagtctcacaagacctgatggttttatcaggggtttccacttttgcatcttcctcattttctcttgccgctgccatgtaagaagtgcctttcgcctcccaccatgattctgagacctccccagccatgtggaactttaagtccaattaaacctctttttatccccagtctcaggtatgtctttatcagcagcgtgaaaacggactaatacatatgttgtgtaggctgaaagaactcttccaaggaccatggcatatcttggttccaccaatggcctgacgtgacctttaacctttctgtgtctccttatctgcaagataggagtgacaagagaacctagatcttcaggtggttgtaaagattagtgtggcaagataaagttgttagcccattgcctggctcatagtatatagtcatgcatgactttctttttttaagaaaaaagatttaaaacaacaaaagctctctaggcagagttaattcttcacagtgggaggaggtatttaaacttctgggcaggatgctgtggagggaattagagcttgatagtgaattggaataactctaacccattctcaacctaacactgatctttttactttgtaaaaaaaggcatttcactggagctgcattagcaatatagtttgccattttttttccaaaatattatctcctcctcccaccaaaaataccttttgctgtgtgtgtgtgttgtcatatattcccaactttaatgaaagccaaagatttctaagttttttaatgttgaggaaatttttaaaggcaattcgtggtatttacaacaagctattaaatttatttcatcaattattttccttttcttctctgttgataactttagtctacaacaagattttaagaattgcaatggacctatctttcttttttttttggagatggagtctcgctcttgtcacccatgctgtagtgcagtggcaccatcttggctcactgcaacctccgcctcccagattcgagagattctcctgcctcagcctcccaagtagctgggattacaggtgcccgccaccaggcccggctaatttttgtatttttagttgagatgggattttaccatgttggccaggctggtcacaaacacctgacctcaagtgatccgcatgcctcggtctcccaaagtgctgggattcattatttttaaatataaaatttttgcaaagtgaaagccgatgtcatagattttacatggttttcgcaggaaagcaagccatcaattaatgatgtcctttatgggctggagggagtgagtgctatgtagtggaggaagcacacatacttttggccaggatttaggaatagttttgttaggcggtatatctgatttatcatgttcttgactcaggacaaataaaatatctttatggtaatcttaaatacctctttagaggaatatttatatctacaaataccttctgcatttatttatttgaggcagagtctcgctctgtcacccaggctggagtgcagtagcgtgatctcggctcgctgcaacctccgcctcctgggttgaagcaattctgcctgcctcagcctcgcgagtagctgggattacaagcatgtgccaccatgcccagctaatttttctattttttagtagagatggggtttcatcatgttggccaggctggtcttgaactcctgaccttagatgatccgcccgccttggcctcccaaagtgctgggattataggcgtgagccaccgcgcccagcctgcatatatttatttttatggctcttctgttatttttgtcctccttgtcttaagtagcttgactagtaaccttctttgtgtactatattgctgtgtcattgtgttagtaactgtggactcgtaagtattgagttgtcaaagtaaaaaagagtgttgtttccaccatcactttattaacaatgattctattaagagttcttcagatttaggtaaaatttctctgttactgaatgtctctgtttttcagtagagtagtaaactgtctagttgcactttttctttcaccagtagtctttttgtttgtttgtttttttggagacagggtctcactctgtcacccaggctggagggcagtgactctgttactcacggctcactgcagcatcgacctccctgggttcatgtagatcctcccacctcagcctcctgagtagctgggaatacaggtgctcagtgccacaacagcctagtttttgtatttttttgtagagatggagttttaccacgttgcccaggctgatctcaaactcctgtgctcaagtgatctgcccccttggcctcttaaagtcctgggattaccgatattagccactgtgcccagcctgtctttaagagtatgattaccccctcagaattaaataaataaataaataaattgctgttttcctccttctagaagcctcattttcagctctttaaattgtcttcgttattcttttcagttaggatctaattgggatctgttggttatacatagaaagtgtaaaaatgacttactacttcccatctgtaacagccctgttgtgtgaacaatgtcactaagcagcagtttactgtcagctggtgatctattgtgacccttagtacatttacgcatttcctaatttcttttcttgatttgtttttattcagttttttgttggacagctttctattattttatggtttctgctttattactctgatattgaggacccttttctaaatcacatctaaataatagttttctttattgccatttctcttgtcttgtgtctgtgtcttgtattctaatcagacatgccatcgattactcatcttcagaagacacttctttggtcatgcgttctctttcttaagattccttcttacctattaaagaccacactctgcattctgacattcataatttttcaaaattcatatagttgagcatcgtctttgttctgagcatgcatctaaatgatgagaattcagagagctagacagggactcggtttttcttgatagagaaactgctatcagtatacgagacattattgtagatgttgaatcaaaacagtgcccaggcattaggttccctaggaattccaaggaatcgataatgggtaatttttctggggatggaatgatttttcaggttggagtgggacttgtactgtgctttgaaaacaaggattgaatattagtgaaggaggtgacatttccctggcctcatgtttccagcctgagggaccacaatgggaaaaagagtggcttatctgattggtgaatttgtaagaaggagatcctcagctcggcactgcagggcctctctgttcagagctggttctgtactacagccttttctgccttgtgttaacagacctggccttgctggcgtggcttgagtttgtctagctgtgccagtgactggctggggaggtctggctaattcttgtcactgatctttagccattttccctagtcagcttttatcagtaataaaagtaatgtcttgattcccagttctcttagtggaatgtgagtgtgggcagaaaggcaaggtgggtggagtcataggcattaaataccgaggacatgaacaccaaggagatgagcaccgttgcttagtgtcgtgagcaatgagagagaaagttggaataggagactggagtcagatgtgcagagctagagtgtgagctttattttgtaggctgaggacccgctgaaggttttaaaatgctgtaaagtgtacagcgggttattttggtagtatgaatccagtagtgctggagaatggattccccagggctttttcagttggaattcatgcatcttctggctttggatgttcggaagggagatggatatgaaacaccctgaaatgatatgtaagatatattaaagggatcgtctttcagaaagggattaagaacctccacttaagctggacgtggtggctcacgcccgtaatcccagcactttgggaggccgagtcgggcgggtcacttgaggtcaggagtttgagaccagcctggccaacgtggtgaaatgccgtctctactaaaaatacaaaaattagctgagcgtgatgatgtgtgcctgtagtcccagatacttgggaggctgaggcagaagaatcacttgaacccaagaggtgcaggttgcagtgagccaagatcacaccgttgcactccaccctgggcaacagaacaagactccgtctcaaaagaaaaaaaaaaaaaacaccacttaactcctctgtatcctgtttgtatataggacttattggaacaaaatttcaccattaagtatgatgtttattctggattttttaaaatagtgctttaagcagatttgtagaagttctttgtatacctagtttgctaaggttatttttaaaataataaattgacattcacatttattgcatataattttatgcatgtattctgctaaccatatgggtttttctttttcatctatcagtgtggtaaattatattgattgagttctaaaattaaaacagcttggcattcttaggataaagccaagttggtcatgatagattatctttttgatgttgaattaactttgctaatatcttaagatttttgcatttaatcttgctagcttgacctgcatttttcattgtaaatgttttctgtaattccttgagtgctcagaaagaatctatgtcctgggaacccaaaagtaaataaatagatattcccccaaaagaaagtaaacaaaaaagggaaatagtaatacatgtgtatgataaataaataaaacaaaagggcaggagctataaaacaaaggcctttctctaacctcagaaacccagttcccctaagacaatctctgttaacagagggtagcctgtgtgtttgtgtgcatacataattatgtagatgatacattatatgcatacattattatatatgtaacagtatatcttggcggtagtttcagtgtagcacacaaggtttttctcattcttttttaatatctaccttatattttattatatttttgtatattagccaggcccttgatgacatttaagttctcatattttgctgaaatgaacatcattgtaccttcctctttggtatgtgtctgtggaataaattattaagagttgagttgctggataaaagggcatatgtgtttcaaattgtggtagcaatagcttaattatcttcgaaaaaggttatacctccttacactctaacagtgtatgagcgtgctgtggcaaatatctgaagtgttctggccaagactcatttcccacagcccaggtcatttgaagtctcagtcatgctagctgcaccacacttcaccccacccacaagtgcattcattattaacttggtgatctcatgagctttggcaagcagtggcttcctgctagagagcctcataagaacctcggaaactgctgtgttctagatgagcaggatctgagaggatgttggcaaaatgcccagacataaggtactgaggccgttctgcctaccttattcctgagtctttttttacagccctccctgtctaggctgtaatggaataggtgaaagaattgtagcaaatgctggccatcttctgtcagcattccaatgctagtgactggagggaacagagatggatgagatgtggaattagctgttgggcccgtggattctgtctagggtgttcttacctttcactgtttgcctgagttgaagtcattgctcacattgtacagtcactgttgtttcctgtgtggttgtttattctttttttttttttttgagacggagtcttgttctgttaccaggctagagtgcagtgacgtgatctccgctcaccataacctccgcctccctggttcaagtgattctcctgcctcagcctcccgagtagctgggactacaggcgcgcgccaccatgcccagctaatttttgtatttttggtagagatggggtttcactgtgttggccaggatggtctcaatctctttgaccttgtgatccgcccaccttggcctcccagagtgttggaattagaggtgaaagccaccatgcccagccgattgtttactcttaaatccaggtgtgttgaggtgatagatgccccaagaattggcagtcactgcttactgaataagtagttaagatttcatcttgggagaggagaagtgatgggggcatgtaactcttggttatccctatgttatttttataaacaggatccccaactggagtcctggttgccaccagaaacagtgagaaagcaacacccaggagccttggggtgtggcctcagctgatgaggtcagaggagattaggggtagggaggccaggaaaagccaaaccatggatcctttgttaattgtcccttctgttattaacaatcatttttaagctagagagggatatatgtaaagcactgaaactttgctaaaatagcctcaaggttgtgtgctatatttaccaaaactgagaaaatattaaagtgacaaaaacaaaacaaaataagtggtcctctaagcaagactcggttggtaatgtatataaagatttttattaatctgattcttttaaggtgattaggtctcccttgctcagaaaccttcatcacacccctttccttaaattgactaccaactaaatatactctaaactcttgagcctgacattggaaactttttagagagaatctgcctctccagtgtaatcatctactttcttatgatttgcagtgaagttcatggaccagcagcatcaccatcacctgggatcttgttagaaatgcagactgtcaggccccaccccagacctgctggatcagaaccagagttttagcgggataccagtgttgtgcatgcccaccccagtttgagaagccctgatctcttatacttcattctcctcagccttccttcatgtgatacaatctgctgaacgggcctagctctcattttctaagcgtgttttacacttctccagtgatctgcctttccttaaatcatacagcttcctcagaaaagtctttttctttcagcttccttcttccttccattcattcagttgattaggggtctaaaatataggccgggcatggtggctcacttctgtaatcccagcactttgggaggctgaggcaggtggatcacctgaggtcaggggttcgagactagcctggccaacatggtgaaactcattgtctactgaaaatacaaaaattagccgaggcagtgtcatgtgcctgtagtcctagcaacttgggatgctgaggctggagaatcacttgaacccgggaggcggaggttgaagtgagccaagttcgcaccactacactccagcctgggcaacagaatgagactccgtcttaaaaataaaataaataaataaataaataaaatatgctaagaacgatgatttggcttgagattcagacatgactgaaaacacagtccctgtccactcctgggacagcctctctggaggacagctcagcaacgtgtatcaagagtattgaatatgcatttcctttgatctcaatgttgtctcctctaggagattttcataaacgaataatcagaaaagaatgtaaagaaatgtgtagaaggttgattgttgcaacactataatagtaaaaaattgataaatgaataattgttatgcataaacttttatatagccaagaaagtaatatatatgtaaccaaaatgaaaatatatcaacattaacaattatattattaaaatagacaaagacaggccctgtggtgtgcctatagtcccagctactcaggaggctgaggagggaggatcccttgagtcctggagttcaaggctgcagtgaactatgatcgtgccactgcattccagcctgggtgacagagtgagaccctgtctctaaaaacacaaaagagacgtcatgtatatcaggtgtctagtgtggtgctgccccttcagatagattccagaatgaaggagatgccgggggaatcttcttcagcctacccacacctggagcagagccacagttggccctcaagcagccacaacatctgagcaagaaataaaccttcactttaagccactaacatttgaaggtgatttgctactgccacaactaatctagtgaaagctgactagcacattgtgtactctgcttatttgactccctcgttgtctgcctgcaccttgatgttatctctttttttggcgtctgtccatcctaacgtgacgtcacttacaaagttgatgcagttcattgaacttgggatgagggtggaaagattaatgttgtaattcccttggattagagcagtgtttctcagtgtgtggtccttgaaccgtctgtatcagaatcctgtggggtttggcagggatacagaatcttgagcccccactgcaggcctgcgaaaacagaatatttggggtgaggtttcaaggaattctcagatatacccaagtttaggaaacactggacttgaagctagacaaatactacatcaggatgttactttgtgcatcccctccaccactgaaattggaatatgatagacagtgtcccttggtattcttctccgaccagaactcttttttgtgatggatggatggatggatggatggatggttgattgcttctagattagggaactaaacattggtcatctttatgagaaaattttagccagatttgattcaagaactacataacacttgacaagtaaaatgaatgagtacctcaactgatatactttttccatactactctttttttttcttataaaaattaaattttagttacataattaattcatgagtacattctcatagaaatttaaagcattactgatgaggtcaaattcagcattgaacccctccccaaatcttgggcccctcatatccactgtgccacaggtatcttggttttttattttttccagatttttttctatgcatgtttatgtgccgtgttaatatttatggctaatacagatggtccttaagatggttcgacttaagatatttttcaacttatgatggggatgtagccacatcataagttgaggagcaagtgtatacattaaatggcctgtaccaatacagctggtatccattctcactgagcaagcatctgctgaaattgctcagagccctgtgtcactgtttgatatcttgagtatcaaccctgcagtttgtacttgtactatgtatgtgtgtgaggagtgtatacatatatatgtatatatgtgtgtcttaagtgtcatactacacatatttttttcagtttgttttttatatatgttggcatacatccatgtcagtatatgcgagtttacctcatgttaaaaaattgctccactgtattccatcctatcgtttatttagccatttcttttcttttcttttcttttttgagatggagtcttgctgtcacccaggctggagtgcagtggtgccatctcaactctctgcagcctctgcctcgtgggttcaagcaattctcctgcctcagcctcccgagtagctgggattacagatgcctgccaccacgcccagctaatttttgtaattttagtagagatggggttttaacatgttggccaggctggtcttgaactcctgacctctggtaatccacccaccttggcctcccaaagtgctgggattacaggcgtgagccaccacacccggcctatttagccatttgtatattgatggacagattgtttctagcttttgctattacaaacagtgctgccattgatatatttatatgtgttgccttgagtatctgttcaaatgtttgtaaaccatatgtatgtacatacacacacacacacacaacatacacacacatatggagagagacagatatatatgaacatgccgcgtcaccattaatttataccccaaccaggagtttatcagtttcctcatagcctttcaaaattgattgtcagtctttttgatcattgccactattgtgggtaaaaactggtgactttgttttaacctgtgtttcactgatcattaggaaggttgaagatcatttaatgtgtattcgccatttgtatttctgtttcttaaatggtctgtttttatcttctgcctgtttttctgctgggttattgatgtgttggagtttgttatatattagatatttaaatatatgttgcagatgtttactcacagttgatacatgtcttttatctttgcttatgttgtcttttatcatttgtttttactgtcagacctgtggtggtcattctcgattttatgtagtacctgctggccatcacctcgtctcctcaataagttgtttggattcttacaagaattagaaaaataactaaatgtctccaaattgtccatatgtaagagcttcgaagggctctcctgaataaagtgtatttaattgcatggacttgtaaacatgtatgctttggccactctgaaaatctgctttctatattccaaatatgtttgctggattattgtgctctaaataatggaactgttattctaacagtcctataatttgtatatttaattcatttgttcttgttcacaagatgatttgttatcagtctctcacagcacaattagggatttgtaatcagagtcacatcagtagtctttgtaaattgatgtaagctgttaaccgcgttgaaccagattttactatcatgtgtatcaataaaatgtataggtgatctctgactttcacatgtgaatcccaaaagtttacttaaaatttaattatttggagctctgttatttttccccagaaacaagtccgtttttaggtctctggcaagctcaaacaagcattcttaaagttaacagtttatcacattatttttatgttccaattatggatgtaaagatagaaagaataagcctataatcttcagaagttctggagatcattgaccgtggagtaggcatgtgggtaggggaggagtaggatgtagacgtctttaaaactatgaaattgaggacacctcttggtgaatcatttattctccagtgttctgtatttaagaacaaaggtgactggcatccacccattattctttagttcatgcattgtctgttgaaaatgcagtatttgtgagactgaatcagtcttatgtagcaaggaacatttcccagttttttgtttgtttgtttgtttgtttttcttttttgagacagagttttgctcttgttgcccaggctggggtgcactggtgtgatctgggctcactgcaacctccgcttcccaggttcaaatgattcttctgcctcaggattacaggcacccaccaccacaccagctaattttttgtatttttagtggaggaggggtttcaccatgtttggcaggttggtctcgaactcctgacctcaggtgatccacctgcctcggcctcccaaagtgctgggattacaggtgtgagccactgtgcctggcccatttcccagtattatattccttgattgtttgggtccaaaagcaacttcatggctaattattttcactaattgcacaaatttgaagccattgataaaagcaactaacaatgttaacatcagttgtaaaataccctcaagaagccagaaatcctaacttgtcagtgcatttttccaggtactttgtggttgtggtttgtgttgtaggaatggtggctgtggccctagaggattgggttttgttccttgctttccactgccctgctgttccgtggtcctttttggtttgttttttgttttcttgagacagggtcttgctctgtcacccaggctgaagtgcggtggtgtgatcatacctcactgtagcctttaattcatggactcaagcgattctccctgctcagccccctgagtagcagggactacaggttacaggcatgtgccaccacacctggctattttttaaattttttgtggagatggtgtctcactatgttgcccaggctggtcttgaactcctgggctcaagcaaccttcccaccacggcctcccaaagtgctgggatcgtaggtatgagccaccatgcccttttctttttgagggctctgttgtatactcatatagttccagaatgaatattcctcaaacatcagcatgcctaagaatcacatggaggagtcaagtcaaaatgcaggttctgcagctccattcctaagaatctgattcaatctagcaatcagcagtttatccacaagcaccccaggtaacccattgcagctcggccctagagcaacagaaatactgtgtctcctgtgttggctttctcaagtgcatgacacaggacagttcttggatcacttgcgtgtgtgggtgaggccgataaactcttgtcaaggcaccagggaacaacctgatgttccccgagaggtcagtgaccaaatgggtcgtggaattttatattatgtatatataaatatatgaattataaattgataagttatagttgtatatatttatggggtacaaagtgatgttatgaagtgaaaaggaaataagctgggcataaaagggcaaatactgcatgttctcacttgtatgtgggctctaaaacagttgaactgatagaaacagaaagcggaatagtggttaccagaggctggggtaggggaaatcgggagatgatggccagagggtgcaaagcctcagttggacaagaggaatacgttgtttctttttgcttgtttgtttcttttttgagctctattgcagagcaccttgaatataattttaataatggtgtattatacatttcaaaatcactgagagtaaatttcaaatgttgctaccacaaaatacaaaaagtatttgaggtgatggatgtgttaagggaaaagtaacagagttcctcaaaaaaactaataaaataaccacttttaatatgcttctgtaaacaattcctttctgagaagtttattccttttggctttcaacgaatagtttgtgtctttgaatattcattacaaataaatagtttgtttctttataaaagttaaaaaggtataatgggaactttttcatattgcaggtagtatgagtatcgtgacaaagctatagtttaaataggtgctattgggcacctattgactgccctcagaacctccctgaagctgggatgtaagaatttcgcagtggaaagtcaggcagttgatgcatcttgtcttgtcatgacattttgaagaatgactttactggtaattgacaggagtattaagcacccatataatgtattttacttttctatatcattttaaattaaaatttaaaatatgatgaaaaaatttatcaagacgagagatagtgttattcgtctgagaactgatgtgaaattttttgctaaatttatattttcaggaccttatgctctctttggtgcccctctttaccttgtccttacagacatgtgttttgtagatgctctgagctcagtttatggacagttcttcataatattcatttattaacagccagggatgaaatgcttggtatgatctggtcacgatttatgtcctatacacagaaccaaaagctttccactgagtgacctgacttcagattttctttgtgatatgaagctcatgatcatttgcttggagatatttacctttaatgaaatttaagtgggacatgtatttcttacagaaattaatgcaatgattatattattttaaatatttcgtgtgttattttagtgtaaatcacaacatggatttcatgagtttcagaatgtttatatttgcctaggagattattttttttctgcatgcatgtaggttgggtaaatgattaatactgtgtaagtagaaaataacattgatttaatttgtttgatcactggtttaactccttggaagagaagaaaactataaatatatatatatatatatatatatatatatatattttttttttttttttttttttttgagacagagtctcgatctgtagcccaggctggagtgcagtggcacaatctcggctcactgcaagctctgtctcctgggttcacgccattctcctgcctcagcctcccgagtagctgggactacaggggcccgccaccacgcccggctaattttttgtatttttagtagagacggggtttcaccgtgtataactatattcttatcttaatcaagagcaatcttttgcctgtcttatttgtaaggtgcagttctaggtattacatgtttcacttaaatacacagttgccaccaagaggtcacttttaagttaagggaactagagatatagcaaactaaggtgagaagacacttacttctcatgattcccaccttaaaatcacatttagcacctgtttttctctttgtcaaagtgacaaattatgttttttaaaaatatagagtggatttcactttgtttcagaagttattggaacttctgaaatgaccaaagataccatgatatttgcaaagcagatttaggtgactaaggctgatgcttatgcaatttctttgtaggacttcttcctaaccttttccaaggtttcaaggcttttttgaggtttcctagtttataaggattcaggaaaaatatttattgaacacttcgtgtgagcctgtagtctctgctttgcatagtacttgttttgattgttctcagtacctgacccacctccatttttttgagaaagaagtagaggagcatttatgaatgttatttattcagtctggttgatttcctcatagggatcctgattatgctgggctgacttttaaagttctgtgtagttttcagcttttcctcatgtgacccgacttaaatccccaagtgctctcccaacgtggagagctccatcctcctgttaagaatccagagtctgtagccagtaagatgtgttcaaaggtttaacaatgtttttattttttaaatgcaaatatttatactatctgcttcatttgtgaattttaaacattatcagaagcacacaggtccagaacctgaggaaggcaaaaaaggtcaggaataggtaggggaaaaggcgagatgaagtcttgaatcactaggtttattgtttgctgtccaagtccgcccgtcttctcagtctgtcattactgattatgagatggtggcaaaggcggaggatatgctgtgaactcataatagtcggttgttaattttcttcaaattctttcattgaaggtctccagctctttagttactgctgtgttagtgaaggagttgtgaagaagacttgatccctctatcctactttagttttatgggaggctttattacaaatgaatgtgtaccgtcctagctttctagctcccagctttctatgtcacacttcaaaaaaaataaagcagctaccaccattggtaagaagccctcgggtattatgaattcagaaccttgcccaggccaggcacggttcctagaagggggatagaatcttcccatctggttaaaagacaacgaaaatgggtccaacatgaaggttaccaaaggaagattcatttgaacctgttaaaggcatgctttcttgtcctttcctctgccttcacatgtgtgtcgatggaagccagctcgtgccactgcggctctgctctgggccccccgccaccccatatggccgccgctccctgaccccttgcctggaggagcagcagaaccccggcttccccttgtcccaggggagcgtctttcacactggaaatggacagagtgaagagagcagctggtgggaaaatgagaatggacctccaggggcttttaacaaggccatgaattcagttattggtcttgtgctcacacaattaaaaacaagctggcagcggggctgcatgatgactgggtgaggaccgaggcttgctttttgccgacgtcttctccctaagctggtggtccatttcctgctttgccctttggtttccatgctgtttctaaccttcacaaattaaagatggggcctttcagctacctggtttgtttcctggctgttttgtccgtgaagctctctactcttgagaggcattctgtcccagttttacttttttacttgatgttgttactgacttttggaatatctatccagttagtctgtgaggggacgagggactggttgtagggcatacgtgagccatcccctttggcccaagcacgagcatcttccccatttgtttatgtgcaggtgtatgtcaaatatatatttatattttattatttaattttattttataatatattttatttattttattttatttatttttattttttgagatggagtcttgctctgttgcgcaggctggagtgcagtggcacaatctcagctcactgcaaccttcgtctcccaggttcaagcaattctcctgtcccaacctcccaagtatctgggattaccggcactccccccagcacctagctaacttttgtattttttttttagtagagatggggtttcaccatattggtcaggcttgtcttgaactcctgacctcaggtgatccacccacctcggcctcccaaaatgctaggattacaggcgtgagccaccgtgcctggaaaattttatttattttattatttaatgttattatttgttgaaacaaggtgttgttccatgcccaggctggagtgcagtggcacaatcatagctcactacagcctcaaccttctggactcaagtgattctcctccctcacgctcctgagtagtagggactatgggtgcatgacactctgcctggctgatttttttattttttatttttttggacaggggtctggctgtattgcacaggctagtctccaactcctggcctcaggcaatcctctcagtttgacctcccaaaccattgagattacagcatgagccaccgcacctggcctcaaatatatttttaaaggaaaaaaatgctacacatgctaggacttgaatcttcctctttattgccagataaactgagggaatggatagttttctttgtttttcagcaataaaaaatttttaattatagtggaaagtcttaattatagagggagagcaaagtgtatttggatgatctgtgctaaaaaggaacagtacaggtggagtaacaagttacatgttagtcttgtgattatctcattaatgactcatttgtacttgaaagcagcataaatacatttatggaaaaatatgaatgtgaacttatttattaattttttttggagatggagtctcactctttcgcccaggctggagtgcatggcgcgatctcggctcacggcagcctccacttcccgggttcaagcgattctcctgtctcagcctcctgagagctgggattacaagtgtgcaccactgcacctggctaatttttgtatttttgtagagatggggtttcaccatgttgaccaggctggtctcaaactcctgacctcaagtaatccgcccacctgggcctcccaaagtgctgggattacaggtgtgagccaccacgcccagctgacttatggttttttattagataaggtagatgtagagataatgtagatataaagtgtgtatttgtgtatatttctgtttatctgtattggtttcctatagctgctggaagaaagtatcacaaacttggtggcttaaagcaacagagatttattctcttcaagttttggagactagaagtcggaaaggagtcttaggggctaaaatcaaggtgccagaggataatctgtttctttgccatttctagactctagagctacatttcttgcattccttggctcacagccccttcctccatcttcaaagccagtgttgtagtatcttatctctggctctacttttctatgcttctgtctcatgactttcttctcttctgcctcataatctttcttttcttccctcttataaggatacatgtgatgtcatttagggttcacttggctaatccaagatagccctcccatgcccagaaatttaatttaatcacattttcaaaggctatgccatgtaaggtgacattcacaggttccagagattagaatgtagacattttgtgggggaggacctttatttagtctaccacagtgagtgtgaatgtgtgtgtgtacgtatgtgtgtgtgtgtgtgtctgtctgaaattccctagctgacctataagcagctactctccaataacagtaagcacagctagtgttgaggtcttagatctaaagaatatttttcatcgaaaggaaccagttttgttttaaaataaaatggctcattctagggcagatggaaaatataagagaagcatggaacattctgtggcgtgagaaagtaaataaatgctcagagaataatggggacaggtcaaaagacacagaagccaacttgaagaggcttctgtcagtcccaactgggcaatttgagcactgaaataaaaaagcaataaattcagcctgttctgataaaaataaataaaattataaattgaaagtttggtgtgaaacaagatatttacatagttcctaagtgcctttccacagcgtaataattcgttactaagagaaaaagtttaagctgacttaaactttatttatttatttatttatttatttatttatttatttatttatttattttgagatggagtctcactctgtcgcccaggctggagtgcagtggctcaatcttggctcactgcagcctccacctcctgggttcaagtgattctcctcgctcagcctcccaagtagctgggattacaggcatgcaccacaacacctggctaatttttgtatttttattagagatgggggtttcaccatgttggccaggctggtctcaaactcctgacctccggtcatctgcccgccttggcctcccaaagtgctgggattgcaggcgtgagccaccatgcctggctggcttaaactttttaagtcaacttaaaaaggtttctcagtggtgaaacctggcagatcaaagtgaatgtgatctgtaattggacaaagtgaaagcatgtgccactgatagggtgcaaagagaagaacagcctcatgaaacatgaagataagcccaagttgaagaacattctgtaaaataactggcctgaaactttcaaaaccatcatagtcatgaaagttaaggagtataatgtgatatagtagtggggtggtaatagccacgtggaagctctaagcttcactgtaggaggatctggttaagttatttactaatagagtcgtgacttaattttgtaggttttccttcttggtctagctgcattcctcagtgaaaactcttccggtctcctgcttgcatggtgaagtatagggtgccataatttcattagcttggtgagtgaagaaatctaagcatcttaacatccagcatacaaatcccagtttccgctatggtatctttaacttcagtagtgtgtggtgtcccctaggccagagtgctctttgaaaaatctctctagttaataaaactattgttttacctgagtaggggaggggctgtctcccagtgtagtggaggcagggatctgaggacttaagtgcttgataaccattccttgtgaatagtcctctgttatctaagccactcccttttccttcacttcaagagtttaccaggctccctcattcccttgtcctttggatgtcttgtggggtgcattgaattgttcttttccttctccaggttttcctgtggtctcctgtgtcagttatcactagatcatttgcttcaaaaatgtcatttttcttattctatttcctgtgggtttgtgcttttataagaagaatctctttactgtgcttttagtagctttggatgagggcaaatgcaaatgtgtatatttattttgccatcttacccagaaataaacaacagtgattttttaaaactttttctttttcctttttacactggacgtctcccttccccataaacctgttatagaacttgaatctttaaaacagaaatggaactactgtggttgcaaaagtggtgtggggttgagtgaacaagagtctttttcaccatgcctcctttgttgatctttgcagccaccctgtctctatacccaggcagcttctttgaatcttaggattctcatgtacacagctgggaaaaccactggattagagtattatacatcgctgtttttggctagagtgaaagattcacctccttttacaactttgcatgtcttcaaacccacattcctcctgtgtgggctggtgcaaggatataccttctcatccagacccttttgcttattaaaagggaatagcaggggcttgttacctgtcatcctggagaattttccttttgccctctaatctgtagcctttcctaaagtaatagttaactaggctgctgtaataaagtaccataaacagggcactgaaacaacagaaattaattttcttacagttctagagagtagaaattcgagatcaaagttggaagggttgctttcttctgaggcctctctctttgtcttgcagatggccaccttctccctgtgtcttcacatggtcttttctcagtgtgtgcctgtcgtcatcttttcatatgaagacattagtcatgttaagttaggacacactctactgatttcattttaacctaattatctctttaaagaccttatctccaaatacagttacatttgaggtactgggggttaggacttcaacatataaatcttggggggacacaattcagcccataacgcctaactgttgccttttgcagcattagccttgagcttcttgtccctgtctgcacttaagttgtgcgtggctccctgcttccatgggcctggcttctgctgggcaatgggagcagataggattgagcaggatcaagtgcagagtgtgactgttggaaccaagtgttagttttgagtgagtcatgaaatattattttatagtctttaatttagtgtttaattttttctttataatactcactggctgacttggaggctttcagattctctgaaaatcatactgaagttgaaataattaaggaaatgaaggagcatgccacctttctcaaactctactcttaacctttttctccctcctcactcctctagccccatcattcccttcccaaatcaactgaaaaccacttttacttctaaaatttgcctgtagctttctgcttcgtctttttgatttttttacagctaaacaattaattaaaagaatcattctaggctgggtgtggcagctcacacctgttgtaatcccagcactttgggaggccgaggcgggcggatcacctgaggtcaggagtttgagactagcctggccagcatggtgaaaccctgtctctactaaaaatacaaaaattagccaggcatggtgatgcgtgcttgtaatcccagctactctggaggctgaggcaggagaatcacttgaacccgggaggcggaggttgcagtgagccaagattgtaccattgcactccagcctgggtgacagagtgagaatctgtcatctcaaaaaaaaaaaaaaaaaaaaaagtcattctacatcagtagtgcttatcttgtgtctaaaattggtaattataatcggtaatgttgcgagttggataacgtgaatgtaattctttgtaaatgtgaaaagtcatatcaaatgtaaggttgagattttgtttgtcccatccatttaatggtgggcttgcatctttaaatacagggtgtgttttggggatcatgccattgtaattttatcacaaggaaaagatgttactgctcccgtagtgaagtgtctgtgaagctggttcagaagtgtgaagaatcattgtgcttcagaattcaaggagagctgagagataaatttgagtaacactttttatcaatagggaagctgaagcccaaacttgaagcatttgtgtgagactgcgtggtactatcgagccgagatttaagtctgatcacctgaccatcagtccagctgctaatgtttcatgttccatacttcttaaggagatttatgttcgtaaaaacaactgtgatgaagcaaaagaatatattttattcagttagtaatgccaaaggaaatagtagtctgaattctgtgggtctgtcattaatctgattgttttaacaatacagttttcaaagacctgcattaattattggagagatcagtaaaaatttataagccttgctatgggaagaggatgtatcaataggggctcacagcttcaagaataactaattgtttggtaagaataaccccccagtgcaggtggagctgagaaaccaaaggagaaggcagacaggtccagactgttgttatagggtgttttattggggaactgacagacagaagcgtggtttttggcaactgcaagacggatagatctccatgccattataccccagacccagggattatatctagggaaggggcacacatgcttcggagggaataggtaggaatttgatgtaagggcaggatttactgtaagtatgtgccattactcaagaaacagtagataaattggaaatctcagaggcattcccagaactggggttaatcagaagtcaacatggcatgttagtttccaagatagagttactttagcctccacacaaatgcaagcagaatgaattttatattatttagcaaggtggagtatgttaatggagcactttattaagcagagccctttagtgaattttacttctaggtcgagcagtcccttttaaaaaatgtttcacttttgtgatagtctgagcgtactttgaacacggcttcattcggaagctttagcgccttcaagccttgctcctcaaagctggtctgtggatcatggtcaccagggaacttttaggaatgcggagtcccaggccccaccttaacctgctcagtttctgttttaagaagattccaggtgattcgtatatacaacagagtacgaagaccattggtcgagagcagtggttcacaaagaagatggctcctgtaccagcaacatcagcatcacctgaaaaattgttagaaaatgcagattcgcaggccccacagacctacggcatcagaaactctgggatggaccccagcagtacgtgttttacttggtgctgtaggtaatgctaattcatgataaattttgagaaccactctagggtagtatgtttccaacagtttaggtcatgagcaaccttgagaaatacacttttaatcatgactcagcacacacactcacatgcacgtgtgacttagacgttccatgaaacaatgcttatcttacagtgtgttttctgctctggtatttttacttatattctattaaatagatatgtgtgtataaacttattgatataaaaatgtggtcatgatccactaaagtgattttacaagccactaatgggtcataagttgcaatttgagaaacaatagtcttgagcaggctcctcttgatagtctgataaaattctagatcttttgtcagaatagtgcattttaaatgcatacaataatgtagatagagttgcaaaagaaaccaatttgattggctaccaaaatattacatttgtggtatgataatatatgtatcccaacttctcaggaggcttaggcaagaggattgcttgaggtcaagagtttgagtccagtcagagcaacatatctagatcccatctctaaaaaaaaaaaaaaagctatgtttctttattgataacaagatttaatggtgagtctagtaactattatcatttcaaactagggacgagtatacatatttccaaatatctgtagtaactgttagatgatatgaaaatgatgaatttctattgatgacaagttatggttattgctaccaatactctggtttgttgcttacatttgtatttgaaaacatgctaaatttcatctaaaggtaaatgcaaataaatatgtaaatcaccccctccccagcttcatgaacttccagaattctcttgattggcaattgcttccccacggacctgaggttaagaatccttgctcaaggggaaccttgctttagagaacagttctcggccttaaagttgagattctaagcaaaaatttatcttcttggaatttcttgaaacttttgctgtatagatggcatcttttcttattttctagcacccctgtaatggattcctttttaaaaatgttctttctgatgttttagtgagtccttggggcatcacttggaagccccagtgtaggctcttgatactgtttcttctctagtctccccattctcaatacatgcacctggttgttcaagccagattcctgggagtcatccgcaatgccacgagttctagatttggactgctcgggtgtgaatctaggatctatatatctttggaaaagttatttagcctctcattgccttcttttttccacctataagatggggatgacagtagcccccacctcataggattgttctgagcattaaatgagatattccatgtattacattagaacagtgcctggcacagagtaagtggttagtatctattctaattaaccttaatctcccctttccctcttttttttttttttttttgtttgagacggattttcgcttttgtcgcctaggctggagtgcaatagcgccatcgcggttcactgcaacctccacgtcccaggttcaagcgattctcctgccttagcttcctgagtagctgggatcacaggtgcatggctccacgcctggccaatttttgtattttttagtagagacggggttttgccatgttggccaggctggtctcgaactcctgacctcaagtggtgcgcccaccccagcctcccagagtgctaagattaaaggcatgagccactgtgcctggcccctttccctcattctttaaatccagtttatcagaaaactgtgtaattcttcctacaaaatatattttaattcatccacttttgcctattcctccaaacttccctgttctcgtttggatttctagctgatatctctgctgcttcttgtctcactccaattcattttccatataacacccatatgatcttttaaaagtgtaaatgaataatcttttaaaatgcaaatgaatcactgtatcccataaaacgcttcagtggcttcccatcaaacccatcaaaatgctccgtcctttccttgagctacactcttcatcctgcaaatctctaaacttgcccactcacttgctcttctgtggccactttggctttctcttagttatctgagtagcctcatccatccttccattccttaaggccatgcgtatggccttcccgccaatatgtcgctgaccttccccagcctgtcatatttctcatctctgcaggcgttagtttctcagagagctttccctaaccacctgcccaaattagggcaccttacgtggcagccccttggccgagttcctcttttactagcctgaagctccccaaacacttcaaaaaattaatatttcctctctattggggaaaaggataattaacaacctgtgattatcaaacacgtaacaccaagaggagtatgcaccttttttcagaccgatacatttgacgcgttatgaacattaagtgattgtggagctcttttaagaaattgctgtctgaatgttgtgcacgctagctcttggtattaaagaacaaagtggggtctgccccctgaacctgtctccagtggggtgatggaggtgtgattgggtcttcctagtattgtcagtcatttctactccaaagcatagaatagaaatactaacatttccctctttgaaatagttacttcgttgctgttaaaacccttcacgcttctctcccccaaagtgaatggtcagtcactgttcagacatgagaaaagatgatgtctcataaccagtgggtagaaaccagtaccggtgatatctgtatcctggttaatgtttaggttcatagtaaagaggcaaaagaaggcgtccctgactgtgctaggtcaaatttctttgtgtcttgaaatttttttccttgctacttgtttttaattagtcctcagccggagaacagagacactcctgatttttgacagttgcctaaaacagcgaggaaggaggtcttaggagttcagagttaggatgtaccactttcaccatcacctttgtagttcttgtttcaaataagggaatttaggagttacacaggaccctgggacagatgttgaaatgtaggacaatcagtataaatgggatgcctggcagttctgttccatgccctgttcggctgaatggtgttcctgattatataaaaatgtgatctattttggggaaagactggtttttttgttggtgtactttaacagaagccacacaaagaaatattcttgttatggactgtgggtgatgataatcagttggaaaatgatgtgtttaaaaacaaaatacagttttcttttttttttttttgagatggagtctagctctgtcacccaggctggagtgcagtggcacgatcttggctcactgcagcctctgcctccctggttcaagtgattctcttgcctcagcctccagagtagctgagattacaggaaccaccacacctggctaatttttgtatttgtagtagagatggggtttcaccatgtaggtcaggctggtctcgaactcctgacatcgtgatccacctgctttggcctcccaaagtgctgagattacaggtgtgagctaccgcgtccagccaaaatatagttttctaattgcagaaaagttacattaagttaattttttaaaaaccgaccataattcagcctcccaatcaagccatcctttttattttcctctgacttccctatagatgtttatatgtatacattttttatatagctataatcatgcagtgatagtttgtattctgattcttttcatgttacacttttcatgtttcattttgaatggttagatagctttgagtacatatgtcataattattttaccaatctcatgttggataatttgttttatgatgtgttttttaatgatgtattttaaatgtgtctttgttttgttcttattttgcaggcagagacatttgtttgggtgaacaatgcatctgcacattcccagagtgttgccaaggccaaatatgaatttttatttggcagatctgaagggaaagctccagatactagtaagtatttcctcatatccctctcccaggtaaactatatgaagagctgtgatttcaaagtgatttttctccacctgcattactttcttcttccctctgtgaaacctgctttccctaattattcatcaaaacaatcttcccaagatgtagaatccgcaaatatttcatgtaattcttgtggcctattcttggtaatttcaagtcatgttcttggtttgaagaattctcagcttctgatatttgaaattccaagaattaaccagttttcataagagttttccatagttaccattgttatatatattgactaatgtatttttggtggtttttttttttttgagacaaagtcttgctctgtcatccaagctggcatgcagtggcatcatcctagcttactgcagccttgacctccaggctcaaatgatccttctgcctcagcctcccaactagctgggactacaggcatatgccaccacacctgactaattaaaaaaatactttttttcttttttttttttttttaagagacagggtctggctatgctacctaggctggtctcaaactcctggcctcaagccatcctcctgcctcggccccacaaaacactgagtttacagatgtgagccactgtgcccagcccttggtgcttgtttttcactaacaaaatatattattaggaaacatttccacaatgattttcagccactgcagtctttactttggaggttattgtagctcttgtttatttttaatactttttagtattggcctaatctagttatcaaatttagtcttctggaactagaagcaacatttttcactttgaaacaggtaaatttagaacaaatagaactattactagtgctaattacagtaataattaacctactagattacttactgtgtggtgaggcactatgctaatcatcacaatcaccttataagttggtaccgttatccccattttccagatgagggatctgaagtaatcttctcccagtcacaatcactcacacagcagagccaggagtataaggcaagtttgcctgaccgcagagctcatcctgttaatgcaatacttttttgaaggcattttcctagaaggaggtacaagataaaaatgcaaatagctttgtattgaatttcaaaacgtgtaattttatggaaaaccgatgataaaggggatattagcatatcttgagaattagattggaaaaggctattgcatgtggttaatattctctgagttctggatctagacttcttgagtttgaacctggccttgaacttataaactgtgtgaccttgcaaagctatccaacttatttgcggctcagttttctcatctgtaaaatgggattatagtgacttatgtcttagaattattttgagaatgaaataagttgacatttataaagatcttagagtcatgtcccatctctactaaaaaaaaaattagccgggcgcggtggcaggtgcctgtagtcacagctactcgggaggctgaggcaggagaatggcatgaacccgagaggcagagcttgcagtgagccgagatcacgccactgcactccagcctgggcgatagagcgagactccgtctcaaaaaaaaaggatcttagagtcatgcttggtatgtaataagtgctataaaagtgttggctgctgttaattattgtgataaccatcaccatcatcatcatatccctgacctttgaggccgatattataagtgcaatccttaatttttcagctttattattatctgatacttatttttgttttgggaagaccaagaatctgacttaatacatacagctgttgctcagctgaagaaacccaggtatgaactacacatttttgactcacatgttagatgggattatttaataactccagaatatttgaggataccaagaaggcagtgtatacacagccatataataacttcttttagcttaaaaagtgaatatttattagatatcttaatagttggggactcttagatacagtaaaaaaaacagctaaattatttttaaaaatcatttggcttttatcacagtgtcctaatttagaggagaatgtgtttcgtagtatatctcttatacttaacatgtattgtagccatttatgctgtttgtcatgcatcataagtacctaactattctgggcttgaagtttgaggtacctaatcatctgtttactctttccctgacagggtactgattatagttatccccagacttttgaaaactctttggcattggcctggcgtagttgctcacacctctaatcccaacactttgggaggcagaggcggatggatcaccagaggtcaggagtttgagaccagcctggccaacatggtgaaagcctgtctctactaaaaatataaaaattagctggccatggtgacatgtgcctgtaattctagctactcgggaggctgaggcacgagaatcgtttgagcccaggaggcagaagttgcagtgagccgagatcatgccactgcacttcagcctggatgactgagtgagactctgtctcaaaaaataaacaaaaaatttaaaaaataaaactccttggcatagacataactttgaatgtgacactgtgatttttttgctaattaagctttttttttttggctataataaaactgatttttccttaactatatagagataataccaaatgtctacatagttctctgccttatttggtgagtgagtttggttcttccttactcgtgggttttgagtagttttccctgtatcagcagctcagatatatcatagccgaggcaaaccaaaatgacaccttaaaccttttgtttcttatttgccttggtaaaaatggttggtagtagttgctcctggtgtgatgttatgctgtaggtgtgacaggatgcatgcgttgttgaacaaatacatttaatgagcacctttgtgcaggttacttgcgttgggcacattgaaggtgcaaagacgtggaagacatggttcttactcataagtttcttattctttagctaagaagaaacaatatgtctccaagtgactagcaaggaagaatgatcacatttagtttgtctggtgataacttcatggaggaggtggaagttgaacttggtcttgaaggatgactagaattctgaatattagagttttgtggggagagcatttcaaattgcagaaatggtatgagcaggaaatagaaattgtttgacgaactggggaagactagcctggttagtctgcagacatcatcactgagagataagttcagaaagattaccatttagaaaagggccatatcatgtagggcctcctaaggcaagttgaagagtttacagacttttaaaaataagtaggtgaggaaaatgagcttcagaggtattaaagaacatgactaaaggcacatagctgagatgatttagaatccgattaaaaatccagtctctctcatagcccatgagaagtctcagctttagtgcagtcctcttagtaggcacagcatgccagtaattggaagttatttgatgtaatgaggtaagataggtatcttcatgggttattcagttgcgtggagaattgtagaacttcataaattgtcctaaacttgctttttagagtttgtgtgtgtttttgaaactctctgactgtaattacttctcacagctgtctgtgggctggcataaagctgtatcttgttcctcccactttactgaatgcaaagtgctgatggcagctgcagcagagcctgggtcccagcctacgacaggtgcctgtggacaacactgagcctcctcagtttcttcatctgtaaaatagggaaaatggtagtaacttcttcatagagttgtactggaaatcgaatgagattgtaaatacacagctcagggtttggcacgtggtacccaatcagtgtttagctgttaggaaaccgcttatgtattaaagtagcagaatctttatgttggaagaaatagtagaagtcacctttgccttttatagatgtggaaactgaggactcaagagaatgaattaatttgcccaaactcattggtaggtttgagaccatgatccaggctcctctgctctgaatcatgtgtgaaatgtgacatcatctgttcctgtaggaaaaccaactctcagattggaaagacgtaaaagtcacatcaccccactcccttgaaatatgctataaatgtgctgtgttagaaaggcaaccactatcagagtaaacaggctctgagggaggccttcggggactcttctgttggagaaggtacctgatgactaacggaggaaggaggagaactgttttcacattgcctccctgctgccgtcacctgaactgttcagagcccatcattaaaagaaaagagtcgggtggcactagtggggaagccataggaaatgtgttataattttaaggttctagagtgattgtgtagtgagagcttagttgcttggaagcctctgaaagacataccaaaattttgttaaaatgttaattttcttttagttggagctcattctaacttgtattgtctaagcaaattttctctttatgatgatttatggtcataagtatgaataactaaggtgcttgctggacttagatgtgaatggatgctgtagcatatgattttaagaagtgtctcatgtcagttttttaaaaattacctgttttttttttaaaggtaaagtgaatcatatgtagatacatgactccttgcagtataatgtggttcttttcagcaaaattaactagatcagggtttcgcaacagtttgactattgacattgtgtgttggacatccaacaaaagacttgtatgtagaatacatagagagctcttacatctcaatgacaagaaggaaaatcccctaagggaaaaaaaaatgggcaaaagattgtaacagatacttcaccaaagaagatatatggatggcaggtaagcacatgaaaagatgctcaacattattagttattagggaaatggaaatgaaaaccacaatgagatactaataaaatctactagaaaggctaaaattaaaaagactggccatattgtgattggtaagaaagtggagctactgagctcgtacacactggtggcaggaatgtaaaaggtccaattatttaaaaacagttgaaggccaggcgcagtggctcatgcctgtaatcccagcactttgggaggccaagtcgggcagatcacgagatcaagagatggagaccatcctggccaacatggtgaaaccccgtctctactaaaaataaaaaaaatagctaggtgtggttgcacatgcctgtcatcgcagctactcaggaagctgaggcaggagaatcggttgaagccgggaggtgggggttgcagtgagctgagatcgcaccactgtactctagcctggcaacagagcgagactccatctcaaaaaaaaaaaaaaaaaaattgaaaaagttagttaagaagttaaagatatacgttctgtaccactaggccattccatttcttgatacttacccaggatacccaagcgtatgccaatgtaaagacttgtacgtgaaagttcatggcctgtcctccggtttcactgtttgggaaattaagcagattaggaattaggtaactgaatgaggaatgaataacacaagtggtagactttgcagtgtgcgtttcaaaatatttaatcccttcttttgccttaattggctttgatttagtatgcagtatgcactggagtctcttaaatgaaaagacctttgagatctcacctgtgggtaattggctctatctctatggacagctttcagggctctcttgacccctacccactcacgtttctggaagtgtgagtcttgtgttcttgctgtatggtgcctgtggagccctttcagtcatgtctttccttagctctgaaaatatttgtcctctctactttttaaaaatggtttttacttctgcagttcctattagataggtgttggttctcctggattagatcaatcttctatgtcttttaatttttctttcctattttaaagtacgatcttccactctttctaacaacatttttatagttttatttatagtttcaagagttctttcccattctctggtcactcaattttcattgcagtctgcttttttatggatgcattattttgaatctctctaaataaacaattagattttttttccccctgagattatcttctgtttcctggatttttgcttcatcgagggtcagttgtttcattaaatcttagaacttcttttgaaagccaccgttagtcctcaaatgtctgttggagtttgtttttttcattcatatgcatgaatgaaagtttgggttcccagatatagacaggtggagttgctctggctgtgtggagtgtgtgtccttagcaggcctcttcccttcatatagaagagggctggaatgggtttctacgaggtggggtgtatggactggcacaagtgcaggtgggattagacccatgctaactgccttgctgcaggcaagcctctgggttggggaacagggtgggagggggctaggatgggaagctgttctgcagatgatttttcagttaatcatggtgacatatgttctgcttcccattccagatctggagacctgccaactctgggtttctagcttctctgtggctctactgttaggataactgtggccctctgggcttgtttggggttgtgacttctgtctatggttattttgtctatggttatactctttttttttttagcactgttgtgaatttattttcttttgaaattggttgttgccattttcatatgacttagagaagattaaacaaatctgtatccttgtctgccatagtgacccagaaggctgaatactttaaaaaataactttattgagatacaatttgtaaaccatacaattcatccatttaatgtgtaaaattcagtggatttttagtacgttcatagaattgtgcatcatccatcaccacaggccactttagaacattttcatcatcttaaaaacaaaagacttgttggtggctccttcctgtagttccagctgcttgggaggctggaggtgggaggactgtttgagcccaggagttcaagtccagtctgggcaacatagtgagaccttgtcttgagcaagaggaagaggaaaggagaggaaaggataaaaggcagaagagaggagaggaagggagagagagagagaaagagaaagaaggaaggaaggaaacaaagaaagaaacaaggaaggaaggaaagaaagaaagaaacaaggaaggaaggaaagaaaaagagaaagataaaaagaaaaaaaggaaggaaggaagaaagagagagagaacacccactgactgtcattctaggcaaccactaatttgctttttatctctagagattttcttattctggacacttcatataaatggaatcattgttatgactagttttgctgtaaaatttaccactacttttttgtgtggaataatagtcgattatatggatggtacacattttatctgttcaccatttgagggaaatttaatacattagtctgttctcacgctgctaataaagacacacctgagactgggtaatttataaaggaaagaggtttaatggactcacagttccacatggctggagaggcctcacaatcatggtggaagacgaaggaagagcaaagggatgtcttacatggcagctggcaagagggagcttgtgcagagaaattcccatttataaaaccatcagatctcatgagacttatttgctatcatgagaacagtatgggggaaactgcccgcatgattccattatctccacctggcgccgcccttgacacgtggggattattacaattccaggtgagatttgggtggagacacagccaaaccatacatttgggttgcttttcctttttggcttgtgtgagtaatgctgttaggagaactgttgtacaagtttttgagtggatgtaggttttcatttcttttgggtatacagctagaagtagaattgccgagttgaatggcaattctacattaaaccttttgaggaacttctaaattgttttccacaacagttgtacaattttatattcccaccagtagtgtatgagggtgtgatattgtgaaatatgtatttggtttttgtccccatttcctggcatacacctcctaaaatccttagaatgtccgcaatgatgtcttcttgtgtgctcatatgttgactgatggctgtcagcccctaggtagcttcaggacggggctgggcaccagaaggacacagcgggattggagggttcggactttctcctacgtgtgttcagggaaactaagtagcatggcagcagcccagagcccccgggtcagtggctacacagcagcagtgagcagcctcctgggaggagcgaagggctgaaggttaagttggccaatgatttagtcattccttcctgtgtgatgaagcctccataaaaacaccaaaggggtgggcgtggtggttcatccctgtcttcccagtactttgggaggctgaggagggtggatcacgaggtcaggagctcgagaccaacttgaccaacgtgatgaaaccctgtctctcctaagaatgcaaaaattagccaggcatggtggcgtgaacctgtaatcccagctactcgggaggctgaggcaggagaattgcttgaaccctggaggcagaggttgcaatgagccaaggttgcgcccttgcaccccagcctgggcaacagagtgacactctgtctcagaaaaaacaaaacaaaaaaacccgaaaggacagcgtttgagaggttttgggtagctgaacacatggaggttctggaaggtggcgtgcctggggagggcttggaagttccgtgccccttttcccatacataccatatgcatctcttcagcgtcctttgtaataccctttataataagccagtaaatgtaagtaaatgtttccctgagttctgtgaggcactctagctaattaactgagcccagggaaagggttgtgggatccttgatctagaccctttcagaagcacaaataaaacaacctggggcttgaaactggcatctaaagtggcaggggtgaggtggggttagggcatggggttaggggtggggtagagggaccaagccctcaacctgtaggatctgatgccatatccgggtagatagtgttggaaatgaattgcattagaggacaactagctggtatcctctgtaggactgattgcttgcttcatgtgtggagaaaatctccacaccttgtggtgtgagatcagaggaaaaattgcttatctgtgtgttttttcttacttacagggttccagtttctccacactcttgccaacacttgttattctctgtctttctttttaaattataattatcctaggagatatgaagtagtatctcattgtggttttgtgttgcatttttgtaatgactaatgacattgagcatcttttcctgtgcttatggtttattgtacagcttaaatatcccatcatgcttaggaccagaaggagttcagattttggattttttgggttttgttgaattttggaatattttcatatacataatgagatatcttgaggatgacacccaagtctaaacatgaaattcatttgttttataattatgattataattatataattataaattataaataattttgtgcatgaaagaaagttcatgtatgctgaatcatcagaatgcagaggtcactatctcagccacccatgtggacagtctgtggttgtgtggcatcaccctcattcctgcctctgaatgtatattcttctaagaagcgatcattttctaacactgattcacacatacatatttaacagtaaaaaaaaaaaacaacataccattaatatggtgaaaaaataaatgtgttcaggatagctaagcagtacagtagcatcaccagaatacctatgttagttcctggacagtggcaggaacaaacaacggtaggctttccgtcttcctctgccatgctgtgttttgattaaaaactctatcatttctaaaatgaggttatagaaaagaaagaaaatttttttaaaaagataagaattcactgtacgtggttttgttttttgagttgagcagaaacaccagtagcagttgagggacctggaagtgagtcctctaaggatgaggaggctttctgctggatggctttttaaatgcgtcctccagtcatcttcctcgttaacagtagtttttgacttcgacttctctctcgaattttataaactggcatgatttcttgttctattatgaatgtaccctgctgtagtccttgaataaacccatcacacattttcatcatgttgtctatgggcacttttttgcagtgttaattaatgtcatcatccgcttgtgttacgttggcactccaacgtttcagattttggagcattttgaattttagatttttggttagggatgctcaacctgtatatctttagagaaatgtctattcagattctttgcccattttttaacatttttccaaaaaattagagaatttttattatatgtatatgtgtgtgtgtgtatatatatatatatatacttttagagatagttgcctggaagtgtggtagcacaatcatagcatagctcactgcagccttgaactcctgggctcaagtgagcctcccacctcagcctcttgagtagctgaaaccacaggtgtacgccaccatgcccggctgacttttgtatttttaaatgttttgtagagatggggtttggctgtgctgccccggcaggtctcaaactcctggccacagggcccagctgtgttttttaattggcttatttgtctgtttatgattgagttgaaagcactctttctataatctgtatacaagccccttcttaattgtatgactctggatactgtcttctattgtattcgttatgttttcactttcttcatagtcatcatttatagtacaaaaggttttaattttggtgaagtccagttatctatatctcttattttgttgcttgtacttcccatgtcatgtcttagaaaccattgcctaagtgaagaaaacttagtcctgtatttccttccatgttttatagttgtaactcttacctttatgtctgtggcccattttgagttagttattttttctttttagtgcaaagaagaagctgaataattctgaataacagatagaatgtgttgggtgaatgttgagcgtctgctttaggtagacgcctcaccatacacacggaattcctggagagcaagacaagaaaaaagtagcatggcagctcagcccctactcatgcctattcagatctttgcatctggctgcaggacccaggaaacctacgagttattgctttaggaaaaatgtgggctgggatagaataccacaaataaacaaaggaagaaatgacaaatctgctaattctcaggttttctgttgatttattttcttgttttcaccacggatagaagttggtttataattttgtggctagtcctttagaaaatcttctatgtttggccatttttatttattttgctcctttctttccactctccagcctccttcccacccattatggaaagcagaaaaatgattttacagtataataacaagtatgtgttagacttgctcactattccttggccgttattaaactgaccatatgttctccattattttagctgtaccacagcctctgcttgatacgcagtagtttccaatggtctgttttggcttgacaaagtgggccaggaagtgactataactttctctttggctagggtttttggtatagtaagttagaggttccaccttattccacactggcccacgtatctgtagaatgggctgtatgctggtagccttaactacttctttggaattacttggtgttttatatactaagataactaagaagtgttgcagaaatcaaccaggagagcatactgaaaagcatatttctactgtctgttcagtgtttttgtctacaagatctatttttttagattggtgtttaatatatgtatatatatataaaacacacacatatatgtatatatatatatttaaagtagctgttgaaaagctgaggagcaggatttgacttttttgagagtaggatcaaatcagctttggaacagcagtggacatcacatctaacactgtgaagtatatacagccatgtgtcatctaaagaaagggacacattctgagaaatgtgtcataaagcgatttcatctttgtgcaaacatcataaaatgtacttacgcaaacctagatagtatacctactgcacacctaggctctatggcttagcctgttttttctaggccacgaacctacacagcatattactgtattgaatactgtgggcaattgtaacacagtggtctttgtatgtctaaacatagaaaaggtacagtgaaaatatggcattataatcttatggatcagcgtcctatatgtggtcattggtgagccagatgtcattatgtggcacatgactatatttggtcttccctctgagtttcctcttaaaatttctaggattttcaaagtggtatgtctttttgtatgctaatgaattaactgatgcctggcaacccttatgtggctttagaatggggctaccttgtccaagcttagagcaagcttatgcaacccacagcccatgggccacatgcagcccaggacagctttgaatgtggcacaacacaaatttttaaactttcttaaaacattatgaggtttttttttcaaagctcatcagctgttggtagtgttagtgtattttatctgtggcccaagacagttcttccagtgtggcccagggaagccaagagattggacacccctggattagagggttgagactttcagtcccatcccctaacctctggggaggggagaggggtgaagtttaaggaaatcaccaatagccaatgattgagtgaatcatgcttactaatgaggcctccataaaaacccaaaaggacagggtttgcagagctccctgaaagacgaacacatggaggttccaggacggcggtgtgtccagagagggcatggaactctctgccccctcccacatgccttgccccatgcatccctttatctgtatcctttgtaacagcctttatcagaagttggtaaacataagtggttccctgtgttctgtgagctgatttagcagattaatcgaacccaaggagggggctgtgagaatcctgatttatagccagtcagaagcgcaggtgaaacaacctacggctttagatgggcatctgaagggaaggggcagtcttggagactgagtccccaacccgtgggatctaatactgtctcgagttagatagtattgcagttgaattgaattacaggacacccaggtggtgtatcctgcagaattgattgcttgctcggtttgtggggaaaacatttggtcacagaagtcttctgtgtaggttgagtgagagaataggaaaagcacttccgtttagtttattcctgtgttctcagaatgtcataattagaactgagaactttaatctccacagacttgctgcaccagatgtaattgaggtcaaacttttttcatgtgcttattagccatttatgattcattttgaaagattttcctgttcacgagttttatattggagagcttgccttttattgacttacagaactctttgggttccgttaggacgtgttagagtaaactttaggtccttgagatgttgcagaatccctgaacaaaccgttttttcattgtcaggtgtatgaactgactcacaaagtatgtttttagcagtctcccttcatggatccttgaataaactatctactcttcagttttatttttaggtaggaaatatcttttcccttctataaagcagaagtgacatactggcatttttaacttatgatttatttggtctaaccaatgttttattaaaatattgagctaacttttaaaaactgggagatttcatgtaaaaatccagacttgaagcttctgttgctgaatttgaggaatgccaacactgagtgtgccttggcattgacatgaaatagtgctggtgccttcagagcacaggtacttggtcaccactccctcctgtgttctcataccttgcctgccttactcatttatattatctcctgaagcccgtgaacactgggcttatggcctctgcatacatagtgtatgactttatacttttgcccatgtgttccagttgtgagtttcattatgtcacactttgcaaccccaagtagcatccagagatggattttctatgaagccaatgcaggaagcattcccaaggctcccagaaacctgccatttttttgttctttttcttaaagagactccccgtgaccacctgcccagttgtgtgtaggtttcaggacccacaaaactagatctgcctctgccagcatgaggatctcctgtagaccttttaagaaataataaagcttcctaggctctacttaacccatgcctatgcagttagaatctgtgggcaagggatgacccaagcatctctacattttaagcatctcccctagtgtttgttgtcatgcacatacaggctcgagaaccattgtgttttaaaagataatttacttgagatgtttataaaccattttaacactaaaaggatgcattttggaatcatttaatacatttaaactgtagtttgatatattttactgacatgcagagctgaactgcttaggaaccactgccaattgaatactaatagtgagaagataattctgaaattgaaatatgtcaacaggaaaatgcaatttgattgttaaaaaaagtagtttacatttgttttttcaaggatttctgaagaaggtttctcatatctgtgaaactgtcattccattcatgtagaatttcaccagcaatttctgttatggtagaatttatgtaaatatttgcttttgaaaatattataagtataggtagaatcacgcagagattctggagtcactatcatgtatgatagtgtcacaagggaaaataatactatagcctgacacaggtacctctattcatattgtttggggaggttgaatggttgggtatatttttagttatcacagtgattggggatggagggctaggtggctactagcctttaataggtggtgatgaggcatgctagacaagttttagtccctgggatagtaccacaccaggaagaactattctacattctgtatggcctcgaatgtcctgttggacattcatgtaggagaaaaatatgtttctaatgatccggccttaggatatgtcaataaaaggttttttacttaaatggttttaagtatcagtgagttttctaggactgtaactaccatgtaaatcgagagaagattatactttgttttgtttgcaaatttactaaaagttgtttactatttcaaagtatcacatccaagaaagcagcgctcatgctcccgcatcaccatttcaataccgctgtatctgtccacactcgaaccttgctttcagcatgattctcctttaggtacaagcaagtgtctgactaacctgagcatttatgtaatgaaaatcattttaattttatttcccctttgtgatatttagggcattatatggattattttgaattttatatttaggcagttatattgttgatggatttcactgtaggataataaagaaggcattgcaaaatgttacgaaaaggtatttttgcccttaaagagttgagaattgctgttttaaagcgatggttcctaagcatcagggcacattagattgtcctgtagaagttttggaaatgatcattgtgaacctgccctagaaatactaatttagtagttctctaggaaattctagaaactccatgaaacttttttttttttgtgattgttttttttttttttaatttatttatttttttattatactttaagttttagggtacatgtgcacattgtgcaggttagttacacatgtatacatgtgccgtgctggtgcgctgcacccactaactcgtcatctagcattaggtatatctcccaatgctatccctcccccctccccccaccccaccacagtccccagagtgtgatgttccccttcctgtgtccatgtgatctcattgttcaattcccatctatgagtgagaatatgcggtgtttggttttttattattgcgatagtttactgagaatgatgatttccaatttcatccatgtccctacaaatggcgcacatagaaaattacactctttgtattgcgcagggaagtgaaggaaagcagtggtcttgggctgcaggtgacagtttctggggatcctggccgccccagtcctgccccgccccaccttgcaagccaacgatctgtttccaccttggatgctttccatgcttgttaaaaattcagattcttgaacctcactccagtaattctgattctgtttgactcagaaatctagtattgaatgagctctcggatgatcccgattcaggtagtccttggatggctgcttgagcaatcctgttctcacgggtcaggggcaataactgtgtggtgtgtgaaaaagaaagagaaaaaggaaaggtggggctcctttctaagggtgtgtgaggtaatgctaagagatttctgagataaagcagagatacgaaactccttcctggctggcgtttctctatcaaggagtacagtcagcttgtttgaaagggtagaacaaacactgctagaagaagctgaagccccggaagagatcacctggctccttttgtatgaatttaaactctgaggcataatatcctaagaaactgagcatatttgcaggtaaattatatatccactctagatattctttgaaaatcatgaagatagggactagtgcttaaaaaaaagaatccaagaggcaaaaccttaatctgtagaaaggagaattaaggaaattgtagagcctggtgagtttcagggcggtctttagccaagctttagaggattattaaaaatattgcaagaccagatagtcttccccgggtctgaactggcacttatgaatgacgactgaatggtgggaaccagggaaaggggcacggtacaggtacagtgccctccctccacgtagaagaccaaaaaggtggggtgagaggctttgagggtggtggaagtttgacaggttggtggaactggaagctgtgttgcatagctggaaacccacacattattcacattttctgaatggatgttattggaacacagttggagaaatgctgatgtactgggaacaggcctgggcaaagaatcaagaggcctagttttttgtttattagtatgtcaagtaccagatgctaaaaacttccttcagtacattcctggaagtatttactttttcaacacgcattcagtgaatacctgtagttgctgggctagaggtagaaatatgaagcctacagcctgactgtgaagtctggttggagaaacaggcaagtaataacatgattctgacacaggatgatacctgctacagtagaggtaagaacagaggctttgggaggctgtgaatttgtacctcagtcaggatggagagaaggcttcttggaagaggtgacatctgagatctgagcagagtttttgaagataatttagaacgggtgctgggaagaaagatgttttgacagtggcagaagcacatataaagctgtggtgttgtgcagaccatggcttggtcagagcagctggtgtcaagagggagcaatgaactagaagacttcaggtgggcagggactaggttatgaatggtcttacgtgccatgctaaagcatgctgtaagtgtgtattttattaattttttaaaaaaataatggattgattctccacatttagggtttaggaaatcagtctggaaatcattctggaagtaggaaatctagagatagattgtggttttggagaggtgagattggaggcagtgaaccttgttaggatacataaatacataaacacacacgcccacctgcccacacccacacaccggtggcttagacaaaataaaagttctcttccatgaaaggaatccagatagatgattcacagcttgtatgttggttccacggtgttgcaggtcctggctactttgggctagttggtctgccatccttggagattttctcatcttctgatgtgtttgcttgagctccacgttcctgagagcaggaatgcaaggggcagggttgggggtgggaaatcgcaagagcaaaggggcatgcactagctgtaataaaaggatatggtaagtctttaacatccttgataggttcttggaaactgcgacttcaagcgaaacatataggatgtgtaacaaaactaattatgttatcaatataacaaaacagtgttatttgaggacttgctgtaggtcgttttgcttaaagtcttggtttccaagaactaatctgcaatgttgagtgaggacttgcttttattttggagaaattgccacggaagacttctagttagagctcattgcccctgtgtcgtgccatgatcacttttagctgtaagagaaaggctgaaaatacagtatttattcagcggccgtgtgcctagctaaaaatggaggggttctatcagtaagggaagaggagaaatggatagtggggtaaaccatctccatctctgcctgaaagtagtgcaggaatgcgagggacacataatgaagacctgaactgaggcagtggagatacagaagacgagacatactgcagggattgctgatattggttactgatatgatacgggaagaaaagaaggtgaaggcattgagggtagtttctgctttgggcagctgggtggatgggagggaggatttgggggtaaggtggaagaatgctgacactttgggacatgttgcgtaggagatgcccatggcacattcagatgcagatattcagtgggctggtgggtatcaggtctgggctagagggaagagattttatattatttaaaaagaaatgttaaagacttctctcccttatttccttttttttcatttccttcagctttattaagatataattgacaaaaattatatagatttatggcatacagtattatatcttcatacatatattcgttgtgatatgattaaattaaattaattaacatattctttaccttacatacttatttttttgtggtgggaacatttaagatctactcctttagcaattttcaagtgtgtgatacattattgattataggcaccatgctgtctgacagatctctagaatgtattcattccatctaactgaaattttgttccatttgaccaacacctcctcatcctcctccctgctgtagcccctggtaaccaccatcgtactctttgctactgtgtgctcaacattttaagattgtgcacgtaaataagatcgtgcagtatttgtcattctgtgcctgacttatttcacttagcataatgtcctctaggtttatccgttttgtcacaaatgatgggattttcttctttatttttaaggctgtatagtattctgtttgtgtgtgtgtgtgtgtgtgtgtgtgtgtatatatatatatatatatatatatatatatatatatatatatatatatatatcactttttttaaatccattcagcaatccatagacactgaggtcaatttcatatcttggctcttgtgaataaagctgcaaagaatatgggaatgcagatatctctttgacatgctaacttcatttcctttggctaaatacacagaaatgggattgctggatcatatggtagttctatttttacttttatttttattttttttgagtcggagtttcgctctttttgcccaggctggagtgcaatggcacgatctccgctcactgcaacctccgcctcctgggttcaagcgattctcctgccttagcctcccgagtagctgggattacaggcatgtgccacccatgcctggctaattttgtacttttagtagagacagggtttctccatgttggtcaggctggtctctaactcccaacctcaggtgattcctcctgccttggcctcccaaagtgctgggattagaggcgtgatccaccatgcctgccctatttttatttttttaaaggaacttccatacttttccaccaacagtgtacacagttccccttcttcccacatggctccagcatctggtactttatctttttgatattagccattctaacagattcgaggtgataccttatcgtggttttcatttgctttttctggatgatgattagtgacattcagcattttaaaatatatctgttggccatttgtatgtcttcttttgagacatgtctgtttcagtcctttgcccataggaggtttttaaattgggttatttgttttcttgctattgagttgtttgacaaataaaatgtatatatgtatttatatcttggatattttggatattaactgcttataagatacatgatttgccacgtatttactcacttctgttggtgtcttttcaccctgacaattgtttcctttgttgtgtgttagctttttagtttgatgcaatccaatttgtctgttttgcctttcattgcctgtgtttttggtgttatataccaaaaaatcatggcctagacgagtgtcaagaagccttttttcctatgttttattctagtagttttgtagttttgggtcatacatttaagtctttaatccatttgaggtgatttttgtatatgttgtgaaataagggtttaatttcattcttctgcatgtggatattccgttttcccagcactgttcattgatgttctttccccattgtgtgtccttgatacctttgtcaaagatcaattgactataaaagtaaggctttatttatgggcttcctattctgttccattggtttaggtctgtttttatgctagtaccatgctgttttggttaccatagtttcgtagtacattttgcagtcaagtaacgtgatgcctccagctttgttttgcaccagattggtttggttatttggggtctgttttggttctgtatgaattttagaattgttcttccatctccctgaaaaatgccattagaatatttataagtgttacattggatctgtagattgctttaggtaatagggacattttaacaattctttcaatccttgaacatgggatatctttccatttatttttgtcacttcaacttttttcattagtgttttatagttttcattgtataggtcattcactctcttggtcagatttattctgaagtattttactttttgtaggtgttacaaatgagattattttttgatatctttttttggatagtttgttattagtgtatagaattgctactggtttttgtatgctgattttgtatcctgcaaccttactgaatttattagttttaacattttttttggtggactctttaggatttctgtatataaaatcatgtcagttgcaaaaagagaccattttacttattccttttcaatttggctgccttttatttctttttcttgcttaattactgtggctaggagttctagtactgtgctgacagaagtggtgagagtgggcatccttgccttgtttctcaagagtgtgatgttagctgtgggcttgtcacatagggtctttattatgttgaggtacattccttctttacctgatttgttgaaaggtgttttttttttttttctttatcatgaaagggtgttgaattttctcaaatgctgtttatgagtctatggagatgatcttataatcccccatctggaagggaatgtgtgtaggcttgctattggagcctttgggcaggctggttcctggctcccctggggtttgcttagagcctggattttcaggttcaagtctggagcctgggtttactctgatgggcccggagcttgtgtctgttgagttgggcctagagcctgagtttgtgaggacaggcccagagcatggatctgcaggggccagcctggtgctgagatgggcttggtacctggatcaatagggttggggtaggagcctgagttcgcagtggctggcctggcattggggtgtgcttaaagcctgagtctgtagtggtagaggtaggatctttagtttgtggggaccatcctggtacctgggcctgtacgggcagtcctggatcctgagtccatgaaggccagcctggtgcttagaccctgggttcactgggggcaggcctagatccttagtccgctggcactggtcctgcctggagactgggtccctagggatgggcctgggtcctgggttcgtggcagcttgtgtggccccagggtctgctgaagcaggcctggatccttggttctgtagagcatgaggcccctgaggctggcctggctcctgggaggcctggagtctctatctgcaagggccagactggtttctgggtctgtgggtgcaggtctgaagcctttggccattggggcttagaagacattttggaagtgggtatgattgcccaggaatcatgtggaaaatgacaggaaatctgaagtttgcactctaaagaaaaaaaaaatgaacaggttgacaaagtagtatttaaaataaatttagaagaatcaacccgagatagagaagggaaactttaacagaaaaatatttggaaaacgagagagaggattttcaaaaggtggcagtagttgcagagacatgccatggatgagtccagtccaataaagactgaagcatctagcaattaggaggtaattgaatgcattgaaataggagaaggagagtgtgtgtgtgtgtgtgtgtgtgtgtgtgtgtgtgtgtttgtgtgtgtgtgtgtgtttataaagttgtttagattaaaccagattttttttttaatgatcacacaattattgaaattactcagggtagatggtggccgtttcttaagtagctctaggagtgtactctacatcccctgggtgccttgccactcagcagcccacttggggcttttgtcattgtgacagcatggtaactgtttctctcaagctaaaatttagggtgtatttcctgttgcatgaaaatgttttttgggaatagtgggtagatatttaatacagtggccatcatgaactagcttgaaatttgtgatgaagcaatagggtcccacctgtcactgttcactgctttctctgaacttcaacatcaggttgccaaagaggaggagggttctggtcgggactgaagcagccctggtcaggttgtggaactaggtgtggtgagtgagtgtcttcatttcttttaggagaatcctagccacagagatgataaacattaacaggcacaaaatgattttgagaagtggaccatcttttagattttcacctaattaaagatatctaaattaaagatttttaggttttccttcaaagaatatatatatttttttccttctgaaagcttagaaagaaatttaagtacaaaagttttattccttttaagaactcagttctgttaatagttagacaacactgccccctggtggactgaacctgcaacacttttcagtagcggttaacattgtgaagcgctgttcctgaaggatattcctgctagcagatttccttcagatttgtttcggagttaatactcttttgttctttctgcttaatttaatctggaggtttgtcaaaatcccagtggtgtacaaatattccctgttatatcttaatctcattatgacattatgaaataaggatctgggattttcatggcaaaaacttctcagatggacattttggtaggccccagaagacaagatgtgttaacaagaatatatgaaacctggtctagtgggttgatttttttcctcatgtataaatttttcaaaaccttctgaagaaatcattcttgttggagtcataataattgaaagactaatgtgaaaggtcccacttaacttggctgtttgtggacggatagtttttgagttgttgcatttgttttggtgtgtattaagttacggtgtaggctgacaaaatgtgtaagatatttttcttaatttggggtgttcaaacctgagttctctgcttcattgtgttcatgatgactagtgatgtgtgtggtggggggtagagtgtgtgtgtgtatctgtaggtgtatgtgtacatttatatatctatgtctatatatatatccctgagttatgaattataaaaaatgaaaatgctgtttggaaagcaaacataaagatttcattttctgttttatcacaccaaattgcagaagtgaacgctcttacatcattattatgcaacagacactctgctaggaactttttgtattattcttggaacctcagacagatcttctgatacagtttctcccctcacccccattttatagatgaggttcctgagactcactgaggcccagtaacttaactaagctcaggttacacagcaaggaagtcacgggtctgccatgcccagtcaagcatgacatcaaggctgtctctccaccatatcctgcagccttacaggaaattggagtgaagtgccactggctcccaagtgacagtgtgctaactttccttgaaagtaggctatacttctggctttgttcttaattgttagtattgaatacattatttaacttctctggctttatttttgttatttcagtctttaaaccaaagtctgtgtctgtgtctccctgtggtttgaggaaagaggggataatgctatgaaactgtgctcccacccccactctaccgaaaacactccctcttttatctgttttattggttgactgattgattgacatggcctcattctattgcccaggatggagtgcagtggcatgatcatagtttactgcagccaggaactcctgggctaatgcagtccttccaccccagcctcctgagtagctgggactacaggagtacaccaccatgcctggctaacttattttttttttttttatttttttgaattttatgtagagacagagtcttgctatgttacccagcctggcctggccttgaacttctgtttgttttattttttcgacttctgtgtcagataccatttgaaggcacaatttctttgttaaaataaaacaaaacaaaacttaaaccactaaactatatgatttttcccatctagctgaccatttctttatggatcttggcataccacaacagctttttgtatttttcctttggaagagaaagaggatatggcctggggcatcagacttttcttttttttttttttttttttttattatactctaagttttagggtacatgtgcacattgtgcaggttagttacatatgtatacatgtgccatgctggtgcgctgcacccactaatgtgtcatctagcattaggtatatctcccaatgctatccctcccccctcccccgaccccaccacagtccccagagtgtgatattccccttcctgtgtccatgtgatctcattgttcaattcccacctatgagtgagaatatgcggtgtttggttttttgttcttgcgatagtttactgagaatgatggtttccaatttcatccatgtccctacaaaggatatgaactcatcattttttatggctgcatagtattccatggtgtatatgtgccacattttcttaatccagtctatcattgttggacatttgagttggttccaagtctttgctattgtgaatagtgccgcaataaacatacgtgtgcatgtgtctttatagcagcatgatttatactcatttgggtatatacccagtaatgggatggagacttttcaatacaagttcctttccattgggagcatttgggtgccaatgacagggcattcagggaggggagcgaactcttcgtggggcagtcctctgtgtctcaggctgctgaaacatctaaattccttctctgttataattgggcaccagcctgccactttttcctttcgctgtaacttccagcaaccaaagttaaagcccctgcctcccagcggagggaaattacaatgtcaggaatacgatagaagtaaaaacatataaaaacaaagaaacataaattacaatttctgtttacttaaaacattgtagaattaaagaagtttaaaaacaactacaggactggcatggtggctcacacctgtaatcccagcactttgggaggccaaggtgggcagatcacttgaggtcaggagtttgagactaggctggccaacatggtgaaactccatctctactaaaaatacaaaaattagccgggcatggtaacgtgagcctgtagtccgagctgctcacttgggaagctgaggcaggagaattgcttgagcccaggaggtggaggttgcagtgagccgagatcatgccactgcactccagcctgggtgacagggcaaggcttcctcttaaaaaataaaattaaaaataataataataagaagaagaaaaatacaaaatagccgagaagcaagaccaaatacccttttatccatagctaagttatctgtgcctttatgcaacaatattttgtgtgtgagtgcctataccgttcatatattgaagcatccagtcacagtttgttcatttggtaagacagtggtgttaatggggccacggtcaaaccttaagggagagataacgttcatttctgtacatcaggagctttgcaagctattttacagaaatatgtttgttggttttagggaaacccaagcaaattaatagggatggctcaatgcaatacccaactacactaggaaaaagcaacttagagtatttgcccttttgatgatgattgctaaatatctgaaatgtaattcctttagttacccttggaacaattgtcatagtgaactttgtcatagtaaactttgagttggttaaaatgagtagaattaaagtagactgagaccctgttttagttttctatttaaagtgaaaatgactagagactcttgttttgtgtgtggctgcaggtttcctagaatttgtcgggaactgagatttgtatagttttgattctcatatttagatagttttaaaaaggggagggcaggaaataatgacgtttaactaatttctgcacataattatggagtatttgctgtgtacccaatattgctagtcattgcttataaggagataatgaacttacaagcaagacaacattcatacgaggaaccattaaatagaagatgatacgtaattaagtgccaaatgattggtacgaatctcatgaacagatgacttgtttcatgctgaagatcctgcacagagacagacgtgctttcataaggagacagactgtttgagatgatcaggatcagaacgggaagtcagggatatgtggttatcatatggacaggaggggagaagcagtgcagggtgaaaggggtaatcagaggctttttccaggtatgctcatttgttctttgccttgaaaggtaagtattatttgaatacatggaaagcatggggagaatttggttctaaaaagacctgagactgagtacaggatgttgtggaggatagtagattattgactaagatggagaagtaaattaagatatgatcatggaagaccttaaatattaatccaaaaaatggtgatttaaagtgtatatttccaaaagtcttacttaattgcttaatttgggtgactgccctctttctggggggcctccactccaccttagaatttgcctctattgttgaaccaatcattcattctgaaaggcacaaatttatagatatttcttttgccaacagagatgaaactacatctggttatcttattggcatttggctatttttgaaattctatattaatttacctgttatcaattctgcattcatcagtttatctacatccatcaatatatgtatattctacagatagtttgattttaaccatttcacgttgcatacttaaaatttagaattttgtgatatattgctgtcattcttgtgtgccgagtgcaaaagattataaaaattaaatccagcttagcaatacatttaataaattcaacttattgaaaaaagtttaaatgaaaggaaattgaaatgcggcaactatgtatcattaatgttactgtttgttatttgtctgttgttgtattcacggggttgttactctgttggtacagtcatgtgctgcttaatgatgggtatatgttctgagaaataggtcatcaggcgatttcgcccttgtttgaacaccagagtgtacttgcagaaacctagattatatggtatatgagacacacctaggctatatggtatagcttattgctcctaggctctaatcctgtgcaacatgttgctgccttaatgcagtagacagttgtaacacaatggtaagtatttgtatgtcaaaacatatctaaacatttaaaaggtacaataaaaatgcaatagaaaagataaaaggccaggtgcagtggttcatgcctgtaatctgagaactttgggaggctaaggtgggaggatcactggaggccaggatttcaaagaccagcctgggcaacacagcgagacccccatctctacaaaataaaataaataaaatgaaacaatgaaaagacaaaaaattgtaccatcatatagggcatttaccatgcttggagcttacgggactggaagttgctctgagtgaatcggtgagtgaatatgaaggcctaggacatcactgtccactgttgtagactttatgaacaatcaacacttaggctacgctaaatttataaaaaatatttatctttcagtaacaaccttagattactgtaactattttactttgtaaacttttaactttttaaaacctttggactattttgtaatgatacttaaaatacatatacattgtacaactatgctaaaatattttccttattttcttattctataagcttttaataatgttttagtttttatattttctttttaagctttctgttgaaaatgaagacacagaaacacacattagcctggacctacccagggtcaggattttcacgatgtcactaggcaatgggagtgttttgcctccattgtaatcttacgtgtatgtatataattaggtatataatcttttgtatatgcagttagtcattgactgaaatgttcttatatggtgcatgactgtatttgtttttatttggaacttacttgtttttatttctaaatctgagttttaaatagacactacaattactttcttatgctaatttttcttagttcaatttattgttttaggatatgatactaccacttctgatttgaaggtatgaagtttagcaataagatcatatatattgtccctacaaaacctgtgtttgtgcccctcatatacatggcaggatcaccaggccatcagagccttcctagcaagtagtaacatgaaattgaaatctttaagtctttggtaatattcctgctctcccctcacccgtttgctcctaactatgaatttccccatttccaatgtttatgatcttcgacaccttctaatttgggtatgaattttaaaaacacggccacatcttattagtgcattgaaatttctttgaatgtcttgtgttaaaaggaaaatttattaggtgagttacagctgtgagtagctaatatgagaccctttcaggcagggtttcttaactttaggggatctggagcacccagatatttgatgaaaaattcgtataaatgtttatctgatattttttgtcaggagagggtctgtagctttctcaaggatgtctttctcaaagaaaaccacttttctgagacttaaagaacagaaaaatcagtgtattatatttttgccggtctttcagatacaactgttatcctagttcaatcacactaatatgatgtttactataaaataatctcttctaagtagttcagttactgaatatatattgttataattgtttttgcaaagcgtatctcattctagaaagatcaaagaaccaatttatactttgtttcttttttcatcttgaaaaatgatatatttactgtaaagagaccacttgctttaatcttagtaagtatagggagtggtaaaaattattttaggcctatattcgtgaattatttgtatgttaatatcatccagtaaaaaataatgaataccttttgacttcagaatactatgataggtatttaggatctagaaaatgtaagataaaaagtaagtagggaagacagtatgaaattatgaaaatataaggacgcatagaaaagtataggcaatatatgttttcagaataaaagaagaggccgggtgtggtggctcacgcctataatcccagcactttgggaggccgaggtgggtggatcacctgaggtcaggagttcgagaccagcctgaccaatatggtgaaaccccgtctattaaaaatacaaaaattatccgggaatggtggtgtgcacctgtagtcccagctactcaggtggctgagacaggagaattgcttgaacctgggaggtggaggttacagtgagctgagatcgcgccactgcactccagcctgggcaacagagcaagactccgtctcaaacaaaagaagaaaaggagaggagaagtcactgagagttggtgaggcatggagagcttcattgagagctcaggttatgaaagatgagtaggacaaaattagagagggggaaataatttaataagcaaaagtgcagaggtgatcatgtaacttaggggggatgctgagttgaccaatggagaggcagctttttgtaatggttaacagcttggattcttcatccagcttctagtcctggctataagctacttaaaacactctcgcctcagttttttaatttgcaaagctagtacctttcttataatttaatatggtatgtatttgctatattttaaaagaaaaacctaatacacagtgccagcaagatagcagtagggaaataaggtggggagttagtagccagattgcaaaagttcttgaataacaagttaaaggaaagattggcaaactatggcccttgggctaaatcctattcctctcttgtctttctagatcacattttattggaaaacagtcttatgttaatttactattgtctgtggttgttttggttgcaatggcaaagttgcgtgtttatgtagagaccttatggcccagaaaggttaaggtatttactgtctggtcctttacagaaaaaaatttgctgaccttgagtaaacaattacagctgtaacataattacagaagatgtacttaaaatttttattttgttttgttatttacttccaagatacaatggtagtacaggtattgggtacacattaccatttcaaaagggagagatcagccaaaagaaaggggtagtaggccccacacaagtctgaaacccagcagggaagacattaaaccttgaagttccaacatagtccttgacgccatgtcttgtatcctgggtacactggtacaaagggtgatccgctgaagccttgggcagccccatcttcatggctttcttgggcacagcctgggttggagtgcaatgcctgcagcttttctgaagttcagagtgcacactggcagtggctgtacaatcctggggtctataaggttgatccctcatgagtggcttggtgcctccctgaggtaatgagtagttctcactctgttagtttatataagacctagttgtttaaaagagcctagcacctccttctctctctcttgttccctctctcaccttgtgacatgcctgctatccctttgccatgtaccatgagtaaaagcttcctgaggtcctgaccagaagcaaatgctggcactatgcttcctgtacagcctgcagaactgtgagccaactaaacctcttttctttataaattactcagtttcgggtgttcctttatagcactgcaaaacagaatcatacacttccccaggcagaagtagagccacatcacctacccctctccccgccttcttgggctgagctgaagtggtgccctttctcctggggaaacagtactttggctactcggagaagtcacaccttccctcagcctaagttggagggtgccacatgtccccaaaacggtgccttggccccccagaaaggtcctatatcctagtacctaagctgaagcagcagcctgcatcctagggaaactgtgcctgggccatccagaacagtcaaggcccccaggcctgagctgaaggagcacattggtccctggggtatcagtgccctggctgagctaagtagctacacatccctgggctgaactgacatagcaccccatataacagggaagtagaacagtggcttagctgagacacactggcctatagaccaaacagctcttgtatcctgcttccgtggagctggtctaggccctagagtctgagctgttgggacacatctgttcttgaggaatggaatcatcaatgtgctatttcctgaccccacactcttcaccccaccatgctgcaaaaaacagctattctttgccattcccaggtacttgctgccactgcacctggcctcacagaggctcagatgctgacgatcactgccaacccagggtctagagtcactaccacaaggtgactcattccctgggacccgagttgccgttcgggtcaagttcccaaatcgcagtcataccttgcaccttgagcctaaaccttcagagtatcactttcctggagttgggtgagtgcttcactgtataccctaaaagtaaaatcacagctacaacctggccccctgagcctgagctgctagggagtagctctgagtcacagatcctggttccgggggcaacttacatccaatcctttcacagacagcaagttcgcactccaagatgcaggtgccacaggaggttcacaagattctgagcctaggaccctggccccacagccactccaagcaactcagtgctgttacagccacttgtaggccatgtcagacctgacacctagagaaatcccctcatctaagtctccccattgtgtggaaaatgagaataggaggactgaagacattagcagcctatgccactgtcaccactgccacgaacatctacaacatacgccactgaggcacccacagttattgctgacattgaatgcagatgaagagtctgcacagagactctactactgcacctgtctggaaacagttaccacattctttccaaccagcacagtaaaaccctactgaaggtcaaagtctttctgtacaaaagccagtctagtaagtttggaagaggctaccgttccaccagacatcaacacacagatatctgccacacagacatcaacacagggagacaagacatgaaaaggcaaggaaatatgacaccactaaagaaacataataactctgtaataacagacctcagtgaaaaagaattcaatgacttggtggaatatgaattcaaagtaataattttatggtaactcagtgaaaaacagaaaagagagacaatttaatgaagtcaggaaaacaattcaccatgtgaatgagaaattcagcaaagagagagaaattataaaaaagaattaaataaaaatcctgtatttgaagaattcaatcagtgaaataaaaaaatacagcagagaccttcaatagaagacttgatcaagcgtaagaatctctgaagtgaagaaagcctataagacttgtgggacaccattaagtaaataaatatttgtgttatgggatttgcagaaggaaaacagaaagaaaaaagcatagaaagcatatttaatgaaataataactgaaaacttcccaagtttggggagagatatggacatctagagccaggaatctcaaaagtctccaaataaattccacccaaaaaggtctttttttttcttttttcttttttgcctgaggcacatttatgtcaaattgacacaagtcaaggacaaagaggaaattctaaaaacagaaaaagaggagagtcaaatcacatctaagggactctccattagactaatagcacatttctctgcagaaaccttacaggctaggagagaatgggctgatacatagtcaaagagctgaaagagaaatactgccagccaggaatactatgcccagcaaagctatcctttagagatgagggagaaataaagtatttcccagacaaacaaaaactgagagaattcattaccactaggccaaccttacaaaaagtgctcaagggagtcctgcatctggaagtgaaaagatgaaaatcactatcatgaaaacaggcaaaattataaaactcactggtggagcagatacacaaaggagaaagaggaaagaatcaagacttaggctacagaaaaccaccaaactgcaatgatagaaaaagaggaagaaaggaacgaaaggaggaagaaaggaacaaaggatatacaaacaacttcaaaaacaaattaacaaaataacaagagtgtgttctcgcctatcaataatacccttgaatgtcaatggattaaattctccacttaaaagatatagactggctaaatggatgaaaaaacatgacccagctctatgctgcctacaagaaactcactttacctgttgactattaacaacacaggttttgacctgcacaggtccacttatattcaaatattttaaacaataaatatgttgtttaattttttgggagatttgcaacaatttgagaaaacttgcagacaaaccatgtagactagaaatactggaaaaatgaacaagagttgtgacatgaattcataaaatatatgtagatactagtttaatcatttattaccatgaaatagaaacacatctactttaaaaagttaaagtttatcaaaacttatatacaccagactgtacatggtgccatttgcagtcccgagaaatgtaaagaaacataaagatgcagtattaaatcataactgcatacaattaactgtagtacatactgtactatataataatgttgaagccacctgttgttgctattgcaatgagcttgagtgttgtatctgcttaaaacactgtgtgatgctaacagctccatgtgaaccattcatctgtccagtaaattatgtgttgtattaaaaagtgatctccatgttggtgcacacctgtagtctcagctacttgggaggctgaggtgtcaggatgtcttgagcccaggagtttgagctatgattgtgtcactgcattccagcttgagtgacagagcaagaccctgtctcccaaaaaaaaaaaaaaaaaaaaaaagagttgtctctcatggtttttgtgtatttttcatcatgtttagttcactactataaaccttaataacaccgtggaacccatacaaagtaccactagtgatgctggaagtgctcccaagaagcagggaaaattcatgatgttataagaagggtgaattgcttgatatgtaccaaatggattgaggtctgcagctgtggtcacctgccatttcaagataaaagaatccagcagtgtaagtaccgttgtaagaaaagaaaaggaaatttgttgtcactgcagctccctcagtaggcacaaaaccttgaacttttttatattgaaaatgtagctgttatgtggatgcaggatacctataagaaaatcatgcctatagactctacaatgatttaagaaaaaatgaggttagtgtatgacaacttaaagcaaaaggaaggtgttagatctaaacttggagaatgtaatgccagcaaaagatggttcgataattttagaaagagatttgccttaaaaaatgtcaagataacaggagaagcagcagacagccaagaagcagtagacaagttcccagacaccattaagaaaatcattgagaagaatggatatctgcctggcaggtttctttcttttttttcttgtagaaaaaaagtgccccctttctggaaaacagttccacaaaggacatttattagtaaggaagggaagtgagtacgaggatttaaggcaggaagggataggccaactgtattgttttatgcaaatacagttggatttatgatgaggaatgcccttgtctataaatttctaacccctgagccttgaatagaaaagataaacacagataccaatctttgggttatataacaagaagacctgaacaacaagaactcttctgctggattggttccatcagtgctttgtccctaagttcaggaagtaccttgccagtaagggactgccttttaaagttcttttgatataggacaatacccttagccacccagaactctatgagttcaacagtgaagacatcgaagtcatctgcttgcccccaaacacagtatctctaattcagcttctacatcagggggtcataaggaccattaaggctcactacacacagtgttttatggaaagaattgttagtgctatggaagagaaccctgacagaacatcatgaaagtctggaagattgcatcgttgaagattccattgttaaaggaaaagctgtgaaagccttgaaatctgaaacaataagttcttgctggagaaaactttatccagatgttgtgcaggacttcacaggatttacatttgagccaatcaagaaaatcatgacaagatattgtagatatgggaaaaaaggtatgaggggtggtgaggaaggatttcaagatgtagatatcagagaaattcaagagcaaataggtatcacaccagagaagttaacagaagatgaattgctggagatgagtgcttcaaaattagtgccagatgatgaggaaaaagacgtggaagaagcagttctagaaaacaaattgacatgagataatctggcagaatggttcccatgattccagactgtttttgacttcttttatgatgttgacccttctatcatatgggcactgaaactaaagcaaacagtggaagaaggattggtactgtatagaagaaacatttttggagaaatgaaaaagttaaaaagacagaaactatgattatgtctgtacatttacactgaatgtgcctgcctctcttgcttcctgttcttcttcctctaccttttctgcctctcccatccttgagatgaggacaactcctttctcctcctcttcagcttattcaatgagaaattgaggatgaagacctttatgatgattcatttccacttaatgaatagtaaatatattttctcttcttcatcattttcttagtaacattttcttttctctagtttattataaaaataaagtatataatacatacaacatgcaaaatatgtgtccattccctatttatattatcagtaagacttctagtcaatagtaggctaatatgttagtagctaagtttttggagagtcaaaagttatgtggattttcaactgcatggtggtggtgctcagtgcccctaaatcccatcttattcaaaggtcaactgtagactgaatgtgaaagtatggaaaaagacattccatgcaaacagaacccaaaagcaagcaaatgtagtcattcctatatcagataaaacagactttaagtaaactcatgtaaaaagagacaaagaaggtcattatacagtgataacaggatcaattcagcaagcagatataacacttataaacgtatatgtacctaatactggagcacccaggtaatcaaagcaaatattattagatttaaattgcacttaaacaggacagtaatagttgggcacttaaacacccctctaagcatcagatagatcatctatacagaaaacaaacaaagcaacattggatttaaactgcactttaatcaaactctcagcaagttaggtaagaaggaacatacctcgacacagtcaaagccgtatatgagaaaaccatagccaacattatactgaactggggaaagctgcaaacttttcctctagctctggaacaagacaagaatgaccactttctccattttttttcaggagtactagaagttttagccagataaatgatcttatataaataaaactatgaaagcttcaaaaaataaaaacctctgaactgaccgtctaattcagtaaagttgcaggatacaaaatcaacttagaaaaatcagtggtgtttctatataccaacattcaaatagcagaaaaagaaagtaagaaagcaattgcaggtacagtagctacaaaaagtaaaatacctagggaaaaatttaaccaaggaaatgaaatgtctctgcaaggaaaactataaaacactgatgtaagaaattgcagcaggcatatgcaaaaataaaaacacattgcattttcatgaattgggagaattaatatggtaaaaatggccatactacaaaaagcagtatactcattcagtgcattccctatcaaagtaccagtgtcattcatcacagaaatagaaaaaacagtcctaaaatttgcctagaaccacacaataccctggatagccaaagcaagaagaacaaagcttgagacatcacactaccggactccaaaatatactgcaaaaccatagtaaccaaatagcatagtactgtcataaaaacagatacacagaccaatggaacagaatatagaacccagaaaaataaatctcatctttatagccgactcattttcaacaaaggcaccaagaacattcactgggaaaaggacagtctcttcaataagcagacacatcacgtctcaaaagaagacatatagatggccaacaggtatatgaaaaaatactgaacatcagggaaatgcaaatcaaaaccataatgagatattatatcaacctagctagaatggctgttatcaaaaagacaaaacataggccgggcacggtggctcacgcctgtaatcccagcactttgggaggctcaggtgggcggatcacctgaggtcaggagttcgagaccagcctcaacatggagaaaccctgtctctactaaaaatacaaaattagccgagcatggtggtgcatgcctgtaatcccagctactcgggaggctgaggtaggagaattgcttgaacctgggaggcggaggttgtggtgagccgagatcatgccattgcactccagcctgggcaacaagagcaaaactctgtctcaaaacaaaacaaaacaaaaaaagacaaaacataaaaaaatgctagtgggattaagagaaaagggaaactcttacacattgtaggtgggaatgtaaattagtaaacccattaaggaggccaggcatggtggtgcacgcctgtaattccaacactttgggaggccgaggtgggcagatggcttgagctcaggagttcaagaccagcctgggcaatctggtgaaacctcatctctacaaaaaatacaaaaattagctgaggtggtggtgtgtgcctgtagtccctgctacttgggaggctgaggtgggagaatcacttgatcccagggggtcaaggctgcagcaagccaagattgcaccagtgcactgcagcctgaacgacagagcgagaccctgtctcaaaaataaaataaaagtatagccactaaggaaaaacagtatggaagttgctcaaaaactaaaaatagagctctcatattatgcagcaatcctaccacttggtatatatccagaaaaaaggaaatcagtatgttgaagatctatctgcactcccatgtttattgcaatactattcacaataaccaagaaggggaatctacctatgtgtccatcagcagatgaaagcataaagaaaatgtggtatatacacacaatagaatactcttttgcagtaacaaagaatgaaattctgttattcatggcaacatggatgagttagcttggggacattatgttaagtaaaataagccaggcataaaaagataaataccgcatgttctcacccatatgtggaagctaaaaaagttgatctcatagaagtagagtagaatagtggttactagaggcagggaagtgtggaggggaaggggagtaggtatagccaaaggttagttaacggatacaggatacaaaggtacagctagctaggatgaataagttctagtattctatagcaggactgggtgagtataatttacaaacatttattgtatattttcaaatagccgaaagagtggacttttaatgttttcaacacaaagaaatgataaatgtttaaggtgttagatatgctaattactgttctttgatcatatcacatcatatatgtgtgtggaaatacactgtatcttataaatatgtgcagttactatctgtaaactgagagtaataataaaaacccccaacacacaggtttcttttgtgcttttgtcagaaattaaaaaaggaaaagtgctataggaaaattaatctagcaaacttgcttagagtggattggaagatatgaaccagtgttgaggagggagacttgttagggttggcatttaattccaaaacgaattgtatgcactgtagacaagagatgctgataggaatataaatgcgtaaatgcatgagactttcagaaagtcatgatagtcttggtgactgtagatagggggagatatgatgactctgaagtttggcagtaaagtgacaggagatgttaatgatgcatctgaaataggaattctccaccatgagctagtttttcagggaaggcaatcactttggttttgacatgttaaatgtgtgacatggggcatctgccagacagttgggaattgttgactctttgctgtattctgcttctctggatatgcccaactttccaggggatgataggtgcagggggcacacagttcagagagcaggcttccttgattgccaagagcacatacaggatctcaggaaagtgagactctgtcctcagtgcaggattcctgttttccgttggtgtctttcaaagggtggggtggccttctgagataatgtagatatgtaacagcatggcctgtcactggcaatgacttgaccactgtctgtgagagatgcacaggacagagtacccaaaatctctcttgagagctttaacacttcatacaaaactcagatccttccctttcattcaaaacatgagatacttgtcccttccggatgtctcctcagaccttcccgcaaagtgagctaactagaccatgtgtgagcttctcctggttatggtttactttgtatttttttctcattacgttattatcatagggtgggagttccgattgtcaagacagatgcgaatgtagctttgagatggttaattctgcttggtaagatttcttttgtatttgcctttctttattcttggggttaaaagaatacaatctcatctacagttatcttgctttcatctctccttgttctgttacccagttcaagtttagactcctgcctcagatgtctgttctggctgattgacatagttgcttctgaatggactaaattactgacatcttttgcttttcctgtgtaatagtttctatttggtgattccttctcacacaacggaactgtgaggtagcctgaagcctaggggagatgtcaggtctggacacctgaaattatcatcatagagctatggaattattgatgtagagccttatatttagtcattttgaggttttcatgtgccgcttcatgtgacttctgtcattttaatcttacaaaaacccgtgaagtaagcatcttgtttgcctacagtgattgtttgaattaggttcaaaattaattgtacaaaagcctgggagtacaaatgtactttgtagtgagtacaaaaggctggaaaagaaaggcagaattactggcccaaatcacatggtaatgtagcaaaggctggttcccagcactggtagtaataacagctaattcttactgaatatttcctatgtgctgggcactgttttaagcaatttatatatattgactgacttagggtacatttgccaccgcaccggtgtgttgattggatgatagatattgcttccaagctcttgcattttgaaaggcagagaatgtgaaataagaagaacagcgggtgaaaaactaatccctgggccttcacctatcactaaaggggagtgggagaagtacaacaggccaaggaaatggagcagaatggcagccgtggcagaaccgcagctgggagagcatgttgcctgtgagccagtgagagagagggattctaaaagaaatcctttaccctgcctttcctttagttggccagactgtgctctgctcctgggcctgggcctggagttctgatcctgcttccctgccctctagcacatggatgtgctctgctcctgggcctgggcctggagttccgatcctgcttccctgccctctagcccaccgataccctcattcatccctacagagaggtggaatgatacatttcactttacttgatacttgagacgaaactagactgtttgaagaaaatcttatactgaaagaaagaaaaaataaataaaaagaaacggcttagagttacaaacctaatttaaccaaaggctagctggaaatcaactcgataagtacagtttatcgagcccttctggctggttcctgttgcccacttagatgccatttggatgcttagtgacttttctacttttagggagattcagttactcccagaacttgctcttgctttttctttggaggtatattatataaaccccctcaggtcagccccttaagcccatccctctgtttgcttcctgctcccatgctgaccccgcaccctgtgattctgattccatcccaggctcagtacatggcgaaagcagtttctcagctcaccatcaaagtgcttcttgcccagtacatgcaaccgtgttttatgccatcttgaccttgcaatttgatgctggtactttctggggttctcagtgacatggggatacaatagtgcacaaaacagatacatatcactgacttcttggacatttatttcatttgcatcagttgcactaatattttgattacattctgaatcatattatccagttgtcagtataagaatttacttaggggctgggcacggttgctcacatctgtaatcccagcactgtgggaggctgaagtggatggattatttgaggccggaagtttgagaccagcctggccaacatggtgaaaactcgtctctactaaaaatacaaaagttagccatacgtggtggtatatgcctgtaatcccagctacttgggaggctgaggtgtgagaatcgcttgaacctgagaggcagagattgcagtgagccaagatgacgccacggcactccagcctggatgacagagtgaggccctgtctcaaaaaaaaaaaaaaaagaaaattaggataatattggaaataactggaaatacccagactactcaacaatgactaaattgtattactgatgatacatcgtgtgttcattaaaaatgtttatggccaggtgcggtggctcacgcctgtaatcccagcactttgggaggctgaggcaggcagatcatgaggtcaggagatcgagaccatcctggctaacatggtgaaactccgtctttactaaaaatacaaaaaattagctgggtgtggtggcgggcgcctgtagtcccagctactcgggaggctgaggcaggagaatggcatgaacccaggaggcagagcttgcattgagccaagatagcaccactgcactccagcctgggcaacagagcgagactctgtctcaaaaaaaaaaaaaagtttatatggtttatattaatagaaaataaagtttgtgtgtgtgtgtgtgtgattgtaagtaagtgacagcaaacaatagggaaagaaagattaaaattctccaactgtgctagaaaaaaagtgcaaataatgtaaaagagtgactttgttctcttcggctcttctttatgttcacatgtgggctgccaactaaatgccccttttgtaaactttggtctgagggttgcttcttattcttttaactgtgtgttgggttaacttcctctatatgcttcaggttgcctaaactttctctatattcttcttttgtaaaaaggaatgaatactcaatatatcccaaagttagggtgaggatgtttttctcaaaaagataccagaagagagggagtggtcttacattaagttcttaaagtgttctgtattagggatcctcttttgattattttgattaacaaagaattctttggagaaaacatatgagcttgaaataactatagataatgtcagtttggaatgcttatggagatcactaaaacagggtaaaaagagggagaaaacaagttgaacacacatttagtaattctttctggggaagtgctctcggaggtgcaggtgttggatgttggataaaccagcttcttaaagatgacttttctaggtcatacatgcagtaagtgatgttcagatcactgctagtgaatggatactgtaggttaggatagaacttccatcacacatttaaaaaattgctgtatctcaaataacttagaactgaagatgcaagataaggagactgtagtcgtagcaaagatccttatgacaaattacacatgaaaatcttgaacaaaatcatttcctgaagtggaagcgaacgaaaacgcatttatttattgttttaatgtattatgtgattttatatatgcaaattaacataataaaatattataaggagccatttgattatttcatccatcctaaaaatttaaatattcaatatggccaataactttttgccccattggaatttatagagtacctaacagttacttagagttgccttatatttaggtatacctgatatctacctggtagggaggtttttaaggattaaatgaaacaattaattgggtgtgtgtgatgtagcaagcattatccatagtaagctctgggttaacagggactgacagagacctgctgtgagatctgcttcctgctcttttttgatctttcctttctatcacaggctgggttaggacacagaaactggtagagagtttcttagaaagtgacaggggaggcctgagaggtgaaaagcatcttgcttggtccctggaagacaggaatctcaaaatgttcattgtgactttctgccactcgaccccttttctctttgttccccctcccccacccttacccccagtgcagtttgcagcacagggaacacacatcacttctgtgctgagagggatcacactcagtaactcaagacaatgagcttagctactttgttcatctgtgaagtagctctaggacaattatagaggtttgcaggtgacttgtaattacctctttattacatgtaatgtttccagcatacaaaccttttatactgtatgtttcccaacgagcttaccgggagggtcgtatgtataccctttataagttaaatttcacttttgaggttttgttttcttttcaaaacagcgtattagagtacagagctctggcgtgactatcattattgacaggttttggcttttcacctctctcctctcggctcacttggatttatttcacataatatcttcttggaattctgattttctctctagattaagcttgaacatttagatgtacctggtaatggagacaacagactaaaatacaaaaactcaatttttataagccttaaattggcattgaatttttttttcaagatctaagaaccagactgaaaaagtattaaattgagctaggaaaactgatttcttgtttactggaacttgttcaatgaaggaaaagttactttacataaggaattattgttaccagttcctccagtaatcttattgtctcctacgtggatcccgtgctttaaaaaaaggtaacaataaaacagaggatgttatgataataaaactcgatatcatgcagtcagtcttgatttgtgaaaaagttgtatttctaaaaatcttatatcaggttgggcaataatagcttgcttgcctgtttatattactttatttgaaattttttagaaataacacattatatcaaataaaaatttattacctatagtttgtcatttccaaactaaactttggaaagcactagtgactttcgagtctggaaatacattgtgcatttgaaattttgttcctgataattagtgagtaatcatttgttcctcccaaaattttgttctaaaatttgtacatggggtttttaaaaattcaggtatggggagacatccagacatggaaatgactgttatgaaagaggtttatgcttacagatccttagacacaggaggctcagtacattgcacgggatcacagggaaacaccaggttgggatgggagccggagatgggagatgggggagcatggcccagagcctttattgtttgtttgtttgtttgttttttcagaagggaacgggcaagacagggtagccaagctgggtaagtttaagattggctagtttgaataattttggcaggctttgggctatagggatggcccccagttgtccaggacctgggcctgggtgatttaggatgggggaatattacctgctgtggctctggattggttggtttgtatatcacaggcacgctcgcacaggggtgttttctgtctctaggaattagccagcccagggaggaacagtctctccacagtcaaggccccaaatacgggagtatcaagaacacagataataagagaatataatcaatacaaacaaaacaaaacaattgaggagttgaagatggcactgctaagcaggtgctgtttttgtgcatgtttttaagagatggtgctgtaaaagactagagaacatgtaagtaatttatttctgagctttacgttttgaaatggtgttttagggggttagtcaaagtaagtgttaactaaagcctaatgcgatatgctatagacatttggaaaacttgaattcagtaacctgacccgtgtaaatttctcccccatgtgaagatggtgggtgggggtgggaggtctgtggtgggtaaggggtgctttcagctttgccccgctagcttatgggatgctcacaattcctcagggctgcttcacttccagctccatcttctgaattccaggcataaggaagagggagaacaaaagggcgcttaccactctttcctccccttggaaggagcggtcttagaaggcttgcccaacaaatccagcttacatctcatagggaattggtgattcacggactggttagtgcttgtatgaagccagcaaaggttgtcctttctgctgttgaaaccaactcaaaaaatagctcttctttgagaggattttgaaaagggaagaagtgggtagttttataaaaaatgtaattctactaaaagtcatagtgattatagtatcagtaataaaaccttgagcttttattctatactggttgctactctgagtgctttatgtatttctatgtacagttcatttagtcctcagaaaaccccattattattcccgtttttttttttcagatggaaattgaggctcacagaggttaaataacttgctcaaggtaacataattggaaagtgacggaatccagattaatagccgagattgtttgctttaaccacgtggttatactgatctgtaatttaaacatctctagctcagagataaggaagctaaagctggaaagttttaaggcattggcccaaggtcatgccggtagtcggcactgagcttctgtttctgggtgtatttccactaccctggtgctgtctctaggtgcacactctcatctatatcctcttatatttgggccaggcttcttgagaggtggatatttttggcttgcgatggttctgaatcctgaaaattatattctttctttagacttcttttacttggcaaggaatccccctggaggcactttagcttaggggtagggagggtggactttagaggcacattgcctgtgtttgaatcgtggttgtgccagcgttagccgtgtgatcttggacaagtcacacacctctcttgagttttagtagtttcatctataaaatgggttaatcatagtagccatcccacagggctgctggtagaaatagatgaattaatacaataaaactgcttagtatagtgcctggcacataagtaaatactttctatcctgcttatattattacttatcagaaacgttctccaaattaaactgaacacatttttcagcaccctgtttggcactcagtaaatgtatatggaatgaataaaagcaactgtgaagtggtttgtattgtcagcccatgcatcctcatactggttggaaatattagggttacagaagattggaatcttcatgttatttttaatatttgtattaatagccattatcactattaagtatcaataatattacaatatcttactcatcttctgctactttccacctcacttcacttttctcatgtataaacctattagtttttacatttggtgcttttatactgagactgtgttgaaagacattgtatacatacaaggtactgtaagtgatataaaagtttatggcttcatatttaaaaatggatgttactggttttgagtcttctcatgtcacatttccaagtaacagcaatcacccattaaatattaatttaatcacaggaacaagatacaatcgtcactaaaatgactttaaatggtagcatcactaagcagtgagataaggactggcaaagcaggatttgtgtcattctgtggcagcttttaaacaatgtgtttgcatttcccttgtccgttaaaataatacaagaattaaacccttttaaagagaacctacccatctctttcccatgtgtcattcttgcatcagagaaaatgctgcataatactaagatgacagccccacctctgatgtcacccaggatggtacaatcctctccaagcctttgctgggcttcctgctgctgcactgggggacatggttacattaaagctaactcccgtcatctcaattatctccttggaagtagttttcacaaatataaaaacgccctacggtggctgttttcggtaagctaccaaggtagagagcggcagaggcagacagggagagcaaacgggagaacaggctgcttccgcctttgtgagagggactgaggcagcagctcctctcggctcgggttccaagtgctcaaagtgcttccatttccatcaccgtgtgcagtgcagggcaaaaggggctgccaggaaatctgaaactaatttgcttccagttgactagaacagcatattttgaattagcttgcttctttttaagctaacttttctcaagcgttaaactgatgaactgggcattttctatgatcaatgggtaactgctggagctacagtaatctctgtgagtaacctctatttgtaggtctatgcaggcaaatatatttttatatatctatttcttttaaatgctgctgtgaaagtatccgtctgtattattgactgcttttgcttactagtcttgtctttcgagcgtcccagtaggagacccctggggctagaccaggttctgctgaatccagacatagaggagagcattttgcatttattcggggatgcccgcgccaaccattctttaattcccagtcatcagagagatgccggctgccctctgaatgcctatgcccagcacctcacctggctttacctggaatgttgatttcagcatgtgacattgagtttttcaaaatttttatttttatatagaaagcaaaatattattcttacctgtaatcttacttcttttcttttttttttccccacaagctttcctgggaacacacaattctgtcaccctatgtctgctccctgtttgtgatatattatatagacagaaagagagaaaacaggctacccctccagttttagaaagacataatgttgtagtgctggatgggaataggggaggagtttctcttaaagagctcaaactgctttccatctgtgtgcctgaagtacagcttagtatctgaatagccttgaagggaacaaggttagctcaaaggtagcaccaaaaatgttctggaaacacgctagttgaggctgagatagaatctttactggaagtttgtaacaggtatctcagtttacacacaaggatgtgtttttcctgtttgttaaaagtgtcgcttttatagtaattcaagatttatttctctctcaccatggaaactgactttcaactctctgcaaaatttgcatttctagatatacttgggacaattgtttatgtcagattgtagcctgaatccttagtgaaactgtgggtctcttattgagcatgaaaactactggctgcaaatgtggatcagctgagtcctgagtctgctacacactggaggctgagtgaggtggcgtgtttaccactgcacctaacatctgtcttcatagacagaagtttaaagaagtccacagctgtagttgatcatcactgtgaagaactccagctgcttggcattcatgattattttttaaaagaattgtatggttttttgaaacatcaaattcttaaatgtcccaatatttcctacatatatacgaaacagtttatattaatcttaccatatatgtgttaattttagcagaagaaagcttgctgtgagcgagactgtggggttatttaaaagtttagtttaaacttttttttgtcttttaaaaataaaattaaaactaaagagtcagtaaagagagaaattttacaattggatttttaaaagtatggattccccaacagaaaggatcgtagaaagtggacagaatggatgaaatcagaggggcatccctgatcagaaggtaaaaggctgaaaggagaagcacaagatgtggatataaaaaaccagaagttatgacaaagagaggcagacaagagtggagaaccccactggttgaaaaaggaaaccagctttgaaaaacggcaattttaaagatgagctcaaattcagctcttacagcttagtgtttcttctctgtaacaggtaacagtgctctgcacagttgcagagactacggtttaaaattaatgggctgttccctgtctcactcaagcttccctttggtatgctgtatgcggtgccactccttagctcacagagctgcctctgaaattgactgaatggtaaactagtatcatttctctagggattagagctgaataagaaaaattgggttctgaatcattagtatgtgaaatttagtttgccgtaagcacagctgtaactattaatcacttggggaaagagtgtccaattaatggaatattttctgttcgtgtgcacacgttagaagcttgtgtagtggttggcaggtcttttcctgtttttttttatttttttcctaacacataaacaacttaaatatctgtgcctttagcattatcagtgtccaggcaatagccagcatcctggattacataccgtagttttcttcaaaatgtgacttttcttagggtgaagagagtgtcttaaaatataatgtatttagattactcatttagtaattctcattactcatattcatttttccgttatttttatcataccaaatttattttctattgctgggcaaaatgggttagattatcctcttgttttattttaatacaaattttactattgcattgcaaatttgagtcatgtatcactgtgttgctggtgaagtttattgattattaaacgtaaaaatgttgataattattacagttaaggattatagttacttataaatgaaatgcatttgagattttttttttaactctgcaaggcttgctctttatatttgttttgtaaattaagcatttatcttccaatcttacagatttatgaaatttcacactaagggatcagagtggtcactctttttcctgccctcgtctttggaactgaattcctttctgacaagtgaggggaatgtgattttaagcttgcttctataaattttcaagtgttaaaatagcttactaatttatagttttcttgtactaacataatattaatatgttttaaggtgtttactaactggtattcattagggaacagagaacaccaaagatgttattgcatttatgaatatcacatgtagaaaggagggaaaacagattattagtggctgggttagccataatttataaaggattgaaaatccgatgaactatagtcataggaaatagattataagacccttagtgcattctccatagtatcttatcagactgaatttccccgtacatttctattttaaaagcaacgcatccaaagatatgaacattaaaaaccttgggaaaatattctggtttttaaaaattggaaagtccttacccttccctgagcccatttctttaagctccaaagtaatttttttaaggctgtgtacaaataataatatacaggttttgactaatggtcaagtttacatttgcagttattttaggatctttttgtgtaagtagagagtcattggccattcattgtgagagaaatttactatgagctgtaaaatcaagaaggggtcatattacagcagaggcaattctcttcctctcttggaaagggaccggggttacttggtaatttgagggtaaacccagaccagaatgatcaagtgtttctctttgcagtaatgagattgttttcttggaacttactttagttgatgtctatttgattgaacagttggacctctgagttaggaggcaggcagttatgatctcttttaaaataaaaaagtaggcattaaatgtaatcagaatgacttgtagatattgttgtagttttctggaggtgtgtttctcatcctgtaacgtgtatacaaatcctctgggattctcgttagaaaccaacaggattctgattgggaatgtctgaggtggtgcctgagagtctgaatttctaacaagcctccttggtgatatctatgctgctttctcaagaccacactgagtagaaaggctctagggcagcactttcaaatagagctttctgtgatgacggaaatgttctctgtgtatagacagatacagaaatatacaggtatctatacagacatacatactccactatacagatatatggatatctgtgtgtgtgtgcgtgcgtgtgtgtgtgtgtgtgtatatatatctacataagctatatatatgtatatatatatccatatatctgtatagtggagtatggtaggtattagctatatatggtatggagcactaaggaactacaatttcaattttattaaattttaagtaacttaaatgtaaatgtaaataggcttctgtggatatggctaccaaattggacaacacagtgttagagagaaatccattgagaaatttatacttaatggtatcagctcatgtaggatcatgctgaattctagaataggctgagattatctccactgaaatttaccactgcctgaactttgtttgcgagcagacagtatatatagatggagctgctggattgtaagctccttgatgacagaggccaagttgctcttgtttgttgcccttttctctgctgcttgatgcattcatggtccacaagaaatgttggctgagtaaatgagagaatgaactggctctaatatcaggaagcgccctactgtttcctgaatccttttcaagcctggacttagaagcaacgggtaggacttgggtgacactaacatatagtgttttgcttatgtttaaggaggctgcttttttgcttctgtcttaaggttttttgtttgtttgtttgtttgtttgttgagacagaatcttgctgtgttgtcccggctagagggcagtggcacaatcacagttcactgcagcctcaacctcccaggctcaagcagtcctctcacctcagcctcccaagtagctgggagcacaggcacacaccaccacacctggctaagtttttaaattttttgtagaggaggggtctccctgtttgcccaggatggtcttgaactcctgagctcaagtgaacctcctgcctcaagctcccaaagggttgggattacaggcgtgagccacctcatctggctttcaccttctattaattggtatcctattggttctgggacattcataattgattgcttcaacaaaaatacccattttgctaggtaaaattgttataggctctggagatataattgtaaagaaagcaaataaagttcttgccttttagagtttatatttttgtggcaacaaaacaatacaagacaaaacaaaaaccttttactaaaaaatggcatgactgatcccaggttctagaaaatatatgtgtgtagaatccgtaactgtggctctcctgaggaacctaggcatagatgtgactgccatatagtctggggaaacgtatgtcctgttgctgagaatcccgcatgaaaacggttttatctggttcaaatttcagcttacagtgaccgagtctacggtagatgtggcaaatagttcttatattttgtttttcttgaactattgtcttttcaggagtttgctagccagagtggaagaaaaccagtttgatttactgctcctcaaacaggataattcttagaaagaccctggtttttctgcagccgatcttatggaacaggcttattttctcacaatttgaagaaatttctttctatttcatttcattttattacagctctgtccctgtgttccagaaacagatgactacttaatatataacccaaagcactcctaaaattcatcttaacattcaaatgtatctcatttctttctcaatatactaaatcaaaagaaaaaaggtctttaaaaaatcagtgggtttatatgtcattgcaggaaaagcatctttgctaaacaacaggaaacacgatttgttaggaatctaaccagatacacaaagccgcagataaagtctctgatagaaaagtatgacttctaatggactgtaaatagatacctccaaaaagtacctgtatttcacatgaatgtgaaaactcttctctcttccctcctccacactctacactacattttcatttctttaaggggaaaaatacacgcagtaaagtatgaactctttattaattcacattctactagtgtgtggtttatatttaggtaagtgctaaagttctttttttatatttaacaagtccctgagtccctttgtcacacatacaagaccaaattcaggtaggactaattcaggaaggctcgctggaggggaaatgttttcagtggattcttacattagtaatagatgtagactgaaagggaaagtgttaacaagtttcaagtttggtgtaagagctcacagcagttggaagaagccatgttgaaactagaggggcctggggcagaggagatgaggagatgatgggcatggatgccggtccaagtagagtgtcgtgggagatgcagcaccccttgcatctttgttcctgtctattctgcctttgttctggctctagcactcaccgtctctcacctgtactattgtcagaagcctgcgtggttattcctgagtctatgcttgtgccctctctgctacacatccttcacattccaccaaggcgagctttctaacatgccaaacagacttttcatgttctggaaatactcagttttgaatcccctgtgtttagtacatagcaggtaatcaatatttgctgaatgcgtgaatgaattttggaaacaatgggcatttaataggaagtatctaaggccctattttacaagggagcagcttaaaaaatcttaaaacaataatttggtctttttttaaaaaaataattatcttagcatatagtcccaatttttaaacagaaggaataaatcagaaattctaaataaaaggtcaggattaacaacacagtcaagttgtgataaccaatgcaaacagcaaaaataaactgctcatggggtgtggcagagggtgccttatttgaaaggaaattcttgctgttatgctgaatccttagggacatgataattaaggctgtttctacccagaagctacaactagaacacttctggttttattcttcattatatttgttaacattactgctcttagcaatgatggtcttggctaaatgcgttagttcacgccgtaatcccagcactttgggaggccaagggtgggaggatcacttgagcccaggagttcgagaccagtctgggcaacatagggaaaccccgtctctacaaaaaaataaaaataaaaaaattagccgggtgagatggcacatgcctgtggttccagctactccagaggctgaggctggaggatcacttaagcaccggaggaggctgagctgcagtgagctatgatggtgccactgcaccccagctgggtgtcagagtgagaccctatctcagaaaagaaaaaaaaagcaatgatgaatgatgatctctcacggttcagtgtccctgagtttctcccaggcttttactcctgagagacagaagactagaaatttagtcctgacttagagttctaaaacaatactttattgaacatcattttattgaccttggtcaggtcctttcgcctctcagaacatttgtctccccccgtctgttccagttcttagaacagtaaacacagaccacgagaaactactccagtatttaatagtaaagcaagcaatctgtcacgcagggctttgccttgccctgtctccctcttatctgacctcgttttctttgaccggttgccaagttgttatatcagacatcacaagcacttgcccacaattgttgaatttgctgcccctttctgagggacatttcaatgaaaactattaaaaatggggtgaaggaattatcagaattctctgaggccccttgatatcttttggtcacttctcttggggccagtgttcagttgtgtgtgcgtgtgtgtgtgtgtgtgtgtgtgtgtgtgtgtgtgtttgtgtgtgtgtgtttgtttgtttgttttttccagagggcagttgaaactgttaaagcaaagcgggctcccaagtgtctaagtttaacttttcttccctttgttgaatggatttcactgttatatgttttggtgcagtttataaatacagcttcagcagtcactatggtcaattttcttaaaacacttcatgatgggttaaacattattgcctttggaagctttaaggcgtgagtaacattatgcttatttgttttgtatatttacactatatataccataccgcaaaagtctttttgacatttatttatacagaggagaggacttttttcaagagttggtgagcaagggaaggcttaattaaggacaggggatttggtttaggtgttgaaatgtgaaaataatctgatttatgttgaaatgagaagaaaaagtatgtcaggtagagaaaggaagttgaacaaaggcaaaggagcgtgtgtatgtctatgcattcagaatgtatgtatgcttaagcttatttccagtgtgtattaggattagaacaaatcttttcagggtattcatgggctgcctcctacttcagtgtagaggcaatggtataacatgtgaaagggggttgacagagacttgattagaaagatggattgggattgtaaaggaagaagtaaagcttttatccacagatgacatgatctggtatgtagaatcctgaggaatctacaaatatgttattatatgctccaagttaagcaaggttgtaggatataagattcacatacagcaacaaattgaatttctatgcatggctactgaatgatctaaagaaatttgaaaagcaatatcaaaagaaatagaatcttaggggaataaattgaaaatctgtacatttaaaattataaaaaaaaatggctaaaagaaattaaagaagattaagtaagtgaaaagacagcccatggtcatggaacgaaagatgtaatagtaatactgttaagaagccagtactgtatagattcattgcagcccctatcaaaatcacagctttctgacgagttgattctaaaagtaatgggaaattcaaggggccaagagtgaccaaaacaacctgaaaaaggaagaacaaggttggaggagactcacacttccagatttcacttactgcaaagctacaatagtgaagacagtgttattctggcataaagataggcatctagccaggtgtggtgctacatgcctgtaatcctgacactggaaggctgaggcgggagggatcacttgagcctaggagttcaagaccagcctgggcaatgtagtgagaccctgtctcttaaaaaaaatgaaaaattgtccaggcatggtggtgcatgcgtatagccccagctactcggaagtctgaggtgggaggatcgcttgagtccaggaggtcaacactgcagtgaactgtgattgcaccaccgtactccagccagggcgacagagtgagatcctgtcaaaaagaaaaaaaaaaaaaaaagataggcatctagctcaatggacttgagagtccagaaataaacctttgcatatatattaatatatgtatatgtttgatttttgacatgggcaccaaggctttttgatgggtaaagaatagtcttttcaacagatagctctgggacaactggatatccacatacaaaataatgaagttggatttctacttcacatcatgtacgaaaatgaattgaaagtggatgagagagctaaatgtaatagcaaatactgcaaaactcttagaagacaacgtaaaagtaatctttgtgacgttggtttagacaatgatttgctacatatgatacaaaaagcacaagagaccaaaggaaaaacggataatttggatttcagcaaaagtaaaaacgtttgtgcttcagaagacactgtcaattaagtgaaaaatgaccactcacagaatggtagaaaacatttgcaaagtgtacatctaataaagaacttatgtccagaatatataaagaactcttagaactcagtaataaaaagacaaataattcagccatcaaatgggcatgtctctaaaaaagatgcacaaatggccaaaaaacacatgacaaggtgctcaacataattagtcattagggaaatgcaaatgagaatcacagtgagataccacttctaggatgtctgtaacaataaacagacaataatagaatcttagacattgcttgtaggaatgtaaatagtgcatttgctttggaaaactgttcagcagtttcttaaaatattagacataggtttactatatgatccagaaatttcactcctaggtatatatagaagagaataacaaatatatttaggccagatgcggtggttcatgtctgtaatgccagcgctttaggaggccgaggcaggcgtatcctttgagcccaggagttcaagactagcctgggcaacatggtggaaccccatctctgccaaaagaaaaaaaaagaaaaattagctgggcatggtggtgcatgcctgtgcctatagtcccagctactcaggaggctgaggtgggagaatggcttgagcccaggaggtcagggctgcagtgagccatgatcgtcccactgcactccagcctgggtgacagagtgagaccctgtctcaaaaaaaggaagaaaagaaaaaatgtatttagaccctgaaacttatatacacattttttattcatagcagccaacaagttgaaacaactccaatatctcatcaactgatgaatggccaaagaaaagactgctcccgtatgatgaaacattatttggcaataataaagaatgaagttctcagccaggctcagtggcgcatacctgtagtccagctacttgggaggctgaactgggaggtttgcttgagatcaggagtttgagaccagcctgggaaccatagagagaccctgtctctctttacatgtaaaaaataataaaataaaaggaatgaagttttgatagatgatatgacatgagtacacctgacaaccttgtgccaggtgaaagaagtcagaccccaaatgccatatattgtatgattgcatttatatgaagtgtccaggatagaccatttcatagagatagaaagtatattggtagttaccaggggctgagaaaagctgaaatggggattggctgcttatggatacagggtttctttttgggagtgataaaaatgttctggaatggccaggcgccatggctcacgcctgtaatcccagcactttgggaggcctaggcgggcggatcacaaggtcaggagatcgagaccatcctggctaacactgtgaaaccccgtctctactaaaaaaatacaaaaaattagccaggcatggtgatgggcacctgtatcccagctcctcgggaggctgaggcaggagaatggcgtgtatccaggaggcggagcttgcagtgagccgagatcgcgccactgcactccagcctgggtgacggagcaagactccatctcaaaaaaaaaaaaagttctagaattagatagtggtgatagttgtacagttttgtgaatatactaaaaatgcctgaatcttaaaaggtggaaccatgaaaagacctactgccttctttactgaaagacataaaatatcaatattccaccctaggaagaaggctctttattgtttttagctatcatctttttcaattcattgtttgaaaagtcacttcctcttcagatgtaagcaagctacattttattagttctgtcttgtagaaggtgttataaatactatcccagagaagtgcttgttagattccatcaacacttgattcagatttaattttaagaatatatttcaggccaggcatggtggctcatgtgtgtaatcccaaggtcaaggcgagaggatcatttgaggccaggagtttgaaaccagcctgggcaacacagtgagaccccatctctacaaaaagtaaaaacgttagctggacatgatggtgcatgcctgttgtggtcccagctacccgagaggctggagtgagaggatcacttgagccgaggagttcgaggctgcggtgagctatgttcgcactcccacactccagtctggatgatagagtaagatcctgtctttaaaaaagagaaaaaagtgtatatatttcaaattattttacaacatggaatatgaaacagcatgtactctcagaggtattgctatttaacacactgggggataccgtgtgttcaatagcaatacacctattattagtaattgtatcagtaattaataattatcagttattaggataactgatgtttccaagttaccttggaaatcaaatttttttttttttttttttttttgagatggagtcttgctctgtcacccaggctggactacaatggtgcaatctcggctcactgcaacctctgcctcccaggttcaaatgattctcgtgcctcagcctcccaagtagctgggattacaggcagaatcaagtcttttcagccatttcagtgtatatatatacacagacatttataaaatatttcactaaataggaaggttgtagctctgcagtagtttaaaaatggtaacaatggccaggtgcgatggctcatgactgtaatcccagcattttgggaggccgaggcaggtggatcacgaggtcaagacatcgagaccatcctggccaacatgatgaaaccccgtctctacttaaaacaaaaaacaaaaattagctgggcatggtggcacgcacctgtagtcccagctactctggagactggggcagaagaatcacttgaacccgggaggtagaggttgcagtgaaccgagatcgtaccactacactccagcctggaaacagagtgagactccatctcaataaataaataaaataaaataaaataaaataaaaatggtaacaactaatgtcctctttcataaagtaaaagtgagtacactgtatttccagcatagatgagggttttcatgatacaaagtaaccaaaactaagttcagaagaagactggatactagggctgataggactacagctgctatctgtaaacccccaattgaaagttttggtttgtcagaatgtccccattttcagttctcactggctatcattttaacaagaaaatattataaatttggttcaatatagtgaatatatactaatactgtttacttcgtgtattggggttcttcgtaagatgccattacaattttatgcaggtagtgatcttactaatatgtagaatctaaaatgttgagctcttggaagcagaaactagaatgatggttaccagggactggtgggtggtgggattggggaggtgctggtcaaaggatacaaaattgcagataggtaggaggaataaattcaggaggtctgttgtagaacatggtgactatagttaataacaatgtattgtatacttgaaaattgctagaagagtaagtagattttaaatgttttcactacacaccaaaaatttgaggtacagtactggtatgttgttaattagcttgatttagctagtctacaaaggtacgcatatattaaacattatgttgtatactatatatatataaactttatatatgtaaacatatatctagatatataaacaaacttttgtcaattgggaaaataaatgaataaaatgagaaaaatgaattttccgtagttgggttcctggaagtctttctcaacacactaagtttctcattccatgttggcttcattcttatttttcagggatgttttgaaagcattttttccctccacagaaacccaacaatgaaggggagacttctggcagaaaaaacatattgactgagtttaaatagatcataagcattttgcagaggctctgtctcggagcttgcactgcacagatactgttggctagatcatagggctctttagtgttaagcccaatatacacattttagttgctgtttcatgagtggtatttggaagttggtacatatccttattgtaacccctttttgcatatgaagcaactgaggttctgaatcctcatgtatgggacatcagaagcaaagttaaatatggcaggtgtcattagattgccttctaggccgaaagttttgtggttatactcgcgtaggctgagtagaagggatcactgtagtgtcatgaggagtgtgtgttacagggtggtgggaggactgatataatgcaataatcaagttaataagtattattgagtgcctaatctgtgtgaatatgcattattacctactgggccctgtctttctacaacaagtcatatgtccattgtgttctcttcacaggtgatcatggaggaagcactttactcccaccaaatgtcacaaatgaatttccagaatatgggaccatggaggaaggtggagaaggcctaagggcttctctggaatttgatggtgaggctctgccatgccacccacaagagcagcagggtgtccagcctcttactggctgccactctgggctcgacagtgttacagaaggaccaaaagatgtcagagaggccccctctcaaagtcatctcaaggaacaaagtttacagcccattgactctttgatttcagctctgaaagccacagaagccagaatcatttccggaacattacaggctacaaaggtactggaccaagatgctgtttctagtttttcagttcagcaggtggaaaaagagctggacactgccagtcgtaaaacacagagagtcaacaaaacgctccctgctggccaaaaaaatttaccagaaatacctctttcagctgaagtaacaacggaggaaagtttttatttgagcatccagaaagatctcaccgcgctgttaactggagacactcaggcagagatttcccagataatgaataatgggaggaaaggggctgtctgtgtgcaggagccatcttgtcctttggcctccctcgggagctcagcagtgacctgccactctgcaggcagtgttggtttcttgaaagagcagaggtctgctcttgggagagagcacccagggggatgtgatcgaagcagctccatgggacgcccaggccgggtcaaacatgtggaatttcaaggagtggaaatactgtggacaggaggagacaagagagagacccagcatcctatagattttgagacatcactgcaaagaacagcctctcctgacagcaaagagtcttccaaagtgccacgccatctcatctcatcagctggtttgtgtaattcaagtagtttaactgagaatgtttgggatgaatcctggaaagctccttcagagaggcctggcactagctcggggacattttcccctgtgcgtcttgatgagagtggagaggatgaagtcttcctacaggaaaacaaacagcatcttgagaagacacctaaaccagagagagacagggaaaggtgagctcccatagtagccctgctgtctcagatgcctggtacatatcatagaaaactgttatcctgtacttgatatgagaactcaatcacaataccttgggttcttgttatcatggaatataagatgagttactgtgagctaggtccttctaagctaagattcctcctaagcttctcagatattaaagtgatcttgttataaagtcatccgttaggcatggaccagggaaacagagttctgaagagactgtgaacactaaactgtgaattcttttctgacattttcttaacatttgacagatttcaagtttcccaacgtcaaggtaactaacataccccacagtcatctttagtaatatgaaaaggtttggactcttttgacacaccctatatagctggtacttccaaccttggcatttcttctgggtataacaccaatgccttcagtccagccgacatacatgtatgaacacagaggttcttggcccactcaatttcctatgtttgtttgtttatttatttatacagagacagggtcttgttctgtcccccgggccggagtatggtggtgtgatcacggctcactgcggccttgaccttccaggctcaagagatcctcccacctcagccctctgagtagctgggactacaggtgtgcaccaccacacctggccaacttttgtactctttgtagagatggggtcccactttgttgcccaggctgtttcaaactcctcgcatcaagtgatcctcccaccttggcctccctaagtggtgggattacaggtgtgagccactgtgccgggcccttcctatgttttgaaatgacatctcagggggtcagaagtagattttataattcagttgttccctggtattcacatgggaatttcttcttctcacaagtagcatatattttgatttatggccttttttttttttgtaaattatactttaggttctggggtacatgtgcagaacgtgcaggtttgttacataagtatacatgtgccatggtggtttgctgcacccatcaacccgtcatctacattaggtatttctcctaatgccatccctcccttagcccccaacaccccgacagggcccggtgggtgatattcccctccctgtgcccatatgttctcattgtttaactcctacttatgagatttatggcctttatgattgaaacttgacatcatgtggtatttcctggtctttccctgcatttctgacatctacaccagcttagaccctggataaatggcagacgtgacccatctttctgcactccctttgatcgtagtcatttgttgtgtactgtacttctaattggtaccatcttttcttctgtcagccctcatgacaccacattttatagtttatacgggagagcatctgtgtcaaggccgagggttgttttttgtttttttgttcggtgtaaggaaatgccttttcctctgcagttaaaaaacccactgagagtggtgctcctttgggatcactggcaggatccttcccactcccctccccaacccatcagctctccagacttccctccaaagcggccttgatatgtggcatgtggcccagtgtttatattcccactggaatatgcacttttactgttgttcagattaataattcattcctcttttcttcccacaaatattttcaattgtctcctatgtcctgacactgcaagatgctgggcgtaaaggaatggtcaaaatagatgtggctcacggatactgtcctcatggaatttaccactgaagataaacattgatcacataaacatgctaataggtataggatcacaaagtgtgctaggttctgtgaaggaaagaacagagacctacaagaatgaataatttggatggagggaagaggccagtttagttgatggcttggacaaagcttttctgtggaaatggaaattacactgagacgtgaggaaggaaagagtttgccagccagagaaggggtaggaagaatgttccagctagagggaacagcatgtgcacaggaggctgctgagctccctgactagtgtgtgcttcctgcagatgtgtgaagccaaggcctgtgccaggcttgaagatttgaaactctccctgtgtggctaatgcctgaagagcaggggaggcttggcatggtggctcacacctgtaatcccagcactttgggaggccgaggcaggcagatcacccgaggtcaggagtttgagaccagcctggctaactccatctccaataaaaatacaaaattagccaggcgttgtgttacatgcctgtaatcccagctgcttgagagtctgaggcaggagagtcacttgaacctgggaggcggaggctgcagtgagccgagattgcaccaatgcaccccagcctaggtgatagagttagactgcatctcaaaaaaaaaaaaaaaaagcaggggagagtggggtgcagtgagtgtggagaggtagggaggagcatcatcttaggaacggtccagtttatgccaagtgcagtggaaagccattaagaacaagcatttggtcccatgggtgaccttcagtatttaaaaacaacaaaccaattgcaatgctgaatgtggattccagtaatacctgggaatgtggatgacttatgagatgcttaatagataattcctaattctatgttattcctatttgtaggaatctgaggctcagagaggttaagtaaagttgcttcaagtgatatagctagtaattgagacagccaaaattcagcttctggtttttctaactcttgacctcttgctcttagtagtgatctatctcccaagtttttaattttacttagttatcctaatgttcgtttttaatatttgtagaacatgctgcatattaattgttcacgtttgtgtgccaaagtgaatgccctaccctgtatgttgacttttgagctgtttctaatctctcaaagctttggttagccttgcttctgttgcctttttgttaggccgttaattggctatctaattttggacgtgaaatctctctgcagtgctgctctgttgtcagcagggggcagctcttggcttctgatgcagtcatctgcttgagagcatttggccttatttaaatcagaaagtattaatcaactgatgaaagtttggtgtatttttactgaaattttgccgtatcaagtttccatgatatatttatctgcttctgttataattaggaatgctggtagttgcaaataatctgaatgtgtacggtatatttggctaaaatgagaattgaatattttattcatatcttcattggaccagatgtattcacacattaggaaactagtttgaaactttattaaagtatttatagtgtcctagccacatgcatgccaagaatttttcaacctgattatatttcatagcttccttcccaaatatgttaagatataagtcaatgaatagaagagttagatcttcagaatgttgtcctttttatatggttgaagtgggagaaataaagacattaacctaatattggaattcttcactcttatttactttccaggatcagcgaacaagaggagcacgttaagggggaagatgaagacatccttgggcctggatatacggaggactccaccgacgtgtacagctcccagtttgaaaccattttggacaacacttctttatactacagtgcagagtccctggagacattatactcagagcctgatagctattttagctttgaaatgcccctcactccaatgatacaacagcgcattaaagaaggtggtcagttcttggagaggacatcagggggaggacatcaggatatcctgagtgtgtctgcagatggtggcatcgtgatgggctattctagtggcgtcaccaatgggctgaatgatgccagcgactccatctacacgaaaggcaccccggagattgctttctggggaaggtactcgtcccattctcattcatttcatgctggtggtttttgtaggatttcttttctgggaaatctgagtgtggaatatatatttaaatcatttggccaatttctgtggacataagcaaatgatgtgagtaaaaagtaatttgagttttagggcaggaaagacacaccttagtggtttgtcacattggcacactgtgatcattttagtctgtgggatttcctggatgactatatataaattggataccaaacaaatatttggggatgatgagtgaggttatcagctccgatgatggcagagacgtggtgctgtgaaacgaacactgagagatcgtagctttagtctggcactgagggtggttgaagacttcaagaagattgtttgattagctcagagattccttcattggaaattaaagtggtggactatacagtcagcaaagtctcttccagccctttgctctgagagttcctgttctgtcttcctgttcctgacgtgttgaaggaaggatccgattagacagatgcttgagagagctgatatcttggtctaggctccgtatttattttctctctctactttaggatttttaatctatctgggagataaaatgacaaattatgtacattgtatccaccatgcctgttatttggggattccgcgactatttatggattatccagcgtttcatttcttcatgctcgtcatcctcaggttatctacctgtgacaattttatgaattttgttttggtatatgtgtgtgtgtgtgtgtgtgtgtatgtatgtatgtttgtgtggagctggtgggaggtgttaaatggtgatcaactattttaaagctgtttaaagctgtattaaataataccagtgttttttgttaaaaaaaaaaaaagccagtattaatattacaggttttcaatggacctctctttttgagcagtctgccctgtgctgagcattttctataaccagtttgaaggtttatagttcattagatgagcaaattcaggattggctccttgtgacattgtagctatgcattttcttgtgaatatggattgtggatattggttgtcttactgggtcacagtgagaataaaaagaacaaggtgtcaaaaccacaagactttggtctgaagtacttgggcaagccacttacgttctctgaaactggatttatttatttgcgaaatggggttaatgatccagtgtgttgtgaggctgtgagatttaaagggttaatagagactaaagcacctcgcacaggacatggtacaaagcagagcctgggtaagtgtgtgcatatgaactggttgcctggttagtccacatctagacttcttgtatctctgagatcagagtgtctctcagtggaagagtactggcgaggaggcattcctgaaagcagtgtccccgtgaggcggtgctcctcagtggagggtgccaccttagtcctcccctttcaccttcgtctctgaggactgcaaattgtgataaaacgctgtaggaaaggtatgcagataattgcactgaaattcccactcagttttctagggtgagtggaagttgtttatattacagaccaaacatggtttggggagtggaagagttttgggctaagaggcttcactgcaaaagccacagggagtggttgtaagtgaagccgagagatgaacaccagtgaaggaactgggtgaaaggtttattaaatgtgcggcttgtgcacttagaacaggaggttgtcatcatttgggccagcatgggtgccagtcacgaggatggacagagttgggagagaatattagagtaggtcatagtattttagcatctcatatttagacagtggtattcttcaggccgtgttgagataaagtttcagctgtgtcacctgcattgtcaaaccaggagatcttgtctagtggtaaaggaccacgttctagtggtgagtgacaagcaccttggagacgcgccagcttgcctctccccgagtctgggcactcctactgtacaattcctgattggtggtcatcctaccatgtgctgagcactgccagtggcttggacagacaagcttggcaggactcccccattttgtgttatttgaggttggcatatgataataagtggttacaggtggaggaagctttattttgtgatgtatgtctctattcaaggttaaaaggtagggcaggtttaatgatcctaagaaattttaaggaaactgaaaaacccatatttttctttactcccttctaccttccttgctgatttggagaagttgtaaccaaagaagaattgtgttactattgtgggttagagaatgagaacattttactacttgaaggggcctcagatagcctttaaaaaaaaaaaaaaaaaaaaaaatatatatatatatatatatatatatatatatatatatatatatatatatatatatatatataacatagaatctgtattccagtttggtgggatatcttacccaaagccacgtggctgtcttgtgacagataccgtagtagaattcaagttgtctggctcctaggccggattcattcactgtgctaggtgttgggtcttttattttgttattcttcttttgatcggatttctctcatgccatgtgttgataaagccggaagtctgagatggtctgttttcaagaaactaagttctaaatgtagagctgcttgttgttgttgtcggtggtggtgtatgcattcaatttgaaggaaaatttaccaggtcaataatacacacgtttccacacatttttaaagcaatcagtgagctggccttttaaaatttcatctgcgttaaaacatccctctgccgaggcaaggaagtggacattgaggtattaagcctgtccttcagccaagcactgagggcccaagtgttagaattaaaggaaaaaaaatttcccattgtattaatatatttacaaaagaaaagtcataaataaaagcagtggccatgcctccattccatctgtgttcactcgcctctcctgcttccttgctagtggtgggggtctgagtacattgcataaagtgagctctgaggaaggcttaaaagaaaaggaataagactaatgaattctcccctgatcgcgcctccttgatatttggtagacatgaaccaaggaaattaaatattgattttaatgtataaagtgttagtcgctagcttgtaaaaaatattattactttagctagtctctgaacataattgtgtgtcatatgtggcccataggtttgatttatttagtaaacacatgatgcttcgttctcataatgagctatagggggaagaaaggaactattagtgttctaattttccgaataaggaaactgaggtacagagaggttgagtaacttgctaaaggtcacacagatggtaagtggcatactcagccctcgaacacaggcagtcagcctccagagcccgtgctcttactgagctatgctgaactggaccaagtggtaatgatttcatggtagatctagaacaagaccagatatcttcaacaaaacaaaaatgtatttgctttgctattgcctagatttacttaaatccttttctgtttcaagatctgtctttactttgtcattaaagattatttcagtggcggtattggacagtgattttttttttgagcacaggatgacactgttctcggctgaattgctcttttaaagaaaggtgcaagaggttgggaaggctgattgtggtgttgtagcacttagttccttctctcaggaatgccttccagtcttgggctcagccatcctttggcggccagagggacactgttcttccctgttactctctctactcaagtcaaagaagaaaatattccaaatctataatattctagtatgcagttgggaaagacagttttttttttgagtgcgtgtctatttgtctttaaaagtattaaatacctttgtgacatcaagcggctcactctgtgtaaggtgaaaagcctcttaaaatcctggaataaatctggatggactattagattgtcacaaacataattaagttttttgtcattactttcaatggcaatactgcaattacttttgcaccagcctaatgcattctcccaggtgcttgctctgcctgcctgttgatgagtgagccacatgtcagccggaaacagctcagcctctgcatggaacacaatatatcaatgaagaagcaaagaggagcatcccctccccatgtagcccagctacatggccctcaggctgaccgggggtcagcggtgctgtgtgaagtcctgtcacatggctccaaaattagaaaggataattagagacttacaattatacacgtttcaatgggttcctttgtgtctgagtgcttctcgctcgccggcttatcagcagatgaccacaacttcaatcagtaagttcttaaggcacaagtgttgtcactgtgaccattagctggatattgtccatttccattgaacttgggtttggacaggagaaaaagaaatagcaaataccgtgacatggcaggaacttcttttttggttctttggaatatatgaagctgctttttgaaataacctttgtagcgtgatgatctattttatatctaagcttccaagttttcctttcagatcttgctcgggatactaacgggtatggcagaacaggtgaattacatctgcgtgcagctgatctgcctgagggaagcgcttcagtctgtcttcagcccactctgaatttgatatttgtggggatttttttttttttttttgccttgctcttatttctttctcctccttctcaaatggaatgcagtgtttggaaattattctctttcttcctcagtttttctctatctgtattgtttgtccgcttaggaagaattcatgtgaaataagaagtagaaatttgttgaagtgcgatttgaaaaactgtttcaacatcccagtttaaacttgaagtcactttaatataatatataaatattaaaagaataatttaaaataatgtgacattagtgaagctggtgacagagaacaacattttcatgttgtgaaattggagagatctggctgcccacggagctccgggcttcttttctgccattggtgctgggaaggtctgctgccttgtggcttcatgagcctgttgctgttgctccagtaatctctttaatccttttcttttacattttaaatttgttcagtcaaaaaagaggttctcatttttctctttctggcttctttccaaagtagtgtaatggtgatttgattttttttttttaaaaaccacaaaggagttcctgctcagtgatgtgggttaggggctcttctaggtctcagagccatttattcctggtttcgaattgtttcactttctaggtgcgtatttttgaataaatacataaaatctgggaccctctgcaagcgtaaaatgaaatgaataatacctatctcgtaaaggaggaaggaggaggaaacgagattaatcagatggaacaaaaatcaagaaaagaaagtcaagtggcctaacaatgtccggtacccagtaggagctcattaaatacaaatgaataccaatgacagtagtaacccaaagaaaagttattctgccactcggccatggacagaagtcctgcatcggacccttactacggggcttccttagaaatcactttctgtctatgaagcacagtgcactgtggtaggtggaataaacctggagggttgagactgaagagaagaggtgaagccatcctcttttctggcagcttgttctcggggaggtcttttcattcgtggaacttctgattgcttattggtaagatggaaatagccttatcaaccaatgtgcagttttgtggtaagactttgctaagttctaatttgtggatatttattttaaacctatcatgggtgttgtagtagtctaagagtctaaggaataataagaaaatagataagaaatagcctggtaaaaagaaagatgcaaggatttgatgaatgtttgactctaggacacatggggctgagtcaaaatgattgtgagagttcaagcatgggtgactggctggagcaagaaaccctgcactggagttgggggaagcagcaggttggtaggaggacacctagtgtgatcagatataaagaggtcaaattggaggagagagagggttacttgtgaagtgctggtgggaatatgggactgaaggtcactggagagactttggagtcacccttttagatgtaagacttgcagctgtggttatgagagggctctcaagggtgaggagtgggctgaggatgggactgtgaggaggggctcacacaggagcacttgggttttgcttatgtgtccttctaatgccatctctgtagaaaatgtgccctgtaaggtcagtttcctggaagctcttctgtgtgttgtcccttctccagcagtgggtcgattgtcagggagcccaggatggaagctaagtgcactggtcattggttgttctttcagtgcccttcagacagcccttgccctggtggtcttgtgccctccctgtctgtttggtgcctcttttataaattagtgatgacttcaggaaatggtcctggatttcaaatagctattcctggagacattctaattctgtggtttaaaccttaaaacaaacaaaccaaagtaattccctggatattggtggctactggtgtgaagagcatggtgcggcgcctgttacttggatgagctttgatcaaagaatggcatcaaatgataacagacattggaggtataagtgattacaaggagaatcatagatctaaataaaaatggaatggtggttaatactttaattgatcgagatgatacagcaatatttttattcatatatcagtacaatatttaacttttaaaggaagtgatattcatcttagcagaggtctcttagcaccatatttgcaacattggatgttatccattgagccttgttttggggaggaaaaaagacaccaactttcttgagtaaattgttctctgaaggtgttttacacaggaatacaaatttgcctgaactcaaaagggtcttgtttacagtactttaatcttgtttttcacttcataagccctctgtaaactgaaatacagagctacaggcaaacctcattttattgcacttagctttattgctctttgaagatactctgttttttttttttattcaaattacagatttgtggtaaccctgcctcaaacaagtctgttggtgccatgtttccaataacaggtgctcactttttgtctctgtgtcacattttagtcattatctcaatatttcagactttttcattactgttatatctgttatggtgacctgtggtcccagatctttgatgttactattgtcattgttttggggccccataaaccatgcccatataacgtggcaaaccttatcaataagttttgtgtgttccgattgctccatgaaaccagctgttccccctctctctccctcttctcgggcctccctattgcctgagacacacaatattgagattatgccagttaataaccctgcaatgcctctaaatgttcaaatgaaaggaagaatctcatgtctctcactttaaataaaattctagaaaggattaaacttggtgagaaaggcatgttgaaagccagaatacgctgaaggctagacctcttgcaccaaacagccaagttgtgaatgcaatgaaaagttcttgaaggaaattaaaagtgctacttcatagaacacatgaataataaggaaaacaccttatttctgatatagagaaagttttaatggtctggatagaagatcaaatcagccacaacgtttccttaagccgaagccagagcaaggctctaactctcttcaattctctgaaagctgagacaggtgagggagctgcagccaaaaagctggaagctagccgagggtggtttatgaggtttaagaaaagaagctatctccgtaacataaaagtactagacgaagcagcaagtgctgatgtagaagctgcagtgagttatccagaagatctagctgggataattgataaagctagctacactaaacaacacattttcactgtaaaccaaatagccatctattggaaaaagatgctgtctaggactttcttagctagagagtacgaggcatcgccttttcttaaagcttgaaaggacaagctgacccttggtaggagctaatgcagctagtgacactaaattgaagttagtgctcattttcccttctcaaaatcctacggcccttcagaattatccttaaatctactctgcctgtgctctaggaatggaactacaaaggctagataacagcacatctgctgacagcatgatttactgactattttaagcccactattaagacctactgcttagaggcaaaaaaaaaaaaaaaaaggatttctttgaaaatactactgctactcattgacaagacgcctggtcacccgggagctctgatggagatgtacaagaagactgatgtagttctaatgcccgccaacacaatatccattctgcaaaccatggatcgaggagtaattttgactttgagcttttttggaaggaatatattgtgtaaagctgtagtcactatagatagtgattcctctgatggatctgggcaaagtcagttgaaaaccttctggaaaggattcaccattctagatgccattaagaacatttatgatttgtgggaggaggaggtcaagatatcaacatgaacaggaatttggaagatgttaattccaaccttcatgagtggctgagtggtttgaaacttccagtagattaaataactgcagatgtggtggaaatagcaggcgaacgagaagtggagccttaagatgtgactgaattgctacagtgtcatgataaaactttaataaatgaggagttgcttcttatgggtgaataaagaaagcggtttcttgaaatgaagtctactgctgatgaaaatgctgtgaacctcattgagatgactacaaaggatttggaatatttcataaacttaataaagcagtggcaaggtttgagaggattgactttaactttgaaaaaaaaaagttttgtggtgggtaaaagatgatcaagcagcctcacaggctacagagaaatattttgtgaaaagaagagtccattgatgcagcaaacttcatttttgtcttattttcagaagttgccacagccaccgcaaccttctgcaaccaccaccctgatcagtcagcagccatcaacattgaggcaagtccttccatcagcaaaaagattaggacttgctgagtactcagatgatcattagcattttttagcaataaagtttgtttttaaaggaaagtatgtacactgttgtttttagacaaaataccgttgcacactgagaaactacagcgtaaacctaactcttataggcaccagaaaatccagaaatttgtatcacttgctctattgtgatatttgctttattgcagcattctggaattgaaccagcaatatatccaaggtatgtctgtctattgaattggctcaagctgttagcagagccttcatttttagtacttgagacagacagtggtcatggtgcaagggaaggtaaataagtttctcatgaatgctaatgaggattaatattaatctctgtcctgtctaatgttagataaatgcttccattttgtaatccccatacctcatatgctgtttcttatgcctgtgcctgacgctctatttgcaggtattctactggtctctgaatctaaaattacaaaaggaaagccttaaaaatcacacacactgaactcctgagattttctgatgtttttactcaccatcttgccacccaacagcattcacttgggagcttattagaattgcagaatcctcagccccaccctgacctactacattagaatctgcattttaccaagaggtccaagtggtttacattcacgtggaagtttgcaaagcactggtctacaacggtggtccatggagcaaagcttgagtagtaaagctgtagcacagtagttctcaaacttgattgctcattagaatcatacagggagctctgtaagcttctcatctccagccttcaccgtcagagattctatttgttagagtggcacctggacatggatagctttaaaagcttccccggtgattctgatgcgcagcctaggttctcaacaccttgctactcccaggtgtgggcctcagactaacagacatcacctggacctggttagaaatgtgtctctcagataccaccctggacctgctcgagcaaaatttgcattttaacacattcccaggtgatccatgatcacgttgaagtttgggaagcgtttactggaagctgcttttgagaggcgtttactgcaagttgcttagaggcagaatacaaagttgagccagtccccgttctcagggggatgtgggcctgttaaaggtaactccgcttttggaggggaggattctcctaacagaggtttgggaaagtgagtgctcctggctgtgaacctggaaatgatttcttctgttgtcttaggtgtggtggtgatagggagtccctccaaactatatcagcagggattgattgattttcctgcttaggaaacgtatggttggtggcgaagagtgtgggttcttaagtcggagtgctttggttcaaattttagtcaattctctgtctaagtcatttactggcacataatcagtaatcatttactggcacttaatgagtactcaataaatgttggctattatcagtaataacagtgcttgaaatgcttgaaatgtctttaaaacctcttcaaagtcacccagtatgaatggactgtggtaaaatcgaattgacttgagatgttgtttttctgtaataataattctaagagccttcaattccttgactctgaggaggtttaatgatagtttcttttattgtctttataattactctatttagaagccccacctcaacgcaaacaaggtgacattttcttgtcaagagtaatattataaagtctttagtatagagaaaataagatgtattgaatagttactattgcgaagcaatcctaaaatttcattattcgtagttggcattcacttagcaactatttgaggattcagcacgtagtattaatagtgttatacttcgctacaggcctgtctcttctgttaggccgtggtcttctcaagttctacgttttgggactcagagaacccctggcatagtggccagcacatactgggcactcagtttttgttgaatgaagaacttaatgagcagctgctctatagtagatactaaggtgtctcccaaacaggcagatcagataacttcagaaataactctagtgcagagcccagagagccaggcttcatggttctgagttgggggttacttgcatcgtgggatgtcacggaggtccttgtgggggtgctgcattttgaggtgggctgtgaaggctgagttggctatgtgtaaagggttgtgggtggcgtggagcagggtgacatgccagagagaaggagctgaactatggcagaaggagcagcagctgcttggatttggggacttgagagtgaagggaattgttaacctctttgccccctgttctgttaattgtccagactgaacaggtgttgctgcactcaaagaggttgtagtcattatgcagttggctttctaaagcttctgtaacatttgaggcataccaaaaagtgtagacaataataaacacctgtgatctcatcatcccacttaggaaataaaagtatttcagatgaattgcaaactcctctcctctttatgcccccagatctcattcctctctttccttccctacgtagtgaagtaaccatgagctgctgatgtttatcattcctttagagatgtgcatctgtaatcattagacagtgtttcacacacttttcagcttcatatacaagctatcttgtttccttttgtgaaactggccattgtgtctgagttctttcatacatgcaggttgcctttgcctggcagtggtggctgctttttgaggacatacctgtatttctagattgtccctttctgtctttacccttttttcctcagtatttgaaattcattcttattgactcagccctagtttgatcagtttaattgctgtatagtattcattatgtgaacatactataacctatttttttcatttttctatttatgggcattttgactgtcatattatgtcaaacagcatggcgatgtgcacagaaccttcatgtggctttttgggaacacatggaagaacttctctagtctgggtatatatttaggaataaaattactgcatggtaagtataatcattttctggtaaaccagaacattcttgaaagggcatattacatgttcttcgagtgtataatttttatccacttctgtttagaaagtaatttttagtcttttaaatctccaggtcctcataatccccgtatcccaacaaaaatagcaggatccccaggaaaagcatggaaaagaaactgaagtgaggctggtctcctatccctgttagggctgacacacactctggcatccattggttaggtctggcggccacggcttccagtggatctcaactcctgctgtccctggtttctcggatgcctctgtggcagttgttgcctgtgtctgacagctgtgtgtgttgcctggccacttacgtgtctgaagcaggctttggacaaccaacaggacaataaatattttcacatccacgagcagaaaaaacaaaactagaaatgaaaatagaaaatcacaaattacatgagattaagtgtgaatttaatagagctaaattgtgtataatattaatgacttaaatctattttgttgtctatttcagtcaagtgtgaatttaacagagctaaattgtgtataatattaatgacttaaatctattttgttgtctatttcagtcatttctttaggaccaggctgtgtgtgctgtaggaaattgcagtctataaaatagttgttcaaaaaactttagtgctattaaaccaaatcagtggcaaagttactttgttttgaacgatgctggacaaatgtctcctttcccttaaacggcaaccactccaaataagcttagacagttgccttttctgactgctgtcagcttgccatctggctcttaaagagttaaactagaggtttgtgaggtcatgagtgacttcattgggtctggacttttgaagcaggtctcttggagggaagctgtgttgagagaggaggctgggaagagggggacgtcctccttcaacttctttcaagttcgtatccctgagcccctgagggatccagtggcattctgggagaatgtcactgcggagtcagtgtgtagcagtttgtacttgcaacagaagcagctttagaagtacattaaaagagcccttgcggaagatgaaagtttgctgagcagatggaatgggagaatgctcttcaattcctgacaaaattatgggcagactgtttgctgacgaaggtaactggaaattggtgtattgtctttgtctggtcctaggcagtgctggattatgtataattgtaattgtagaaacttccttggatttgaaaatagattatttcaaatgaaaagcattgtaaggagatcctaggaaagacttaggaaaatgatcatatgttaatttctaaataaggatgacaaatgaagagtatatttattacagggtctacaatgtttgggcaaaatgagatttttccctagtggagttgtgctgctctttgaggcgcttagacatagcttggtgttcctagactgcatgtgaactccagctaccctttgtgaaacttcatccaggctgtggaaggtcactaatttgagcttagtcatgtagtggggtccgtaatgactactgcacaaggctatcattcttattttggtatatcactgctctgaagggaaagttggctgtgctgttagtatggaaaggtgattcaccttagaattcaacgttttactgaaacttcaaagattaaccagttatctaatgaaaagggcatagggagttttttttttccccctggagctgagggaatttcagcctcacggtttctttctgggaaagtttctgttgtgatgttcaacaggcaggggataagtgaggtcaacgatgctaaagaaggggaattgagcctagtccgttgatattatgtccattttcaagatgcctgggattgaagaataattcctgaccatccagaacccagcaagaactccagggcttgatcttccagggtagtcaatgattataacaggtgtatttgtgggtatgcattggtaacattggcattgcttgccttgactatggattgtaagttcctatttccagtatttttataatgccatttgtctggctagcccatcagtataacaattttgcctcttctgtttggacattttgtttcataactttaataagaaatgacaaagagaatatttgagggaaaaaggccatgaaatatattttatgagagacataagcagagtggctctgagtctgacttaggagtcataggcccataggcttcagttttactccttacagtttggtctctagcaagttacttaaccacttctgaagctcagcttcttcgtgtatgaaataggaatgataatagtatctaacatgaggggtggtggctgtgaggattaactagtgtgtagtgcatgggaagcaattaccatagttccttctgctctaaaagagctcagtaaacattaatgatcattggctattatgacgtttaaattgtgcttccttatgtgaggcacgtgaggacttcgatgttagagcatgatggtgatgaatttgaagttgtgggcaagctcacactgtaaacacatcagggcttccttgtggccaggttccagggtagcacctctgttctcgtctcagtcagttgggcatctctcaaatgcagccttcagtggcaacgggggctgggagaggaaaatgggtagattaccgcaggtccatcagcactttgtgaaaacatctgtgtgctcatgtagtgtggagggcatgtcagtttcataaatatggggagcagcattgtgtacacatgtaccccataggcagcatgtgacccactcaagaaaggactgtcagaaactggccattgtgtctgggttctttcataggtgcaggttgcctttgcccagcagtggtggcagcttttttaggacttgtctgtattcctagattgtccctttctgtctttacactcgaggagttggtagctgtgcagctgtgtgaaagctgcttagcttctctgagtgcctggtctgagtttcctggtctatcacttgtagataatatttttattccatggttattgagattaaatgagataaagtatgtgaaaatgcctaaaagaattaagtactaaagacttttttttttcctgcctcaaaaatggctcaatttcttctgttaacagtcaagggaaatttttgtaaaatttgtaaataagaatcttgttatactttataaaggtcttacatttaattcagtgtttctaaagctcttgtttaaaactgttgtgtgattagtttacgtcacctgatgtcagtttctttttgccttcaccactttccagtgtagactgtcatccttatgggttttagattgaattttgatctagttttcaaagatattatgaaaggaatacaatgccaacggtaaaagttccattggtcccactctccagaaggaatctccactgtcagtttctagtctatcctcacaaggcagaatctgtgtagctctttgggagctgatttgaaactgccttgttgttgcagaagtacagatgtggtagggaaagttctgtcgggcttgccagctccctgtgcagctcggtccctccctgcaattccgtggcacagtgtctggaatgtctggagctcccttgatgggaaccgcctgcacagctgggttgtgtcaccaagagccgaatgtgcttgacaggtctagctccagccatgctgctgtgggacatgtgattaacccagagttcctgtaggagagcgaagagcttgcctcgtagcagagggctggtctgaatccactctggaatcctgtcctgaagtcctgaggagacagagcctgctttgggttccagctgggattttagtcattgtttagctggccggaggctgtggttcagttggccctttggtctattgttatatttggctttttgtcatgaatatctttgggtggaggtagagtagaaggtgctgaatatggagttggaagatgtaggctcaacttccggccttgttgtttaccagctatgactttgggtaagacttccttggtcctcagtttctttacttgcaagatgggactattgtgaggatgaaacaaaataactatgggaaagtgctagatggactgcagagtgctctgtggattttttggtttgtttatcttattggatgttcaaaggacagtggcttattcctcttacctgttgagatagactgaactgttgatgcttcgcaggccaaggaacagttgtagctgtctggtgttctggtgtccttgcactttgtctcgcttttgtggagatcttttgtcccctctgttcttgaatgctcctggtatgcataagaacctgtattcagaagggagggggggcaatagagtttctgtgcccagcatgttcttaaggaagccactcccttttgttgattcagctggtcctttattgaggccctgctttttagcaggggaacctctgttggtccaactctgctattgatggtgagacttgggaagagtcgcgtcctctcatgacccctcagtttgcccatctgcagagggggttgagctacaagacctttttgtgcatggggaggagagatagtgactatctttccttttctacttctcctttaccttgctgtattcaccgtcttactgggcaatttttgcctccttttaaataacttacgacaattgtcttagaaaacataggacaagtgagtaatgaggctgaacttctagctgagatgccatgttgacttctgagaactaaatgaatgaaaatctcttaagggtgacagggtgttaaggatgagtatcaaattgtcttgcctataatctgctgatcttgacatcgctttgttttgtaatcatccacagctgatcatctttgatcagggcttctgggtctcagatccattgttataggagctgtgagtacctgaaaggagccagggagaaaggatgtcatgacagctggtggctgaaatagagatgccaccatgagaagacatggagaatgaatatctttcagcgtgaggcaacaatccctttgggacaggggaggggcctttgccaggctatgtgggagatgtttgcattgctgtggttctggttttcaatgcttttcatccatcctggttttctcaagctctttattatctgtatgttgttgaacagagaagtacatctatcctgtgtggacattttagtctagctttcccatggcaagactgaattcctagatgacagtaataggataacatttgtatttcttcagtattttgctgctgaaaagataaacaagaagagttaaatctgtctctgcagctgattaaccagaaggctcattaatagctctagtggtgggaaacagtcactggctgctagaacttgtgcatctagcaagtcccttggggaactcatcgattggaccaagggttggagacccatggaagatgtgcttctggttgaaacagtttaccttagatataaggagaaaagtttaccttagacatgagggaagtcatagtttcaaaagacaaggtcagtcagtaagaggaaagaatccacctcagagattcattgcagaaggtcacttccaatagatggcatggctgatagtagatttgtaattactgtagcgcctccgaatgatatctggcctcatgggagcatgtagcctatgaatgctgttgccatagttgtgagtaggaggataatgccgatatttcaggtttctagaaatgtaaatgatacctagtatagacctcggccaacatgtaagaagaggcagatgaaaaatattgaagtgctgttagcataaaaatagcggaccattcagccgtagtttacatctcggctgatatgagcgactgaagagaaggcagttgaggtgtctgatgcatagtgcatggccaaaaatagtactgtaataatctagagggttagacaggcaccaagaagtgagccgaagtttcatcatatagaaatgatagatggtgtgggaagatcaatgaatgagtaattgtctgtgattggaattctctgttttagaccctttcatttgcaatgtaagtggaaattctgttgatttaggacttggcactttttactaaatccctttaccttgcataagttttctaacaagtagatgaatacctatttagttgccaggtgtataaatgctgcttcgggactggaggcagcgatatggccaacaggtgtagaagataaacctaagggtgatctaaggtgattttggccttggattttctgacatcttgacctttggaagcaaatctgtctcatcttgcattacagctttgaattcatcattgattgactttgtggaaattgcatagctgagcatttcttaaaagcttaaacatgagggaaccaagaagtatccgcttgaaatgtagccaaagaatggcagttgccacatttttgtatgacaataaacaacctagaccataatccccaccgtctctgcattccgccccaacctagggtgagtttactggtcattctgggactcctctgtgagcaacaagccagtgttttgatagtaatttctttctttaaaggagaaaaacatttttagtaacaacaaaaataggcacccaccactacacatacatacaagaatatttctagaagcacccctacatgagagagaacatacagcacttagatttgagccgcagtcttattaagcgtttaaaacttaatcaccactgctacaagctgcttctcagttgcatgcctggcttggctgcctctccatgggaggtggccatttcctgagtcagcagtatctcttcctgtggcacccagttcttcttgggaggtctcagggccatgcaaccaggggaccagctctggcaagaggctaagagatccatctgcagatgctaggttgcaggccaagggtggggttgccctacgcagtatgtattcagtatcaaaatccatgttttgttggctggggtagaagtcatatttatgttgtgttgcgttcagttttaggaaaacacatctgaagactgtctgatgtaactgtacaccaacatggttaaacagtgaatgccttcttttagagaaagttacttcactgtaaaggaagtaacaggatttagggatttttttttttaactctcgaaagcttgtgtatcttgtgatcagtagctagcctttttgtgttctgatgctgttcttttcacctgctttcttgatgacacgtgttccttcccctcttttctttctcttccctgcctttgcagtctgctttatcttcaacattctttgagttgtcatgggtctttttcttccctgaatatttaaccaggctcatgtctccccgattgtttctgcagcccacatcctatcttgctgattctcactagccattcatggaggaggactttaagttgttatgctgctatggccattgcacatccaaggccagcgtgactctgatcccagggtagccttgtgtttgcgggtgccacagagggtcaccagaaaagcattgtgctgggagtcaggagactttggctctggccccagctctgtttatatctaagttcttcatctctctctgaagctttcttttacttatctgaaaaattagatttggttaaataattcacatggtgtattccacctctgaaaactcattacttgacggtacgaaatcatactaattctggctccttagattagttatttgtgaccagttaggatcgtttattcaaaacaaattgaaaacaacgaggatactgggattggagcaggtagaatataccaaaaaagtagcaacagtgtgcatagcttgcccagtgattaaggcagagcaaggggagggagggagagagtgcttttggctggtttgcagtcttcctgggctgcctacacagcttgacgttttgcattgttctttcatggaagtaacatccactggttatcttcactctgagttgactgatgggagatatttactttgaaaccccaattgcaccttttccaggaagggaagcaccaggacagtaggagatcatactgcagtctcttttccttggctcaagtgactggttgatggtgcctcttctccatcccttttcagaggggcctggtttctcgcatgaaagcagaagtgtgcgcctcagcagcggaagtgaaaccagcatgtaagaggtgaaaggcagtgtcgaggccaaatcgggaatttcttgactcttgcttatccaggacatgggtattgtaggcacaaattgaggcgaatttttctccctttagagttaagggagcatgggattggcagggtggggcctggggttttcctggtacttcacatgagctctgtctttggctgtgtcacctacccgtttctgagctgacctcatctttaaaatgaggttgttgggccaagccaaacaatttagggttttttccagcaccaacctgccataatctgtaatttccctcttcatgagcaagacccctagagagatgtggcaagtgagggcaaagggagttgagaccagtcggttttgccggcgcctcccgtgcatcctgcaacttctatccaggcagaggccgtcttttaatttctgcacagcactaagtccaggttaccacaagatgtttgaaagttgattgttacttttggtcagtgtactgatttgttggcatttgttgatcatttgtcagcagtccgtgaccctctctgccaggaatacaacctcccagagacattcatggcttcctggtgtgagtttccccaggagtagcagtagaaccttcgaacccctgtaccttcacaaggaacatgtttccctgcagggcgtggtagaaactgttctatcgttagtttccgccccctacgtttctgttcatctgatttttcttcaaaagcctcaaggacattcgtagccccacagcctctgttaaatgttggcattcaggttgaagggcctacttgtgcccttgagccttggagtgaggtttagcagggaatatcactgtttctctagagaaatatttacctttgccttcttggtaatgatatcacaatcaaaacatttgtattgctactgatacggtcaaacacatgcgttaaatggcttattaagaatgttttttgatcatgagggaatctgcaaatctttcttctatctctctttcttttgcttccacagggtaactttatagtcaaattgataagcatttaatatacatcccatctctacaaagaataccagtctagtcactcccagagagtggaatgctttcgctaggctcataccattgatttaggcgaacagtattgagtggagattattacaaatgcatttaattattcatgctattggtcaagaaatataaaggatttcatttagatgtgtttattttcttccaaacagtaacttcagtattctttcccataaaatcctgagactaagtgaccagtttgagttcccttcttccgccatttattttaattttttttgtagaggtggggtcttgctatgttgttctggctggtctccaacgaccggcctcaaatgatcctcctgctttgccctctcaaagtgttgggattacaggtgcgagccaccacacccaccctcttctgctatttctaattgatgctgcagtaggcctgtgaaactcctgctgtcagcagcagggagggagaagagggagtgaaagaggtccagcggccctcatgggtgtggctgacactgcccacagtgttggtgggggccgccccagagcactctcagtgtggacgcacctgtcttccgaatgccgtgctatgcacctggaagtgacgagtgaaggactgatgagggagttgccaccctgcttatgtcagtaagtctgagaatgcagacaggaccatgtgagtgggacagtgcagccgccaaaggcctaggggaccccatccactccaggagacgcagggtttcttcagctcactactgagatgacagccgttcctctcgccatcctcttcaaagtcatatctatgatcaataccctttaactcataaattacctataatttatgctgccagcttcttggagtaacagaatctcaaatcagaatggtagtaatgaaatattctttttactttcaaagcaatattctaatagacaagataccatatttttacctcatgtttttcctttagaatatacttatcctcaagttaaaattttatcccctttacataacaagattttagaaaatctaggccagtttgaactcccatgacgtgctttgagccatccatggctgtacattcccagattttagtgcaaagcctttcccaccaatttggaatgaactgatcattgtaaccagctttgtatgaaacacttgtttcggatcccagcgctgtagtgatgtcattttctttatacccaaagtaaatgctatgcagagtagcttattctggaatttggctgtacgattcttctcttggttaaaatcttccatagcagaggagccctgctaagtgaacagtctctcttacacattggtttttgtgcttctaactaacttttctaataatcttatttttccctgagaaagcaatccatcctatttaatgtggagtaggggttgtggttggaaatgaaaacaaatccagtatgttctagtctgatttttttttcttttttagcatcagtgtgttttcagtagaagtgattcaatcttaatgtggtttgggctcaagggtagagaacaataagagctataaatatagtagacaagagggggatcatgtttagtcaagataaagtctactttaagttgtttccatgtaagaccttgaactaaaaagaggaaaggtgttagatctcctaggactcattattagagttttaaagtttctgatggaaggtataagtgtctatcttaaattatttatatattaatgaaatacaacagggaaaagatcaatttgtaaaaaatttcaccatctttagaattctcaggggacccaagggagaaggggaactttattttctttctttccatggtaccttcgtatttgaagactaattatcagaactcttggagtttttaatcctggggagatacagctcttagataattataggtaatttatgagttaaagggtattgatgggagtcttcccataattatgttaaaatttggaaccccatagagccagctgctggacatctgtcttgtgggaccagaactcaaaacccaatggacagaaccttgtgtagggttaaccttgtttttttaaatcaggatatttgtcttcatagcccagcttgcccatttcctgacagtattgccttgggtaaaaaaaaaaaaaaaaaaatagtctatcttataaagtggttatagaagacctacttcctggagatattgtcaggatcaattgagataatgcttgtgaagtgcttgacatggtacctggaaccagtaagtgcacaataaatattgtcaactgtcattcatcaccatcaccaccatcatcagtactggaatatacctctattttaccatgcttttgatattagttcccttaatcacaaagcccagattagcaacaaataacagtatggcacactcattacttctctacttctctattctttgtaccgtttttgatgcccttgggtcaggggtgttaggtgaggactgaaattgtatctcaaagctgttattagaagaggagaacgcattataaacccagaatacagagtgctctgaagtatctttccatggaggaggggttttcctaatacctcttatattacttcgttatatgaagggaaagggaagaaaatggagaaattaaaatattctttgaattttgctcagatgtttaggtatggtgattctaattcctcatgctgcaacttgtctacctagagcaataactctttttttttttttttgagacggagtctcgtgcgatctcggctcactgcaagctccgcctcccgggttcacgccattctcctgcctcagcctcccgaatagctgggactacaggcgcctgccaccgcacctggctaatttttttgtatttttagtagagatggggtttcaccgtggtagccaggatggtctcgatcgcctgacctcgtgatccgcccgtctcggcctcccaaagagagcaataactcttgctactgggttcctctaatactactgatggttttatgtttttattaacagctatagcaaaggcagcctttttgagtggcatattgactgtggaaaaaataacatggaaaatgaatttatctttataaaagaatgatatgaaaatgtatgggtttttgctcaaggaaagtccatgcctggttccatgtgttctggcaagagggaacttctgaggaaggcttcttctgtaccttaacattgcatgaggcttcatttaatcagtgcattcatccctgatagatgtttgtctaaaacctttgctgaagagctcttcttcactgaatattaatagtctgtatactagtaaagccatacaatttttttttttttagacggagtctcgctttgtcgcccaggctggagtgcggtggcgctatctcggctcactgcaaactccgcatcccgggttcacgccattctcctgcctcagcctcccgagtagctgggactacaggtgcctcccaccacgcccggctaattttttgtatttttagtagacacggggtttcaccgtgttagccaggatggtctcgatctcctgaccttgtgatccgcccgcctcggactccccgagtgctgggattacaggcgtgagccaccgcgcccggccaaagccatacaattttgtgagagctatttatcttaaattatccagattgctctcaaagagaaccaaaattgtttttcccatgtaaatcccttatgagagcatttttatgtcctacttctaagtagtctctacagcgcaaaagggttataaaatgccatgtagactttggaactgtgcagtcttcagctgccttgggtttatgggaattcacatagtgatgtcgcatagagtagctgtggctttggtctaagctgctctggctgtgggccaaatgctagttggtgtaatcctctgtcagcagatgccaggctcattatggacccagcagtaggtactttttgcttcttggtattccaagactttggaaatcctggttaacatgggaagatggtgaggtcttactgggtttttggccttggaaacagcagaggagagccatccactgcctttctgctcctgtgacacgtgggcagggtttctggcagctcttccttccctacctctccactggtctgaagtattgtttagaaatagagtaggttttatatcaaaagtctagttttttttaaagtctttaatgaagggattagggtctctttactagctaatgtgtttagattcattttgtcatcctcatgtgtttagggcttctcccccaggtggaatggtgtagaagaatctttctatgcctgtctttcagagacttcctgaagatggttcattcatgttagcgccagatggaggtctcttgaaaactcaaagaattttggctatcttcattatacttgagtcgcctaggcatgactggttgatactagctgggcacagaccagagaagcccacacattcaccagtgtcctgcctcttacccacttcaaacaatgcctgctcttccacatgagacctagagagccccgtctgctctctccatgctagtgagtgtttaaattcagtgtgtgtgtgtgtgtgtgtgtgtgtgtgtgtttaaatagcagacactcttaaaaataaagatttactaagaactttaagttttatcagctgtttgaaagtagagctgctttgttgagagcctgaatgggagctgctgagctccactctctgggcctccccagcactcccaaggtgctgtgttttagtgggctgccctcgctgagaatacacaacagactttttttccacgcagtgcctgagcatgcatgaatattggcatacacactagccagccataacaaacacagcagtctgctaagccatccaattagtgtggttactacctagctgccttaggcctgagttgtcaatgctggcagcaggcttagtaggtggtttgggttgtaaacttgatttttacccaactgaaatcatgggactttcttctgctttctatcctctacttaggttcttgttttagtacttttaaaatagagcatgatattctaataaccttaccaagtgtagtagactgtagtagaattttagaggggcaaggtgcattcatctatctcgagacacacacacacccagatgaatgtactgatctcgaggaagtaagacaacttgcccaatgtcacaccgttaatagtgaaattggaactagaattccctttatatattctgtattccagaatattatcatcatgtgcctctccaatctgactgctgtctgtgaatctgctgtcccacactggcctgacagacctctcccagagaggcaggataagctgtagttcagggtgtggtctctaaagtcagactgcctggatacacattccagctctgccactggcctgccgtgttatgggaaacctagcacctgtgctttgttttcctcatctgccaggtggacatactaataatacctacttcgcaggattgttgtgaagattaaatgtgttaatgcctgtaaacgtcttagaccaacctggaatatcggaagtgcttagtacacactaactatcgtttttgtctgaatgctttgaatgacagtggggacaaatgaaagctcatgatagatcccactgaaatgtttttctcagcttgagtagaccaactagggttcatttaaggacagcagaatgtctgtaccaaccctaccaacccccttcaggtcatctttgggaggccaacatgttcatcacaagtgtttgagacattttggtttaatgcaccccacacaacttccccacctattactcagagtgattgagggtttgaggcttagctgctgagaatgatgtgggggggacatttgcaggtgggtggtagttctcattaaactcttctggctttattcacttggcattcacattcctttgatttactgtggagtgattttgctcaagacctagagaacaacaggatcagcattaggattcttaaaggtccatggaatgactactttctactaagcacaagccagtattttgttcctccatgtaataatgtaagttattatgtagaattcaacagtttgtgggaggggagaagtttttatggaagggtggcactgtctgtctctgtgaatgatgtgggtgagataaccacaaagtattgctaagtaactaccacatttgtcagtccactgccatcgactgtgtgggaggcagggaagacacagtgtggagctaatttgtgtcatccctgtgtcatgggagagttatagccaagcccaagtgttgctttgcgtgatgagtaagatacttggaggagaactctgatcttacttgagttccacgtggagttgacttacagtggtgatgctggtggtgagtggtgtgttctataactactggagctgcaaaaccttctgaggaaacgtgtttttctctgggtgagtaaacctggttcctgcttacatttgcagaagtgtttctccttaaagtaggccgcctctgtgactgcccggaaccatcattccccttggctttgctgcagcaaacagactccacctttaaagagctgaggagttgtgggaggaaaagcaaatgggaggtgttctcatgtcgcaagagatgccagggaaattcacctttggacaatagatcttttacaaggcaaacttggccccactgtttttggtgtttatcctgtttcatgcttaagaaaatattttcctataaaaacatagaaacattcagctgagtttgtgtctaaaagttcgatggagaaaatttggacttgaaatgtctcttctgtccatgctctgtattggtaatgccagaaactgatgaactcaccacatttacacttgtaaatggtatgtctgtgctcaagttaggatcctgggaagcaattgcggctcttctgggtaagatgagctgcaagcagcctggctgtttgggagagagctcagtgcaggaagtagtgttggagctttagttccctttttaaaggcctctcccttctgcttgttttaaagttggttttgagttgtctgtcatcccatttgtatgataagccttttcctcaggcttttcatctataggatattcagagaccaattaagatgattgagaaacaaataagacctagtggcaaaaccttttgaaatgcagtttactagcttgtgagccactgaagtcttacttttttcttgaacattattattattattattattattattattattattattattattatttgagacggagtctcgctctgtcacccaggctggagtgcagtggcgctgtcgcggctcactgcaagctctgcctcccgggttcacgccattctcctgcctcagcctcccgaagtagctgggactacaggtgcccgccaccacgcccggctaattttttgtatttttagtagagatggggtttcaccatgtgaaccaggatggtcttgagctcctgacctcatgatccgcccgcctcggcctcccaaagtgctgggattacaggcatgagccaccacgctcagccggaacattatttttaaaaacagaactttggtttgcacatactcagttgccccaacttcatttatttatttttaaagaggacaggatacatttactgaataatatttacatttatgaagcgcagaaatgcttttgtaaagcagaagacacaaaggagggtcagacgatttcctttcatggaaacccgttttgttcactttccaagcatggtgaggcattgctgacctttaggtaatttttcgtacttaatgtttcttgatcacataaagccatcgctctacatgaaatcagaactgaagcgctactgtcattggcagaatattgttttagaaattaaaagtcccactcagggttgtaaggtgaatacagtatgagctgtgtcagatggcattatatgatttcacaaattattaatgagttaagccatatgattcatttgatcaatgagataacttaaaacctttcataattatgttctttagtagagaaattagggagctgtgtctgtacacgacaggtatttacaacagtcctctatcatttcatcccagagtgactctccccttacctactagccatctgcctgatagacaactggcatcttcaagatcaaacaaatcatgggtctgattgagattagtgaacagccatccttgttcttaattcaagtggagaattacttgaacatctcagagatgactagtgcttttatttttttaaatatgtttaaattttaattaaatatatagggacggggtcttgtcatcttgcccaggctggtttggaactcctgggctcaagtgattctcctgtttcagcctcccaaagtgctgagattacagacggagccaccatgcctggcctagagtacttttagagtttagtctcatttcagttactatctacatttatcatcttttgccagtgagtattaaaacatcaagaactaaatggtttgacctaaaacctccacttaatcccagttacctatgaggaatacactattagaacagagagcagaagcatgattagtttcttttagagccccctctgatttttattgaacttgctcctactcctcttgagcttggcgtatgcataggaatgtttattttacctgttttaagtgacgtttacttggaagcatttgagtagtttataaatacatggtgtcatagtattggcttgtgtcaggaagacttgcttaccacaaagcagtgaagtctcagtggagagctggcccctggtctacagagtgacccagagctgggtcatggctggttcaagagcgtctcacattcgctgtctatcttatactgtctggatcttgagtttttgcatgtgataagccatccactttttgggaatatatatgctgtctctgtcactgctatctgggattcagtttctagtttctgaccatagctcctcactcctaccttgtaggctcctagctcagtccctttctctccttctggatatttagttaaaagccttgccatcagatcaaaccggaaacaaaacttgatttgagcaaggtctgcatgtgtattaaaaaaaaaaaaaaacacgtaagaaacttgaattttttttagaagcaaagtacagtcagccctggtatctgtgagttccacatcgcattaaaccaactgtggatcaaaaatattgggcgggtcaggggaggatggttacctctgtcctaaacatgcacagacctttttttttcttgtcattatttcctaaacaaggcagaaaaacaattattgtcatagcatttgcattgtattcagtattatcagtaatctagagatgatttaaagtgtaccagacggtgtgtgtaggctatatgcaaatactacaccattttatataaaggtctggagcgtccataaattgtggtatccagaaaggaccctggaactaatccctcatggatatggcgggacaaatgtatatattcactgaaaacaacttgaaaagcacaaagaagcaaataaatctattagtccactattaaaaaattagtattgttaccattttagtattaatatatgcatttccaacctctgtgtgtttgtgtttgagtttgcatgtgcacagataaataaaatccacataagttaatgtccttttggtattctatggtgtaaaggtaatctgatttatttaaaataactgattccgaaagtatgttgcaggaaccattgatgatatttgagataactgtagggaacacctgagcatgtttgctttttaataattatatttttattttatgtgtatttgaaattctaactgctgcatcaaacgtgagttcagggttacggttactttgaaagcccattaaatgcgggagtctccagcacctttttggcatctcactcaggtgatttcgctaggtctccagtattcagcatgtcagcaatttggtcagctctaccttcaaaatacattcatatctcaactgtgttaccactctgaatgctactctcattcaagtgatccaggtgagcacggtttattcccatatctttgcaactaacaccctgctttagtcttttctcaatttgttgacttatctcagagtcaaagccagagcctttaccatgacctccaagtccctacacgatccgcccccccatctacaccgcatacaccgctctgtggcctcatctcctcccactcttgttgctcactctgcttcagttgcattggcctctttggccatttctgagcacgccgggcatgcttccacctcggggcctttgcctttgcttttctttctccttgaagtgttcatccccagagccctgctctcccacttcacatttttaatgattctcttctgttgggcacttacctgcctgccttttctaaaattataactcttttcctctcacggtttcatattctccttgcctgcttccccacggccccttggctgtattaccaacgtactacgtattttacttatcacttctctgtcctctaaaatgtaagttccacgagggcagggatttttgtcttgttttggtcactcctgaatctagaaaagttcctggaatgtagtatgtagtaggcactcaataaatactagttggaagactaagttaaataaaaatcatgacctgacttaataatagtaaatcaatacatgaggtataaggatctgtaaaagtcaaaaaggtgatgagtaatgcgtgaaaaacagtgatatgttgtaaatttgtttcttttgtggtcttattataattatcactgcagtaaatacccttaagtaatttttgggtatgtttatgattcttttcttaaaataaatgcttagacatataattgctggttcttaggatatgcatattttaagagttgttagacctagtccaatatatatcagattgtacttctgcctttaatgtatgagtgcctgtatttcttcgcatacttgactgtcctttgtctaagtgcttttttatcttaaccaatttaatggctgaaaaagctatctgaataccttaatttgtatgtctttgacatggatgagctttatttccacatgtctaattcttatctgcttaccctttttttacgaattgcttgctcacatctgttttggtctagactctggttgcagtggactgtaaacctacttgaattaattgtattggatggatgtcacaggcgttgggtttatatccaagaacaggatgcaaggaacagtgagacctcccagacacaagaactgaagggtctgcttctctctgccatctctactctccctttttttcatggcgtctttgttcctctatataactcttcattctacctggctttggtgtgccatgccacttagttcagcccctactttatgtgacctttcagttcacgtacccagtcatagtttaagtgcatgggtatccgcggcccagatttctagggtgagcagtctgttggatcagttttatcagctggtcactcctgttccagtcagctgaggtcagcatagagagctgaggctcttggggcctgttgccaggggctgtggatgaattgacttctctagccctgacacaaggatgcagtgattagaatgctcagtacaatgtattttgccgattttttgatttgttgtattaatctttctcttatgggtacccaaaagccctttccatttgaaggatagtattgccttttgtataatgggtgtttttctatccatttatcattttaattttgcttagtggtgttgccatgtaatcaaggctcaattaaatcatgatttctgctagtttctaggttagaaataccttctttatgaggaaattatacattcaaatatattttcttcaagttctctacattcttatctttcatgtgctctttgaattggattacattttagagggattagtgagagaaacatctttacaatgtttattgcaggagcatagtgtttatttaactgtaattcacttctctcagcaaaattttgtactttccttattttagttttcttaagtttattcctagctacttcataaattttattcttggtagaatttttttcagttatgttttctaactggtccctcatgatttattaaagctattgtttttatatttttgtaactgactatcttactagttgtaattttttgcttaatatttttgggctttacatgtcaacagttatatgcaagtaattattttatttctacctttttctattttttctttcatttctttttctcaatttattgtgctagatcttttaaaatgaggataataattgtaatggcaggtagcacatgtcttacactgttgtattttttagtgataattattctgactagataactaaatgctgtctagataactggaatgctctggtaacttacacagcaaatacaggaatgaaactagtggaaaactcattttaaccccaaagattttctccactggcttgtcttggagccttaaaatttcactcatttatcagtctttctggtcaaagcactgcctccacaaagttcctgttaaaatgtattatacctgctaagatggcatgtcacatatttagttatctgattattttctaataaatggtactggcctattgggaaagtgcaagatggacctcaagcaaagggaaaagtgttttgatggtgctgtcagtgtgagccttcataatgaagcagctgctcacctccaccttcatcttctgcctgctctgtgttcttcacactgtctcacctccgtcccacaagcttcaacctgagtgaatgtcccttgctttttaaaatatgtcttgttatcttgcctggggctttcctgctcctggtcctcagtgtcagtttcgctgtcactttctccaggaaggctgatgtccttagactaggctatgtgttctattgcattgctcctttaaagtaacattttaaatctttaaaaataacattcatctttaacatagttgctttttaaaaatcatctctcatggctgctcaattataacctcaaactgccatgccagagagcatatctgccttgtttactgatatggtttggctgtgtccccacccaaatctcatctttaattgtagttcccataatccccgtgtgtcatgggaggcacctggtgggaggtaattgaatcatgggagctatgctgttctagtgataatgaataggtctcaccaggtctgatggttttataaagggcagttcccctgcacctgctcttttgcctgccaccatgtaagacatgcctttgctcctcctctgccttccaccatgacgatgaggcctctccagccatgtggaagtgtgagcccactaaacggctttcctttataaattgcccagtcttgggtgtgtctttattagcgctgtgagaatggactaatatgttgaccattatgtctgacacacaatagtcactcagtgtttcctaagttaacagttaaaagggggttggaggataatgcttgacatgttattggtgaacttgagcaaccacagtgagctgtactggttggcagaagtagcggcgtagggaaattggagttgaaaggagtgtggccaataagcctgtgcccaaaacgtttgagttttatcctgatgtgaatctatgcagaactgaagggaaagcctgccttctgtttactggagttgtgcacagttttgaggaatttgaaaaaaaaaagcagttttatacatagatgacctctgtgcatccttggacgtgaagcaagatataaccctatactttatacttttatcctttaatttccttactctttagggttgcagtgatacatccactgggcttttacagcatctaaaatggcaggctggctcataaagtatgagaactccacctataataaagaccatatttcaagagctagagtgaaaaaggcagttggaggaaaacacaggaatgtacataaaagtatttggtgctgttttgttggcaacagaaaggaaggtttttgcttttgtgagcctggatggttccagtttatgaaaatgttttcagaagttaatacaaagacattgtttcaacttttctcaagttatagtaaacttacctttcttcccatactttttctattttttttttgttatatttattctgttactataaattacacactgaactcagaactgaatatgaatagcaagaccaaatccttttttggctattttctatagcttatttatttgcaacatgtcttcatgagggaacctgtttgatgtcgtgtttgtttgtttattttatttcatttgtttattttttgagatggagtctcactttgttgcccaggctggagtgcaatggtgccatctcagcttactgcaacttccgcctcccaagttcaagcaattctccttcctcagcctcctgactagctgggactataggcgcccgccaccactcctggctaatttttgtatttttagtagagactgggtttcaccatgttggccaggctgctctcaaactccggacctcgggtgatctgcctgcctcggcctcccaaagtgctgggattacaggcatgagccacggcatctggcctgatgtcatgttgaactgagggttgaccttggagaactggaactaaaaatacggtgatcaaactgattttatgtgaaattactatatgactaataaaattaagcaagttgagactgctaatcctggtacattgagttaggtggtactatacttaagttcagagccattctagagctgcagaagggtgtgtatttaatactttcactttacagatgaggaagctgagatgttaagtgacttgattgaggtcatgcaggcgtttagcttcagaaccagattaatagtagctgccctattttatgcacttaggtgcactcctaccccattttatagatgggcaaactgaggcacagaagcaaacgtcagagtcaggatttgaaccaaggtggtcggtgtcacaagtccttgcttttaacctctaagttgttttgcctctgcctcgctttctggataggcagtccattattctctgcccttaacaatgttgcctcctagaatgaatggtttcagggaagctccttccccagtaaatggctcttgtaggtattttccatagctgaaaatggtattggcctttccccaagatgctctgttctcatagatggtttaggttgaaagaatccagtctgtgattagagaaccctgaaacgggaagcagatacttccatgtctacactgcagtgggagcagtgcagccaaaggacagctacgccttccgaaggggtggagttcgggttatgctgcagtctttttatctcctttcgcgaccatgttgttctttaggtaactcattttttaaaaaagtttgcccaaaagccaacaaatgaaagtgattgattggataaccaaagtgtactttgatacctgatatctgctcctctgctttgaatgacagaagataatttctgttgttcttttaaacaagttgcattgtgcctgtgttctgtgtcctcctgggaaatgactaaaagagatgcccagaagttttggtgtataaaacttgttgtaaggcaagagtcacccacaatgagtctggtttaggtgtggtctattggagtttaattgggaacaccaaatataacttgagcacatttcagcaacagcacttgtaggacctaaaggctttaatatagcaaggtccttggagcttgaggactcagtgggatctggagcctatttcattcagtagaaaattactggctgggtgcggtggctcacacctgtaatcccagcactttgggagaccaaggtgggtggatcacttgaggacagtagttcaagaccagcctgaccaacatggtaaaaccttgtaggagttgtggcacgtgcctgtagtcccagctactcgggaggctgacacaggagaattgcttgaacccaggaagcagaggttacagtgagctgagattgtaccgctgcgctccaggctcgctgacaaagcactccatctcaaaaaaataaaataaaataaaataaagttattaagatttggtatcttcagagctttttggggaagaaggtatggttgtgattattattttttatttttatttattattttttactatcaggccctgtgaaacggttgtcttttaaaaatgtctttttacaaaattgtagtaaaaattctctcaaacggtagagtatcctttaattcatctcatgtattttatttcaagacagttaaagaagtgccctattagaggcttaacaacagtgctacgagattgtgaagtcatgtcagtcgagggtttccgcaggcttcatagagacatctgatttgagccttgcaggaggagtagatgtgtgtgctagaagggagaggacacctgaagcttaggaaacaataacatgagccaaagaccacatagtgtacaagggaaaaatttagtgggaaatgaggctcaagacttggtcagccaaacgcagcaaatctggaacagcatgctagggcgttgatggacgggattctataggcactagaacgttttagataaagggaatgacatccattctaattgctggggaactatggaagaatttggatgtatctcaagattcttgggttactagataaccttaaaactttctcccttgtgtgtgttttttaaatgagtttttagtttttctatggtatagagaacatacttttcaaattctaaatgttagataatttgcccgttttttaaaaaattttcttggagacagggtctctctcactgttacccaggctgtacagtggcatgatcacagcttactacagcctgtgccttcagttgatccacctgtctcagcctcgttaggagctgagaccatagacacatgccaccatgcccaactaatttttaaattttcagtattttttttttaacggagtctcactctgtcgcccaggctggagtgcagtagcagcaacctctgttcactgcaatctctgcctcccaggctcaagccgtccgcccacctcagcctcttagtaactgaattttatattttcatttttagtaaagacagggtttcaccatgttggccagcctgatcttgaactcatggcctcatgtgatctgcttgcctcagcctcccaaagtgctgggattacaggtatgtgccccgatgcccaattttttgtttgtttgtttataatagagacagggttttgccatgttggccaggctgatctcaaacttctggcctcatgtgatctgcttgcctcagcctcccaaaatgctgggatttcaggcatgagccacctcgcccagccccagctaacttttgtatttctttgtattgattgattgattggtagagatgggagtccaccatgttgcccaggctggtcttgaactcccgggctcgagcagtctgcctgccttggcctcccagggtgctgggattacagacatgagccaccatgcctggccagtagtttgacttttcatcgtaaaaaataccttttgtcaagagaattaaaaaaaaaattgtgagtaagatggctttcttgtatcgaagcttgaatgtggtcacttggttgttgctgtaacgtataaatgaacttgagtcttgaatgtttgtgggtatttcccattactaataaggaggtacaacaaagccttcaatggaagaaccagcaactataaaactaaagtcattttttgggtggatttttggctgctttctatagttggcttaggagaaaaagtagaaagctggagtatgaggatgatatgtttcctttggcaaatctgtgacatggaaattaccatgagccaaggagccagaggacatagcttgtagctctgctgcctgcaacttttaattatgcaattcagggaatagctcattaacctcattttttttgtaaaaaaaaaaaaatatatatatatatatatatacatatatatattatatatatgtatatgtatatataaattgtctaccttgtatggagtttatgagacccaaatgatttaagtgttgtgaaatactagcttttgcttcttttttttttttttaatctgctgccttcctaaaagtctggcttatctttgtgttgcttaaaggttggctaaaggcactatgattcaccaaggtgttcaagtcagaaaccttgaagtctaccttgagtcctccctcttcttcatctctcatatataattggcctcaaattcaaccggttttacttttttactcacaatcctgctccatccaccctgtattgattactttacatggaatccttctcatctgtcacctcgacccttgcaggagtctgctaactggacctacccccatcttcagtctcaccctcttaaaaaacactctcatagcacttacttgccagatactgctttaagcactttataaattccaattcatttaatctatctatttaatccagtcaccttccataataccacctagttaccgctcttgaatctggccatttttcgtacccacttaaagtcttttcctagctcccttgcctaagcattccacgcccctctctgactgccccatcttcgcaccctgtagtctagtgacattggctcttgcactgctttggacaagccattcagtcttacacgtctctgtcttctgtgacctatccctggtgctgggaaaacttttctttcctttctctccacctggtaaatgccacattttggttcagggttgtgtgtggtgtaaccttttcccattgaagcactagttggtccattatttctgtcttgcatatagttttctgtgcagagtttgtgttcactctctagactatgaagttctgggtatagggagctgtattttgctctttattcatatggtgcccggcaggaggtgtggatgcatgcttggtaactgatatcagtgagagaactttgttttcctcttaagctgctgctcttaactgtgacattaatattggtacgaaacaatgtcagaaccatcataccattcatatcactttggtatgagctgatactattatcataccattcatatcactttggtgtgagctgataatattatcataccattgatatcactttggtatgagctggtactaattatattatagcacttaaggcccaggacttacagtacatttgaaaggtagaaagtacactgcctctggctttagaaatattcatctcagtgttgagtacaaaatgaaagttgatcctgggtgtttatagccataattagatttttaaaaatcaaaaacaaaaccttcaagcctttccaaagggcctttgccaaacttatggaggctgacatgcattcttcaaacttcaaagataacacagtagatgttccaaaatcagctgtaggtaatatgactctttccttctttgatggtaacatttcaatttatattcccaagggaaagatacaaaagatcttgaggaataatcttatttacatcacagggaatataaggtaataataaagtaataagatgtgctgtttgatgagccatatagtaagttggactaggcaagttagaagggaaattgctactgatacaattctctttgggtccagttcatgtagagagtagtgtaattgtaacaggattctccagagaaattgaatcaataggtgctatctatctatcatgagattcattatagggaattggttcacgtgattacggaggccaagaagtcccacgatcggccatctgcgagctggagacccagggaagcctctggtgttgttggaaggcctgagcgacagagagctgataatttagattgtagtctgagtatgaaagcctgagaaccaggagctctgagggcagaaaagagaaatgtcccagtttagcagtcaggaagagattgaattcagactttgtctacccttttattcatttaggcctttgggctttggatgatacccacctacattggggagggccatccgctttactcagtccaccactcaaacgctcatctcttctagaagcagcctcacaaacacacccagaaacaatgtttaaccaggtgtctagatatcctgtggcccagtcaagttgacacgtaaaattaaccatcccaggacctttttgctgtagggggaaatacggaagaacttgattctgatcaaatgaagagactgtgaatcgactacatagatccctgtgggatgtgctgattttgctaatgcttttaaagccagcaatgagttgcgtgtggaggttagggaagagatcagattttcacaggttgttctcagtccattgaaaatattgatcagttaaaacagtaatgttcaaagtatgaatcataatttcttaaatcatcctctcctttgagctgggactggaaaaagaagaaatcatcttcattcaaaatactgaaaccctctgagttaatttgtaccagtgaataggattctcttcccctcaacactcatatccctaattattatttatcctctaataaaatacaaggtagttacggtgaggatgcttatagccagtggacactgaatgcctagttagaccatttgtgattctcaaaccgggttgcaccccagaacctgtgaatctgactcttgggggtggtacctggccatgtgtgtttttaacaagcttcccaggtgactcttacagacactgaatttggagagtctggtggtcttcacaactgacaactctaaaaacctactggtgcagtagttttctaaatttgtttagaacttaggatgccttttgaaatataactaacttttgggttctcaaactttaggtctgagatgggacctaaagttgcctctaacaatttcccatgtagttctaatacacacataagtttcagggactgcactagtatattgtagtattgcagaaaggcagggtttttcaaattctgtttaggtacaaaatgattcatagtcaaataaatctgagaaatgctggaaagttaaaacattgtatgtgtgtatttttttatagctttgatttttcagagcctagagcacactagggttttatagaatactgttttggggggacttatggaaagagggcaattcttgtcctcttgtttgttcaaatacttgactaaaaggatgatgctggactcgtgtatgccctggcacgctggctgaagtactgtgtgttattgatactctgcctagggatctaatttgactcttctagttatctgtatcgcagtcaggtgttgacaaagccatcttgatctctgttcttattcactgcttcccccaaacactacacatttctttgtagcatttaccatagataataaagtgtatgccttagccagtgatagatggcccctgaatttattctgggaattgcgcagaatttaatttttctatttctattttgtaaaatcaagaattctgggaagcagaaaccattaaagtcttaaatatcttaagactaatacctaattttgagttactgattttgtttaatccccacagtaaccctgtaaggcaggtgttctgatccttagtatttacagatgaggaaactaaggatgagaaaggtgacataatttagagctgagacctgaactttggtcggcttgagcctccaaatttatcatttcttttctcttcaccatgttgccttcctttcaactatataagggcagtggaatgtttactgtggaaggtactctaggactgaagacagatacatgtggttaattctaactttatatctaagtatctttgtgtctttggaaaattgacatagcctgggtctcactttaaaaaagttactgattttcttagagacacggccatgtctgtcacccaggctagagtgcagtggcatgatcatacctgattgtagcctcaaagtcctgggctcacgtgctcttcccgcctcagcctcccaagtaggcaggaccacagacatgtacagataagcctggaaatttgttttatttaggcaaggtctcacggtgttgtccaggctggtctcgaactcctaggcttgagcaatcctcccgcctcagccacccaaagtgcagggattacaggcttgagctaccatgcctgacctcactttttctccactaagtttatagtgctttctaggccgccttgtcagcgtattaggaaacacttgtgaacatggaatggggtgtgtgtgtgtgtgtgtgtgtgtgtgtgtgtgtgagtgtgtttaagataaagcaccatgtgtaattgtaaggagagaggaggtatggtgtcctcattttcccaaaaacttaggcaagttttaaatggtatcaatgagagttacatctgcaagtattttagttgctatggagtgactagcatgtgacagtactgtgtgacaaggtgtagaaacgtcatctcttgggtgacttgcagctggtgacattgcagaattcaatgataagttgcggaattcaggatctcttgtggcaggacccagaaggcggtttgatcatcaatagggcaggacttttcatacctctagtgaataaaggggaggggagaattcacgcctttgctattattgccactttacttgtattttgttcttattttgagtggctagggtaaagatcttttaactgatttaaaggatgtttagtttttattttatcagccctagttccaatgataggaattcaaaatgtaaaacttagactgtctagatgacttgattatagttgaaggagaaattttaaagcgagcttgaagaatggtgccaaagtgcatcttattttctgcagactccgaagaaaggagtgtatcctctgaggggaagttccagactggcaggtctattttggcttcaggtatgcttttctagttattgaagtgataaggttttttttttttttttcctgtctctccattctcccttttcctccttctttataaaaccagattaatattatctattatatgctttagaaataatattaaagaatggagcttaaattgaaacttcaagagctgattgattggatcggcttgccatttttggagtgagcacatgtgctggatgggagtgaggtagtgccaggacctaggagaagcacatttaagcaaatattcttgtgctgtaaactttaaaatacctgaacctggtcatctgacatggatttttttatttgagaagatgagatgtacatggggttaatatactagggaggtcagcatatgacttttccgtggtgaatttcattctgaaatgtcagtgttctctgaaagtcataaaacatgagtgcaagctgttttctgagttcatctctgatatgcagcttcttgaggcagatagttgggaattgcttagtggttcacactgatagcttatgtcatttaggtcaggaggcagagactgtcgctagggagatattggcgtaggagggacagtttgacacaggacatcacagccaggtcacagacttttgccattttaagagttgaatttgaggatgattctactttattctcgcaccaggtggagtattgctcttaagagtatgtttgtccagcttagggggtggtgaaggggtacttggaacacactcccggggatggactgtactactactaaaggaacaacacaggttggttctgctgtcaagtgatgcctgaatgatgtcctttggagaactggatgggacacaggacagactttatttagggctatgcatcatacttcttcttaggatatttctttgtatcatgtacaagaccttcccatggccccttctcaaccaaagtttctgtgtagaaaaaaaccttattgtgtaaatctaatagcttagcaaaagttggaatgcctgtttcacaaagagtgtgttgcatgtagaaaagatagaaagtaaataggaagtaaacaaaaaattatcaaggtggtgaaacaaagaaaattttttttcttttctgaaggacttttacgtctttattgtctttgctaagggtactaaggtgcattgtgactctgcagtcgggggcttagaagttaaagaactcgattacttgccagtcttattttttcttaggatggaggttgtcctctaagcaaccatttgtgtgtgtgtgtgtgtgtgtgtgtgtgtggtgtgtgtgcatgtgtgtgcatgtgtgtgtgggtattcccttctcaaaacacttgaagtgagaggctaaattatgacttaaaatcaaaattattatttgaagccatgggtatagaagtttaagagccacctggaattggagctttgttattggggtgtgtgtgtgtgtgtgtgtgtgtgtgtgtgtgttgtgggggtcaaaattttggaattaaaatgacattgctatttaatattatctgcagcagtgtttgaattagctggaatattgttcatttccatagaaactggtcacaaatgagaaacaatattattcagttttgttaggaaaaactcaagagcttgtaattttgttaggccttgattataaatactggtcttaactaattcacgcaaatttcatccaacctgtaattttttttcatgaggaatagttacctataatctcaaggtgcagctttttggaacctggtattattttttttggaaaatgaaaaagtaaaattctaataataatctcaaatgtattcttagtctctaataatagcagtgcttacaaaatatcattctcatttagctacactgaaaaatagcattttaaaaggcgttgaatagagagaatttctgtagctttttgaatggtcttgtttgaggaattggccataaaactttagaattaaatgtcaaaaaaaaaaaagaatttcaaaataccttgttttgcccaaagcagaaggaatttttatgccgtcattgtttgaatgtcatgacctataaatgaaaataaacagaataaaatcttgtttttaaacattaaacgttaggctgggtgcagtgactccatgccttttataatctcagcatttggggaggctggggtaggagaattacttaagtccaggagttcgagactagcttgggcaacatcatgagcccctgtgtctacaaacattttaaaaattagctgagcattgtgactcacgcctgtggtcccagttaggaggctgaagagggaggattgcctgtgcccaggaggctgaggctgcagttccgccactgcactccagcctgggtgatagagcaggatgctgtctcaaaagagaaaagaaaaccagaattaaatgttactgagttttaaggcaactgcatacagcagactgttgtatttgtgggttccacattggcagtttccaccaactggagatggaaaatagatttaaaaaaaaagaaatggttgcatctctactgagaatgttcgtatttttttcttgtcattattccccaaacaataaagtataacaactattaacatagcatttacattgtctaggtattaaaagtagcttagagatgacttaaggtatacagcagagtgtatataggttatatttaaatactgagtgccagtttatatcagggacttgaacatccatggattttggtattttgtaggggagtgttctagaaccagtaccccacagataccaagggatgacagtactagtgaaaacaaacaacatcaaattttttgaatctaagatactattgattgggagataagtcagtatcttaatttattatattttatattttacatatttaaaagtatattttcatatattttctgctactgccagaaaagaatatgccatttcacttggagaaaatggtgttaaatacaaaatcaagaaaaaaaaaaaaaaaaggaaaaaaatgccagcaattaactatgacacagtgctttctcttggagtttctaataattcttaaacttacagatttttacatacaaatgactttggcatattctcgatgcttgcctgcataaataatacttttgtctcagtaccttttatagcatctttttgaagacactgtaaacatcaattaaatcaagattaaaccaacagtataattttgcgttgtgcacaggtaataaaagtctgacagccacctggctgccagggttcacactggttgatgcatgagaaaaccattctggctgggtgcggaggctcacgcctgtaaacccagcactttgggaggccgaggctggcagatcacgaggtcaggagatcaagatcatcctggccaacacggtgaaaccccatctctactaaacagacaaaaattagctgggcgtggtggtgggcgcctgcagtcctagctactcaggaggctgaggtgggcgaatcacatgaaccctggaggcggaggttgcagtgagccaagattgcgccactgcactccagcctgagcgacagagtgagactccatctcaaaaaaaaaaaaaaaaaaaaatccattctaattttaaagaatttgaaatatttaaaaaatgtgtctaggaactaatgaaatatgaatttgtatttacatagttttgccaaaaacagcacttttgccttatccctctggagaggttcaggggaagagtttggggagggctttttttgtttctattgagtagcatctctggctgcttctgtcctcatcccctcccttcatgaaggctcatgatctggttctgaaggattctttttggtgattcaagctggtttgtgctgcctgttactttatcctctcctttagactctgtcttttttagtttccttgaaaaatacttgtcaaagtatttgttgactaaacctaccctctggaaagcctggctttgtcaacagctgtttaccttgtcatctctgctgtatacaatggtgcagtggacaaaaagtgttggatttggagtcaggagttctgtctctgggtaccagttgttttgatatgaacagtcgttaggtagtcttgccgggaagttctccagttcactttcttaagtccttgtggcctagaggtaggtgcttgtccagattactccacaattcctctggatcacatcaagggtctctgatgtaacaggcagacatgccctgaattctgcttgtttacctgtgagccctggcagggatgacttttccccccaacccacctgcccccatttatcagtccaaggggattcctatttaaatttactctaacaatctgttaggaggttctgactgtcactaatataagattataaatgtaaaggccttgtcacattttagaaagccagaaaatgcaatgtttttcttcccaactgattttaaagactcttcattctttctttcctttttttgctggttgttggggggggtatggagaggacattattcactaaatttgttgtctactgggtctctttaattctcagtttatttgcagagcagattgtcctgtcttgtgcccaataactgaatctgttccagcttatgtcactaacctctttttacctccaaaatgccatgatttcagtcttaaaataccaaacactttgagattgagttagatggcagataacatctaattcacattaaagaacacagcgctcaccctcctcgccttacaggtagtttggttctaggaggcgctagtgtgaaatcaaagggcaaagtaagatcatgtatagctccctaaaaaaaaaaagtagctccctactttaaaatataataaatgaagggaaggaaaaactagtttaaaagcgtagaaactgacaacaatagttgtctttcataaaggtaacgtaggctggacacggtggctcacgtctgtaatccaagcactttgggaggccgaggcggatggatcaccagaggtcaggagtttgagaccagcctggccaacatggcaaaaccccttctctactaaaaatgaaaaaaattagccaagcgtagtggcaggtgcctgtagtcccagctgctagggaggctgaggtgggagaatcgcttgaaccggggaggcagaggttgcagtgagccgagatcgcgccactgcactccagcctgggcgacagagtgagactccgtctcaaaaaaaccaaaaccaaaaacaaaaaacgtaatgcatataatctatttagtaatcatggttttagttttcttaggttagatattaagagctgaagaccttcccctcttcaccgctgcattctgtccactttgcttttgccactttttcacgttgctccccatttggcaacaataagggataagcattaaaagatctgcaacatagagagagctcattggcagatgatttccgctgatcagagtctctagattccgtaataaggaaattgcttacaataaaactcagaaactttcagctttgtatacagattcatgaaagaaaacatttgaattactgcttttgggcatcttctactcaagttgatagctgcattgagacgagtacacagttgtttgacttttcctttaagcttcttgcaatttgatttaggacagttgtactgagcgtatgttaaagcccagccattatccaaggtgctgtgttagaaatttcattaagataaggattcagccttagaaaaatcacagactagccctcggggcacagtgctggggagagtatgctctgaatccatgacctacagggtgaattaggtgattgataagagtctggacccttagatgatgtgatggtcatggagaggtactgcagaattacagggggaactgcgaaacagcccacgaactttggaagctaacatgtgtctaaagtacatatatgatactaataaccttttgtaaattgttgtaccttctccgattgtggaagttggagaatcggcagttaattttgaagcttccaagtgattgactactttgaaattgtaagtgaattcaggccttccttgggactctttaactcctcttccccttgctcactcctctccagccatggaggctcctctgggccatcacttaaaacttaccaaacgccatcttgcccaggcctgcatttgtttgaaatgatctgaagatagcttgcaaagccacatcctcagttccttctattttctactcacatggtactttctgagtgctgtgaataaaatagcaacccctccctctcctcttgcatacctagctatatttatctccaaggcacttatgaatgtcactgtctgagtgtaaactccttgaaagcaaggactttcatctgttgatgctttattagacctaatatttacctggaacagtgtgtgagtcgtaacatgttcagatatttgtgggagggtgaaaggcaggaacagagggaaaactcttcatgtattttattgtttctctctcttattagaaggtaaaagtccacaagggcaaggctgcacccctagcacttagaaatgtgctggcacatagtcaatgtttaaataaataattggagtgaaaatttgtgcaggtttggttgtgtatacttaattatgcaaccatagtaaacacatatacagatgtcctttaaaaagtagaaatgtttgttcctatatacaccaaagttatgcgtgcagtataacctgtagtaatatcggttagaaagccacatagcttattagttaagaggctgaatgcacaactgcagccgccattgctgagccccaatcccagctttacctcctgctggcagaatggtcatggcaaagttatttaactgcaccatacctcagtttccttttttgtaaaatgggaatgatggaagtacctatcgtaaggtcaagggcattaagtgagttagtataaagtgcttaaaatagtgtattaaacagagtaaacattctggaattcttcataaaaatatgttaagacaaaatatttattgatattattactaattcattcatattgggtactaaagagtggaaacgtcccctgttaatcccatagccccagatgaagatgaccctttggatctgtctccaggggagctggaatattttaaagagatgaaagcaggaagtgacagagataggattttatttcctaaggggagggtcttactccttgtattcttgccagggtactaattctttcctcttttttaacattgcacacaaaattaagtgaatccaagaaaccttccctatatcgcatagagcagctttcagtgtagttgtagtaggtagcacttaggggaaactcagtgtagagaggatatgttgtcaggctgctgctgtagaaactgcctgtagcgtgcataaagagaaagtgaagttatgtgcaaggtgagaccgtacggccatgtcgtcagtgggtgtgtcagcaggagagggacactgcagaacagatacgcagttccaaacacgccaaagagaaacacagcaacgcctgtgctataggacactggaaaaggtgtcgtaagaatttgaagaaaggggctggacgcagtggctccctctcataatcccagcactttgggaggccgaggtggagagatcacttgaggccaggagttcgagaccagcctggccaacatggtgaaaccccatctctactaaaaatacaaaaaaattagccaggcatgggggcatgcgcctgtgatcccagctactcgggagtctgaggcaggagaatcgcttgaaccctggaggtggagattgcagtgagccgaaatcatgccactacactccagcctgggcaacagagcgagactccatcccccacacctccaaccccacaaaaaaaagaatttgaagaaagggcagaatataccaatagagatggtaaaatttggacattatataaccatagaaaatatttgttcagcctcttgtatcccagaagatggaagagttagaagagaaaagggggtgggagcaatgggaggccagaacttctctaatattccctggctagattgtagcatttattacctaatcaagaaaggagagtatttgatcaaactaaattcatatttataagtatattttacctgtgcactagacaggaagtgagtattctaaggactggtggtggtgtgggtacccagctctttaacataaacactaaacaaactgtttaagatatgaaaattgtagttcttatccacataaggcatgtctactttgtgctttgtgccgccttttgctgcccagcttctgatgtccagtgcatatacactgatactaattcaacctgacagaaattcagacagaagagaatgtccaatggcatcttaagaagactccagaaaaatgagttggtcagactgtaagtgagtcactcttcctgtcttgtccaccggaaatggggctcactgatcctaccttgcccaaagaagcttctatgcaaacaatgagcatatacatttgtttgcatctaaatgtatttctatttctaaagctggatatccagtaagagtttctttgcaaattattcatttgaaatgattgtaatatgggtttattaacattgacttgcacatattacattctcatgtgagagctatcccacaagagcagcaacttagtataggaaaataaataaataagtaaataaaacaaaaagtgaaaacctgcatcatgcccctagaaacgtttgaacccctacatgggtgaaaagtacagttgttatgttggaagccagtgcctcaggagcaaatgcagactccccgactcatacagtgagtttgggtcattttccatggcactgccttgcatgtgggtgccctcttctggaatagtgaaagcaaggctgagaaaaaggactgagatttggaaggtatgcggcgggtggggctgggggcagaatctgtatgtgatgcttactaaaattttttattggtgaagactgaattttgtcttctgtgctgaacagagaaatagctcttaggaattctgctaattaggttttgtgtgtttcctttataaagagtcttaaatcataagaggctgtcccttccagggaatgtattctatgtaactgttgaaaacaggttcatttgagacgtttgtcctaagtattcctactgagcgctaactaacatttgtatggagatttatatttaataaagtgctgtcatgtattatctcacgtcatcataaccttaatgatgctggtggtgttggtgacgaagatggatctggtgataggagcagacgttttttgtttaccgtatgccagacatcttacatgccaagcatcatacatggatcttctcatctcatcttcacaacagcttgtgaatatgatactattatctgttttatagctaaaaaccttaagggttacagacaatgatgaccttacctacctaaggtcccagaactggtgaccactggagccagtgtttgaacttgggtggtctaactggagttctccagcagataattgcttttggcatcttctaaattaataatcattgcttgctggcaaactgaacactcacaggtagaatttcctgaacaaatgaagggagacccctgaattcttctgttgtaacagaattcaaatgaatacactactgctagacatatttctttggcgcactttggtgttctttggtcatgttgagtgctctagcctctcccaggtgattccctccaccaacataagggtgactagttcacatctactgaattcttgcagacaggggatggttgccattgctaccagacagctctgcctggttaacctgtgtgtaccttgtacctatcgtttcttcgaaccaaactcctggtcttccacgagtgcttgtttctttccatgtgtgcacactgttacccattccctcttcttcctcttgtgttcattgtcttgtttggtggcatcaccttccaccagcttttaagtcagggttagtcttgtacccacccttgaacatagctccatgcacatctcaagccactcatcccgttcttccattttaccttctaaatagctttcggaggaggcttttccttcatattcacacagacacgcaatttagtttctcatctcttgactgtactattctgataccttttgtagctggtttttctgtctcaattttgagtccctgcagttttccctccacaccacaagcaaaactgatcttaccaaaacccaagtctgattgttgttcctctctttagacctatagtgacttcctgtgtgttagaggggtaactcaaagctctgacagtgcatcaggatcatcttggtccttaaacagaagaatgccagggcccaccgcaggccagcgactgagaattccctgcagtgcaccctggcacgtgtctttcctgaaatctccacgtgtcctcacatcctacttggatagccaatggacatctcaaggtgaacacatcaaaaatggaacttctttttctcacaacctgtgttaactttggtctttcatgtcttggtcgatggtaaccccacccttgaagttgctcaggactaaaacttaactactattctctcagccctcccaaaggaccagttggcaggtcctccgggacctatagcccctactgccacccaagccagctcctccctggcacatgcattaccccctgactggtcaccctgcttctccagtctattttcaaagcaatacttagagtgatcctttaaaaatataaattaatgttagatctttactcagaacccttcaatattaaccatttcactaggagtaaaaaccagtctccatagtggcccccaaggcctttaaacaacaaagtcgttccccaactctgcagaggtgttctggggcattgcagtgagctcacaggtgtttctcaggatatttaaattgtcaagggaaacacagctctcctcatcatctgtcaaacatcatgtgaacagctagttcagcgtcaacatcagattgtgctatattccttttgacgtcatagctttgagctggattttcaccagttgttgtgataaaaattaagtgctatgagaaaacaaatgagtggcggtgttcagtctgatccgagatttaggaagtcatatggcccagaggcacacacatctattagtaagcaatcgttatttaataataaaaatgatttttctttcaatttgtatgtattgttttttcaaatgactgtaaattgttgggtccaaacttaataagcatttatacactattattctgttactaaatggaatatatttcctttggccttggagtgtcataaaaaacttacatattaaagactctgagtcgagaaaatgtgggaacctccatcccacaagcccatttgctctctgggtattctccgttcactgcctctgccccagccactctggctttcttgcttgccctcacacatctaacatgctgcagcctttgggccttctctgggcttggaatgctgttattttatcatatttgcaaggcttatctcctttacatcttgctcaaatgttgccttctccatgaggcctaccatgaccacttcgtagaaaaatgtttccaccctcatccccaaattagggttcctcttctatctttgctctatttttttccagagcaaacgtcaccttctaatatgtagaatttacttatttattaaattctttatttttagctcccctccccacccagggtagaagtttttaattctgttttgcttactgtagtctaccaagcacctaaaatatgtggcacagtatagggaattaaatacgtattcattgaatcattgaagacagacataccagaagatgactggcaggagcaaaatggatagtagtaaagcttataaaagtagtaaagcattggagtctcactgaccatgtccagctccttgcctcagttttcccatctgtaaaatgggttatactattgcctgtttcataagactgacaattcaatccctaggaagaagcccagaggctggcacatagtaaatgcctaaccattgttaacctattaggtttatggtaccatggtgggtgctatggctcttctgaataacttctcatttacatttctttgggaattagatgatgtgctctctacaatgcctaggaaataaatgccatagataatgatggacaaaattattttcttttcccttttcagaggcaatttatgatttagggttttacttattttttgctgatggtgtacttacttctgacttgtatttcagccctggaagctgtgcgtttgtacccgccctcttgtctgttggttccagtcttctgtgtttctatgtcatcagcctgaagaatggcaaaggagtcatgttgttcccactggtctttttattccacttgcagctgaagtcatttcttctcactccttgagattcttctaatttgcctttgcctaagttatgtataaaattcaactcgactaggtggctgttattattttctatgtacaacccttggggtacactttataaatacagggtcatacagggagctttgacaccttaacctaacttctttttggtcctagttttattaccacaattacataaaaatttaaagaaattttaaatttaaattcaaagtatactattgcctgtatgaaacgggcaatagtatactgtttattaaagttctgggaaaaattgaaagtaaaacagtacactattgagtatattgttttatacaggcaatagtattctactgatgtcagtttttttccaggattagctacagtgaattggaaaattagtgccacataccattattgatagcatagcatggaagacagtggaggaagtagacatggcagatggctgtgttcttgcattctcttagcagatggctgttgagtaccttcagccgccccttgtgttgaggattcaaaccagaattcaagacagtggtaggtgaaagcgatgagattttaaaagatagcactaagagttcacagaatttggcatggtagggctgggggtgatgagtgtggcaaagggaacaacatacgtaaaaggcatgggagcacagcttgtatttgtgtggttcaagtaggagggaaatggtagaggacaggttgaaaaaagaaattggggtcagcttggaaaaggccttaggacatgctacagaatatggatcttgtgtaggatttgtgtaaagtggctacattatcacatttgtggtggtagcatgcaggtcaagagagaaggatgaaaacacagaggagggtttttgtgtttttgtttttgttttgttttttttgtatttagaggacgttagagaagaatcagtagattataggcaacaaagtcttgataaaactgtagaaaaacagtaggaataaaatcgcagaaacaagtgaaaaaatccagaaggattctaattgtgaataagctaccagttggcaatcatggaacaccattattggaattcttgaaataaagtttagaaaaaaacatttcaggaagttttgccagataaaatataagatgcctagttaaacttgaatttcagaaaaacgatgaataatatttttgtataagtatgtcctgtgcagtatttgggacgtacttacactagacactgttttttgatgtgaaattcaaattttattgggtaccctatttttatttggaaaatctgccaatcttagtatgattcaaaaggttgtgagaaggcatggtgatcagagtcaatgatctggtccttcatttgatgatgcagtgttttgatgagagaattattaccatgtttacttggaggtcagaaataaaggccccagggaagcattttctagaacacagggagaaccttttgggaagtctcttacacatttaagtgactggtagggatttatttatttgcaaccttactaggctgtaaagtgatttgatcaagaaaaagagggaaaataaaacaaccatagaaaagagaaaatccaaactacagaacgcatctaatgctcagcagactagagctgcaatgtcttgtgtattcaagaaaacaaaatggggtgttatcccctccgagagggatcactgagttggctttatcaagtgtgaacgaggctgggctcactgtttcttacgttctcgatagacagtggcccttgtgttctggctgctgtttttattagaactgcagaaacattacagaaaccgcaacaatgaacactcggctgagaatgtgaggtcatagtagtgtgacctcacagggagccaggttcttggaaggctgtgaggctcggcagtcactgaacttgggagctgaagaatactggacggggcttcggagaggaaggatggtccaggcgcaccccaggggttgcgatgggctcttcttggtgtctgtatggttgctggtaagtttatattgccatcatattgtcaagctttctgatttaaaaggagcaattccggttcttgttcaaataatctcctaaactgtgaaatggacagaatgaagccatctagggacatatttatcctttgtgctttattttctccttttactgaaacctttttgaagaagatccagaaagtctgatgcacacagattttgcaattatatggttttggtgaatgtgaggaaaattaggtgaaatcatctggactgggcagcatagtagaaaaggggcaaatatggagaatgagtaacatgaggaatggaatgattttgggtaataaatttttaaaatgtgttctcattagaataagcctcttgtatttgaacaaaattgggccagtactgtatatgtggtataattacattgtttgcacagaatgattaaataaatgccatgaattttccctgggaaatgagcagtgagtagtggtttaattaagaagaaaatcctttctttgacatgtgtttttactacatgataggaaaagcacacatggaaacacaactccaagggctttgttttgtgttttgtataattataaaaagtacttgattgtaattaacgtagttcttggaataaatattttacatttctgtcacttgtatgggaaaacacaaagtaaccatgaattgcctaaaagaaatttctactgtgagttttcttattataggttatactgtcgataatgattattcagtttcctgatgggatagatttcacaaaactgaatggtagtgttaagtctctttttaaaaaaatgtttacatcatagacaggagggtctcaccgtgttgtccaggctggtctcaaactcctgggctaaagcagtcctccccttggcttcccagtgtgcagggattacaggtttcagccaccacacccagccatgtaatgttaagtctataaaggaagatgtaggatgaaaaaatcatgcatttaaaaatgtattttcatggagattttatcataatgaagcaatttattttaactggtaggcatgtgtattgggaaactgttcaaggtgttgagggttaccatacatgttagtttgcctgggtcagttccagttaatgcctgctgttctgccattgatattgactgtggtttggtatttgacttagagttttaataactgaactattaccattaatagctatggcaaaataagccagcatgggtttggtagacctaacttcgtattcccagcttctcccatggtatcatctgggaatgtgtgagttgacatttttacacagttgagtctaaaaaactctctctcttttccctattcttagagcttcatttcaagggcaggatgtcaggtgcttgccgataaagtgtgcttggagaagagttgctaaggacagttaactccttctaatcctgtggtggttgagggagtatgagactttgcagctacttgttataccagctggttgtccaggagccctggctgctttttcagtgaccttgaagcataaggccagtgcttccttggtagagcagtgggaaaagggaacttgtaaatgaggtagaataagtgacaagatggagcagttctgcttagaaatgcatttatttttactacaatggtttttgtcatttcgtgatgtaagtttacaacctattttttaggttcagatttttaaaaacataacaccattgagataattgaaatactgtatcacttgctttattaaagtataaaatccggtggtttgggcatattcagagttgtttagtcgttaccactgtcttaaggatgctttcatcaccccaaaagaaacaatgcccattagcagtactgcttttttattgataatgccttctttatttattttgtaatgattataatagaatatttaaggatttattatctccgtttcccctttagagtgtcctggtttagacagtaaatggttattgtgcttaatgcaagccaagttaaagaactatgggatagagcaagggcagataaactcccatccatgggcccaattcagcccagctggcatggctcttaggttttttaaggttgtaacaaaacaacaacaacaaagcagcatgtgtgacaggggccatatgtggcctgcacgcctacgatatttattatttcatccattatggaaaaattctgaccgcccttggtttagcatctgtggtaagtgtgttcgaaggccgtgtaagcacattttattatgagcatgtcttacttccaagttaagataaagatttggaaattaatgtatcctcattagtttcactgttataaatacaagagaaccctctatacctgaccacaggctgtagtctttaagccctttctagggcggagttctcaacgtgttgcctgtggagctttcttccttcagttaggtttatgagatcaaaattgttttacactaattattataacactatttttgtttttcactgcgttgatatcttatggtgcaaaaacaatagtggaggtcttagtagaacttaaggcagcggcaccaaactcttctagtcatcgtattctccactgtcatgcactcaaaataaaaatataggccagtttcacctttaaaaaaatccttgatgaaaccagtacagtttatttcatttcagcgcttgagatcatgtctttttaattttgtgtgtgatgaaatgggaataaagcacttctgttcctggtagtctccaggaaaaacattcgtctgtcatttaagttggggctaaaaactagtcacttttttcattgaatgtcatttttccttgagagaatgactgacaaactatggttattggcaaacattttcttgaaaatggagtaagcctattactttaaggaaaacagctgataataatttgtagcaaatgattacatttgagcttttgaacaaaagttaggattttggaaaacttgtatctgcccgcaaaggtttggcagcttcccaatacttagacttttcattaatggtgacattagtgaatatgatttttttaaggttatataatgaaatgtgtcaacacatgttttgcagataaccaatgtgtgatgttacaaaatcatgtaagggttaaaagatccattcaaagtataagatagattttaatataagagtacaaaaagttaatcgacacaaatttagattccatattgcaagtaagaatatcctttaagaaactaccacttgtctcactttggtgttgtatcaaaaaagaatatccacaattatctgaaaaggatattaaaatatttcttttttccaatgaaatatgagtgagggcacattttcttaatgtgtttcaaccaaaataatatattgttactgattgaatgtagaaatggctcttagaattcaactgtcttgtagtaagccagctgttaaagaaatttgtgttttaaaaaaacagtgaattttagttcttctggaaaacaatagttgtatctttatagtatttgttatgtaaaacagatttatttttaagtgagtgaatttttaaaatgtttctattttcattactacgagggtaaatatcggtaggtataacccacataagtgaaagccgtatggagtccttctaagaatgtaaaggtctagagactgaaaagtttgggaactgcttgcctaagatttaggcaatctgttctttagttctttaaaatatggtaactgaaaaaatttttatgaatatttaaacatacagtgatctcatctaagtgtagctgaactaaaagaaaactatcaatatttcatcagatattttcctttttgccatataagaaaaatctattattttctctctttatcaattatcatagcaatgctggggtgaaaacaacacggctagaagctcattctgaaatggggagcactgaaattttggaaaaggagaccccagaaaatctcagtaatggtaccagcagcaatgtggaagcagccaaaaggttggccaaacgcctttatcagctggacagattcaaaagatcagatgttgcaaaacaccttggcaagaagtacgttctgacccattgctggagtctgaattctctcctgttttgtgtgtgttttaaatagtttacctttcaataaccaagtctattctgttttcttatagcaacgaatttagcaaactagttgcagaagaatatctgaagttttttgattttacaggaatgacgctggatcagtcactcaggtatgactaagcctccttgctgctcgtcattgctttcaaatgattagttcttagagaagaaagtaatgtcttctagctagaatcttattttttttttttaaacctccatgtataggtggagtattccttctccaaaatgtttgggtccataagtgttgtggattttggattttgtcaggtttagagatgtttgtgttatacttatccaagtgaacatcccaaatctgaaaatctgaaatgctttagggagcatttcctttgaaccttatttcagcactgaaaagtgttgtagattttggagcatctctgatttgaagcattttagatttcttatttttgggtttgggacgtttaacctgtagtttgtgaacttagctcaaattgtattatagatattaaacacagcaaagagtaagaaaaacgtattcatttaacgaaatgacacatgaattgatagtctacacctactggtaagcctgagttcaggtggtaaacaattggtagcaaagcaaatctggataaaaaatgccatctgtaggagtttttctgtttttcgtttttttatcgtgttagaatacagatagcataaaatctttcatcttagcaatttttaggtatacaatgagtggcattaaaaacattcataatgttgtccagccgtcaccaccgtccatctccatgattctcttcttgtaaaactgaagctccatactcgttaaacaatgactttttttttccttcccctcctttcccccagcccctggcaaacactattctacttctcttctcgatgattttgactactgtaatgtaaattgatatatacattatttgcctttttgtgattcatttaacttagcataatgtcttcaaggttcattcttgtagcatatatcagaatgtcttcccgttctaaggctgagtaataccccattatggggaatatatataccaccgtcagcttcaggacacgcttgggttgcttccatgcttttgctattgtgattaatgctgctgtgaacatgagtggacaaatatttcttcaagaccctgttttcaattgttttgagtagggagtttggtttttgaatgatgagtttaacacacacacacacacacacacacacacacagtttatagattgtagaattagaattagatttttttcctaagtatttgcttattatatttgcttactatagcccaatagccttttttttttttttttttttttggagacagagtctcgctctgtcacccaggctggagtgcagtagcaccatcttggctcactgcaacctccacctcccaggttcaagcagttctcctgaatcagcctcccgaataactgggactacaggtacgcaccaccacacctggctaattatttgtatttttagtagagatgaggttttgccatattggccaggctggtcacgaactcctgacctcaggcagtccacccgcctcagcctctcaaagtgctaggattacaggcgtgagccaccgcacctagccccaatagccttttaaggtgatactttggaattaactcttcagtggaataaaaatgaatgtcagcataatcagtagaaagtatctataaaactgtttgcaacaatatccactttttctgaccttttcaaatgaaggtgtctaaaactcactgattctcactttttacattatattgtattacaagtttctaagtagctgaaggtaaaacctagtcagcatttaattttcaacactatttataaaatgtccatgtctggaagaattctgagatcatctagtgtaaccctttaattttacaaatcaagaaactgaggtctgggaggtgaagggaggatgtttggactggagtgtagtactgcagtgatttatcgtggggctcttttcatgcagcaaaggtactcagattttctaacaaaaacagttatcagtggatgaaagatctgtatttttgccttgcattctgatgtagtttattaaagttatgaaaaattaaagttttgtcaatatatagtttgttaatcttaattatacctataataaggaagaaggcaaaattttcatagaaatgaggctcatggtatgttttttaccatagtaagatttcttagacattttgaatgattttttttttccttcccatctcatgtttaggaaaatgaatctacattgtcaagtgagggtcatctggattcatctcaaataaacagtgctcttagtgactccgagtagattaatgtgtggtttttgatacacttcctataatttaaagatatttttatacataaactaattccattatgtaaggaataaattacttatatctcccaatttcctcctcctataacaaattaatattaaaatgtgataacagacacaattaacagaaatctcctgtgcacaaagcaatgcaatccatagtggctttaatagagatgacagtcatgtaacaaaatgacagaagcaccctgatgcgtgtagagttttaaaacatagcctttatgatgatgtattgagtcttaagcggtctttgttttttttaaatctgaccttttaaaattggctacttgacacttggtcataatgaggaaattacctaccttcccaaggctttcttgatgtactgaccactctgttatcaccctgtcatcttttaagtggacattttttttttcttttgaaacggagtctcactctgtcgcctaggctggagtgtagtggcgcgacctcagcttactgcaacctccgcctcctgggttcaagcgattcctgcctcagcttcctgagtagctgggattacaggcgcccaccaccatgcccggctaatttttgtatttttagtagagatggggtttcgccatgttggccaggctggttttgaacccctgacctcaagtgaacacctgccttggcctcccacagtgctttttatagaatttaaatactaataccaatttatattgaatggctgtctagtaaatgatttttttggggggagataacttcataatatcttactttgtataattaatatcttaggtttatataaattgacttttaactatgaaagagtgtgatagcattttcgaaaatttcactgtttaaatttttaattctcttgtaggtatttctttaaagcattctctcttgtgggagaaactcaagaacgagagagagttttaatacacttctccaatagatatttttattgtaacccagataccattgcttcacaaggtaatctgatacaaatccttgaatttcttttttatatcaatggttattttccttattatgaaagttaaattttattgtgagaaattatgtatcttcagttacctagtgataactattaacacttctgtttacttcattctagtctatttaatatttaatgtcaaattggaattagagttttgtttttagctgcctttttatttcattgtgagcattttctcatgtcattaaatattctttaaaagcataatatttaaggacagcatgatatcctctactcttacttaaattattttgttttccacttctctagtgtgacagcgtactttctttaaattgttcatggtttgtcactctgagattttatgtaatgaatgaaatttcagttttcttatttcttatacatttggtctctatgtttcttgatgaaagctcatgtatcctgagtgttggagttagttttggaaaaattaacaaatctcactggtggttgcgctgtgtctctggtgctttcgtttgatattaattgtactatactgaccacaaacttttgttgatgattttaataaactatgaggttatgcatattacactatttttacaaagtaagtgacttaatggtaaactgtttgtttgtggacctaccttgtgaagagagatctttcctccatttcagttcctgcaataaagtacacttttcagtgtttgaagtgaagcactttgacttgtgactggaaaatgtttcataaacttacagatgatggagtaaatcactgagactagattcccaagaaatagtaattacctcttagcttcagtattgccagttaacctggatagtttacttggtattggccaaggtgcttgcctcaacctcccctccatgtccaaggctgcagtcacagttagtttatcacctgattaaggtcacattcctatcggtaaactgatgctattcagaccagttattcactatctctgtcaccattagccctgacaagagaatgaaggagataaaagtgggccatttttattagaaccttcttcaaatctaagaatatgtttacattcttggataaaataagaaatatggattcgtgacttaattggctgttgatgaggatatttgagagttggctgctgagttcttaaaatactttcgagaatttgttttaaatatatgtagaacttgtgataataaagtggtactagaataaatatacttttagccatttggtagtgtctatttagagacactgataacagaaatcacctactatactaaagaacttacttttgaaaataccctggctttaatttatgagtgcaataattagaccttctaatttagcgtaaattgaaaagatttttactgcatctgaaactgctattgtctactgtacttgtgtagagaattagcagagtgagagtaacgagaacaactaattgtagtgtttggaaaggagaatcttaactctacttggagaacatttttatatgactttaacctaacagtaatgtgtctttggaggctcatatttacttgtctcccattgtaagcaatgcttgtctggatatccttgtactatgtatagatcactaattattgctgtagtgcaaagccctagaagccgatttgttgtatcaaaagacattgtttgaaggctttacatatctactaccaaactgtcctccagagaggtaagaacaacttatcaacagtggagtccagttctgtgcattgaggttctttctataaattattcttatccattttttgtttcttaaaacaggactaattgtacctagcacagtactgttttcataggttctgagtgtatcctattagtgataataaggtggagtccaacagtgaaaagcgaattcatgcttttttttcttgtatctttctttagatggagtccattgccttacctgtgcaataatgcttcttaataccgatctacatggccacgtaagtgtggatttgtgaaacttagatccaaaacatgtcgggcttatctctgcttttatgttcaaacacatttattttctgcctccccgtttcccattctctacatggttcccatggcaggtgaataaaaagaaatctttgaaaaaagaaataatttttttatttcacatgctagcacagagtatgactttaaatccatcgtcctggtgtctggagttgttttagcagtaatgtgtgtgttctgtgtcttctttgtccagtagatggcagacagagcttttacttatttttgttttctggttgagaattacagttgatagataatgatggagagaatacaaattagatctgaaaatgtgaattgtgttttccctacataccatagtgagttgaataactcagcctttcttgtgcccctcagcttatctagtcttttactagttgaaataataaaacaaactaattaccgtctcatcatctacttaagatacaagataaagtgttaaaatgtataattatatataaatttgcaagttttgtagaagtagaattttagcatttactcgaactcttcataatactctttaaaataaatgaacctgggactatgaagtaatttttgctctaagtaagtatagattagtccatatttaacgaattctgattgtattttgaagagaaaatcaggtgtctgtgtagagtatattatcccttgatttgccgtaatatatcttacaatttaaaaattacatataaaaaattgatatttagatattctgctagtcacataatttccttttttggaaaatatagtgttcccttttaagaaaggaaccatggagctctatgggaccattaagttggactagctgttataagaggaaggggttcagggagaaagggttccaccaccagaaagcaaacaggagatatagtgatagaatcctaattttaacatcattttaacatatctcaaaatactcagctagaaagttccttttgccatatataagaggtgaatttagaatcacttagtggcttgtaaacataggtagcacgtgtccagagataatacagatgaaaagaaaatactttcaggaagcattcttgggcagtatagcacggctaatacaccatgtggaaatgcaggcatttcacagtgtgaatcttgacatgactaccgcaatctaatgttcatccagcttgttaaagggatggccagtcagtggattgtcatgaccacttttttcgtgttactggccaagcaagttttcactgctttgtctggctgtttggtgataacagttgctctttgcacccttcttttccttagcctttctggccaaaggagaaaattttgagtgcgtttggccacatataacattgaatcaagtcagtgatcaccagcgtgaagaattcccttcacactagatattttgaggttccatcaacataaaagagttgtacgtttagcatctgttaactgagaaaagtttaatggtgggaggaaaaaaattcagtaatattgcaatttctctttaaaggttgcagatctcttagagcttttgtcacatttttgatgatttgtttctactaaatcctagattgcatttttaaaaagctaatatagctttaataatacttttacataagcatgtatctgaatcataagaacttgaaatgtagcaaccaataaagatgttattttttattagatatctcagcatgcttgatgtctagatgagctgtggacacccaggtttcagtagctacaggtttagagctgcaaatctaggacatttgctcttctttagacttacaaggaattgtaaggagattagatgaagcatcctgcttcttcttggcaactgggatggaaaagagtttacataaattaacattttaatattaccttgagttaggccaatcatggataattaataattggcagtcgtggcaaaattactgatagaagagggagaaaattatcaataacagtgaatctctgtcatattcaggatcatgtgtttggtgataagtagttctctgttttaaaaatgtgtgcgatatacttgggattgtctatttaggttttatgtattagttttccataatgcatgctgttacaagtctgttgaatatatagtagctatcataagaactaaccatgtaaatatgtttcttctatctttctcctctggattcattttaaaaataaattattcttctaggtggtaagtttttaatccataattctggatgtagcttctcttgcatcatgattgcctgatttttttgttgttgttttagtgtctgtttgacttgtcagcatggcccctatgaaatcgaatcatgcaggagataaaatgaattatttctactgttctgctccttttcaccttctccttaatgctatactacctagaatatgaccacccattacttgatccgatgccagaataatcttcatggggaatacactaatcaaccattattctttttttccttaccgttgtgtcataatagcaatactgcagcatgatctttctaagaagtgccaagaccagcttgtcctcatatgctttcagtaggggaggggtgactcccctatgaggaggtctgactcccctcttgggagattaacttgttttggctgctcttggtgaacctttcctttactctgaggaatgaggcactgagaatgcattaatatgggccttggtttggcctgctaatttccttactaataaaataatggaatgtatactaatattttacttacatttagctaatgtgacatgttgaaatccctttctttttctaactttccccttcaacaaacatgtatatagcatgcgtgtgcctcctcctttccatactctttgccatttgggtaaggatcagaggtgaatgagacaatgttcatggaagccaaataatcctctctgatggtattggctaggctgacctcattagtcaggtttcactgaagacatggtagcaggttgctgaggtgctatgatgggaaaacactggggaggtgttttaatttcatgttggatcatgttaaacttctctaattaggctagataaaaaacaatctgaagtatatacaatatttggggggagaattcagtacctgcttttaaaaaaatgtgactgatatatcattttcctagcaagagtatctacttgtttttacttgtctgcaagtagtttattcccttaaattaaatattttataattgtagtcgtgtggtgaatttgctatataatttgttttatttttgaaatgcctctttatctacaaaatacttatgtaaattaaacttctacacatacagatacatttctcttaaactctagagtttctttctttgctatattggaactaagttttattgaatattgtttcaactatcaacaaggtaagagttgaaagtctttttcttcaaccttgtttgaaatggtatggataagatttgatatgtcagaataagtttatacttactccctttctggatggatcttcaaatgcgttctgtttcctaccactaactagcttgcttgtacttcagtcacagtttagtcaggttcctaccgtcctggcaggattatcacccagggctggtgttctaaggtggtaggagggttaagtatagaattgcatagcagtgaggagtgagatagatcagagcatagtcagctggccagttccacaactagaaagtcacaagagatacacaagtcagtggctggccaaggtcaggccatggtaagaggcagtagccagggcattgtttttaatcaagattttttgacaaaatgtaccttttaacatcaaggcttgagattttcagtagcagttttgtccagcatccctctgttctccagtattggcagaagccagcccaccatgtacaattggtataagagcctggttgtggttcttagaggtagctctctttctcgggctgggcctcctacatatactttacccttgacatactcagagcatgttgagtatcatgccctgtggtctgagtttaatgatcaggcacgaccttactaatgtttttagtgttgggttgtaagtttggaaagggttgaaaccatatctagtacaacttactggtagggagaagaatataatcaaggaagaaagtatgtttaggttttgtcacagaacagtgttaaaaaaatgtggagttcagtgtgagatagattgtaagaattcattatttcttttctaatctataaacttaattattgcattggctttctaggagcctagaatcttaaatagtggataaatatttggtttattagtagtggaaaatgactattataaaaattattttaaaaatttaatgcttcatgtaggggtgggttgcccctacacacctgtgggtgtttctcgtaaggtgggacgcgagatttggaaaagaaaaagacacagagacaaagtatagagaaagaaataaggggacccggggaaccagcgttcagcatatggaggatcccgccagcctctgagttcccttagtatttattgatcatctgtgggtgtttctcaaagagggggatgtgtcagggtcacaagacaattgtggggagagggtcagcagacaaacacgtgaacaaaggtcttggcatcatagacaatgtaaaggattaagtgctgtgcttttagatatgcatacacataaacatctcaatgctttacaaagcagtattgctgcccgcaggtcccacctccagccctaaggcggtttttccctatctcagtagatggagcatacaatcgggttttataccgagacattccattgcccagggacaggcaggagacagatgccttcctcttgtctcaactgcaagagacattccttcctcttttactaatcctcctcagcacagaccctttacgggtgtcgggctgggggacggtcaggtctttcccttcccacgaggccatatttcagactatcacatggggagaaaccttggacaatacctggctttcctaggcagaggtccctgcggccttccgcagtttttgtgtccctgggtacttgagattagggagtggtgatgactcttaaggagcatgctgccttcaagcatctgtttaacaaagcacatcctgcaccgcccttaatccattcaactctgagttgacacagcacacgtttcagagagcacagggttgggggtaaggttatagattaacagaatctcaaggcagaagaatttttcttagcacataacaaaatggagtctcctatgtctacttctttctacacagacacagtaacaatctgatctctcttgcttttccccacagcttcatattgtgctattttatattttcactgtcaaaaacatcacagacttccatgatattgatgaacctcatagagttaatatcctcaagaactctctgcatctgtaatgatcactattgtaactggcagctgttaagtacatttgcaggctatcctctcatcgtcctgcaggataatatcttccctgtggatacctcttctgtctgtgcttctctgtatctgtgatgccctctgccttgaaaggtgatgccatctgccatgaaagctatcgttggcattcagttttctctctgagctttcccctgctgtagattccatccatggtcataatttctactgtgctagcactgccttctcctttggagtcctctctcctatctccttggtgccgtgtttgtcttgtcttacctggctttttttcctaaattattatttgcaaagatcttttgatttctaactttaaggtcaggggtctatgtgcaggatgtgcaggtttgttacataggtaaacaaatgccaacgtggtttgctgcacagatcatctcgtcacccagttttgttttgttttttttttctattttgataccttacagagttatttttttattttttattttattttgttattatactttaagttctagggtacatgtgcacaacgtgcaggtttgttacatatgtatgtgtgtgccatgttggtgtgctgcacctgttaacttgtcatttacattaggtatatctcctaatgctatccctcctccctctccccaccccacgacagggggtgtgcaatgttccccaccctgtgtccaagtgttctcattgttcagttcccacctatgagtgagaacatgcggtgtttggttttctgtccttgcggtagtttgctcagaatgatagtttccagcttcatccatgtccctacaaagcatatgaactcatcatttttatggctgcatagtattccatggtgtatatgtgccacattttcttaatccagtctatcattgatggacatttggactggttccaagtcttcgctattgtgaatagtgccgcaataaacataagtgtgcatgtgtctttatagcagcatgatttataatcctttgggtatatgcccagtaatgggatggctgggtcaaatggtatttctagttccagatccttgaggaatctccacagtgtcttccacaatggttgaactagtttacagtcccaccaacagtgtaaaagtggtcctatttctccacatcctctccagcacctgttgtttcctgactttttaatgatcaccattctaactggcccatcacccaggtattaagcctggcattcattagctgttcttcctgatgttcttactcctcccaccctccaccctctgacaggccccactgtgagctgttctgccccatgtgtccatgtgttctcatcattcagctcccacttacaagtgagcacacatggtaattggttttctgttcctgccttagtttactaaggataatgacctctggctccatccctgtccctgtaaaggacatgatctcattctctttttgtggctgcatggcattccatggtgtatatgtactacattttctttatccagcccttgatgagcatttaggttgattccatgtctttcctactgtaaatagtgctgcaattaacatatgcatgcatgtatctttataacagaatgatttctgttcctttacatatatacccagtaatgggattgctaggtcaaatggtatttctggttctaggtctttgaggaattaccatactgtcttccacaatgattaaactaatttacactcccaccaacagcgtaaaagcattcctttttcttcacaacctcgccatcatctgttgttttttgactttttaataatgtagccattctgactggtgtgagatggtatctcattgtggttttgatttgcgatattgatcagtgatattaaggttgttttcatgtttcttggccgcatatatgtcttttgagaagtgtctctttgtgtcctttgcccactttttaatgtgattgtttgttttttccttatacatttaaattccttgtaggtgccgggtattagaccattgtcagatggataaattacaaaatttttctcgcattctgtaggttgtctgttgactctgatactttcttttgctctgcagaagctgttcagtttgattggatcccgtttgtcaatttttgcttttattccaattgcttttgacatcttaatcatgaaatttttgcccatgtctgtgtgcagaatggtattgcctatgttttctgttagggttttattggttttgggtttcacatttaagtcttaaatccatcttgagtcgatttttgtatatggtgtaaggaagggatccagtttcagttttctgcgtatggctacccagtttttctagcaccatgtattaaataaggaatcctttccccattgcttgtttttgtcaggtttgctgaagatcagatggttgtaggcatgcagtcttatttctgggttctctattctgttccattgatctgtgtgttcattcttgtaccagtaccatgttgtttgggttactgtagccctgtagtacagtttgaagtcagacagcacgatgcctccagcttgcctctttttgcctagcattgctttgactgtctgggtggttctttgcttccatatgaattttaaaatagtttttttctaattaaatgaagaaggtcaatggtagtttaatggggatagcattgaatctataaattgctttggatagtatggccattttcgtgatactgactcttccagtcttctgtaagcatggaatgtttttccatttgttagtgtcatctctgatttttttgagcagtggtttgtagctcttcttgaagaggtccttcatttcccttgttagctgtattcctaggtatgttattcttttgttggcagttataaacgggagttcattcatgatttggctgtcggcttgacttttggtgtgtaggaatgctagtgatttttgcacattgatctttgtatcctgagacttcgccaaggttgcttatcaccttgagaagcttttggtctatgtttttacctgacttggagcttcccagacacagtggccccaaggccgtcatccctgcagcttctcggtggtcctaagagaaggatcagggctagatctcacagttgcagagggtttctagtggggcctggcgttcattttcaccaatactctttctgtctccacaataaggatatagagaatagcctgagaacctaaccattaggtgttgaaatgtttttatagaagaatgttggccaggcgtagtggctcacgcctgtaatcccagcactttgggaggccaaggtgggcagatcacgaggtcaggagatagagaccatcctggctaacatggtgaaaccccatctctactaaaaatacaaaaaattagccaggcatggtggcgggagcctgtagtcccagctacttgggaggctgaggcaggagaatggcatgaaccttggaagcagagcttgcagtgagccgagatcactccactgcactccagcttgggcagcgagcaagactccgtctcaaaaaaaaaaaaaaaagaaaagaaaaaagaaaaatgttatgatctaaaaatgatgaattgtaaattgaaattgagaatataatttactatcatattgccaatggtctagactttaataggaatccttatctaagtatgccatagtttaatcatgcactggtcaattttgttggattctatgacctcttagaatgaaagccttctttccttttttccatcctctgttccttcacctgtcccctttccccaccctctagcctcccacttttggtagttttgcttttttaagaacaggtttatatatggaaaatacctcagggtagctttaatcagttgtgtcagtggggcttattgagggacctcatattatctaacttacacattattcagtcttcttatcactgtaagctttttacattggcacagttctgttatagaacgtgatcaaggaaagcaggtcaaattctaagtcagtttcgctctttcttactttctgcaaattgattgtggaggaaggagggaggaatgaggatgatggtggctgaaacccctgactcttgtttccaatcctgttgcttactttaatgccagtcctgctacagcaatcaagttaaaaattgtttggttagtccttgtaatttgacagtgagttaggtgtgtttatcttttcaaattttaggggaagtgctttccatgaaatatcaatagaagtctgatatttcagtattctaaaactttttggtcccaggatagctttatactcttaaaatttttgagaagccccaaaatcttttgtttacatattaatatttatctggaactgaaactgataagatttttaaattgcattaaatcattaaaaacccattaagtgaataacacatttatgaataatagtcatactttcctaagtgagaaatatattaaagaatagcacttaaaattgttgctagtctttttatatttggcttagtaaaagatggctagattctcatatctgtttgtgtttatagtcggttgcagtgtatcagaagtcatgcatcttctagaaaactctactgtatatttgagagaatgaaaaaaatgtttttagtgttactataaaaatagggttgacctcatggacatctggaacagtatctctgaaacgctttgagaaccactgtgctgtggtactatttttagttcctttttttctttttaccactctgattcctttttcaaaggcaggatattataggacaggtgggagaagtcccagtgacatatcagatattcctaaatgttgagcttttagcacttaaatgagctctgtgattagggtttgtgagagagcacattgaatatccactgtagtcctggttttaaaatttacaaagggtcctcctttgccccccagtcatacatttaaaaaggaatggacacctgagggcagcatgacataatcaaacttatttgatagcaaagcatgcaaaataaaagcaaaacaggagctttcagcagagccacataactgaagtaattaccaaatcagtagtatgcctttccaccatttattgtaacatgttggaggaggtggaattgtcatatgggagagtatgcctgctgtgtttttaatatcctgagatttatgaagccagattttaccaatggatgatgagggcttttagtttctccaaaagcacgttttccgcaaagcttccagacctgacactatcaaaaatgaagaattttagaatcattatgcttaattcttcaacctctgaatcagagtatatgctgttgtcagctttcctagtgaatacctgattgacacagctgccctattcgcagctctcctagggctgattttaagttaggcgatggtcagagctttgtaggttacattccccagattgccagggatggcacgctcaaagatttggtcacccgcttgctgagtttggtgccgaagcttgtatacggtttctggctgctcctgatatgaatgaaattctccatcttcattttcccctttgctctcgttattgcaacagaagttgggagctgcttctctgttatggtcaggggaaagtgccctttattttaacaaagcgaaaacctgcatttggagaatagaatacatcaggatgcctaacctgtttgcttgctcgctcacgatgttgtcctcagtaccaataccacttccttctggttttctttaagacaaggggtagacaagttatgactcataggcaaaatccatctggggcttgtttctgtaaatcagtgttatcgtaaatagccaaacccagttgtttacatcttcacaccaattatagtgttgaataactgtaacagaatatatgacttgcaaagcctaaaatatttactctctggtcctttacagaaatttacagaatttgtctgttttggagtcttgcccttagttcacgaaacctgctagagcttggacacttgtttccccaaattctttactaaaaattgtttatgggaatgtattaaacatattgaggataagttcttccagaaatgataaatttatcaaggaactttgctctaaagggcatttaatgtatctttaaacgaacacaaacagagaaaacatctttttatcataagaaagcatttgaaaatggtaatattgtcgctgcagagagtagccttaaattgttgcgggatgacgtaggcctccgatatagagagtattttgacttttgattaatatttgctcccataaaggatgataccttgattagccaaatatttaagaattgggcctgcctggaattttggggttccaaatagaatttttttttaaactttccactttgtcatctattttgttatttgatattttttaagtttgattaaaatgcctactgattttaaaggtaatgatccagagcttcatctttagttgcatctgttttgatagaaaatatattgatttcaaggtaccatttctgtacctctcaatgcatcaggaggcattttcaaatctccatgctttattgatttaatgggaagaaatttaaaatatgaaaaagtattattaaagtactttattggcatgcaactggtcaacatttgtttcagagcagaactacttttatgcaaagttatccaaaactaatttgggaagaaaatgaatggaactgtgatagtgtatgagcttctcttggatacttatgaagccttgagccacaaaatcactgattagaatttgctttattcgttgagtagtgtttgcctgaataatagtattttaaaataattgagacagcctggtacatgacaaggagaaaaaaatccagacatcgtgaggagtatttcttgatgacaaagacttcattttacttttattccctttggaaatggtataaacgcctgagtggaaggaatgtgtttaaatatgtgccagtaagcagcaaaatggactgatctgactcctcaccttttgttcctaataattcttgcctagaagaatgatcagtgagtcagaggagtacaatcaacagataaaagcaacttcagctagtcaagcattcgagaagttgttggacatttttaacacatagaaaaccacattatctttattctctgaaccagtaaagaaaattaaggtacagtctattggatgattgtactaatacttgcttactgcgtaggactccaagtatttgaattggcttttgttggtctgaatctatatatccatcttgcccacctaactgctatttttcctaatggctgtttcaaagtccacgtgagtcaaattggtatctttgtgctgacatagataatggtatggtcactgttgaaattggacagaaggcactgccaaataagcagttaaagtaaatctgaatttaggatgaggtatgatttcatagaccaaaatagcttcatagactttactgttttaaaatgttatgaattatgacaattattacttaaatgatgtttttaataattccttaaagtagaaattaatggtgtcctgaaaaaacacttttgactctgtagcctttaaatatcttgttcatgaatctcccaaaagaattttttttaaatagtatctcttcttcaagtttaaattggaaaactttttgtttgaaacggagtctcgctgtgtcacccaggctggagtgcagtggcgcaatctcgactcactgcaagctccacctcccgggttcacgtcattctcctgcctcagcctcccgagcagctgggaccacagggaaactttttattgtaagtttaagtataggcgtatctcattttattgtcctttgctttattacactttgcagtcactgaacatttttcctaacaaagtgaaggttgatggaaccctgcgtcaagcgagtcttatcagtgccatttttcaatgaaccattcccatataagacagcagacttaattgataaatatatatgttttgactgcgccaaaggctggccattcccccatctctgtctcctcaggcctccctattccctgagacacaacagtattgaaattaggccaattaatagccttagaatggcctctaagtgttcaagtgaaaggaagagtttcatacgtctcgctttgaatcaaaacctagaaatgattaagtttagtgaggctgagataggccagaagctaggcctcttgcaccagacagttaataaagttgtaatgtaaaggaaaagttcttgaaggaaattaaaagtgccattccggtgatcacaagaataagaaagcaaaacagccttattactgatacagagcaagttttggtggtgtagatagggtatccaaccagccacagtattcccttacaccaaaacctaatccagagcaaggccctgagtctcttcaattctatgaaggtcgagagaggtgaggaagctgcagaagaaaagttggaagctaggagaacttggttcatgaagttttaggaaagaaagtgtcttcataacctaaaatgcttggtggagcagcaagtgctaatgtagaatctgaggcaagctatccagaaggtctaggtaagatattttttcctagaaacaaggaagaacattttataataagggtcatttcatcaaggtgataaaacacttccaatcaatataagccccagtgatactatgacaaataagaaatacagatttggtctctgctcctggttcttgaaatggacctcctgagtgacagcagttctgacacagggttcctagatgccttggatgaatgataggagcattgtttattctaatgaggcaagccttggtgagctcctagataagctcagcaaggggacaggttgttaggggaaataaccatgtgattagagggttggaattttcagcctcccctccttccgcacacaccccacctccagggagcaagaatagggtgaaggtttagttaataccactgaccattgatttaatcagccatgtctgtgttataaagcctctgtaaaaacccaaagtatggggtttggagagctttgaggttggcaagtacatctatgtgcttggaaggtgggcatcccaacatcacagggacagaagccccaacacttaggaccttttcagacctcactctgtgtatctctttatctcactgtttatctatatcctttgcaatatctttgatattaaagggataaatgtttccctgagttctgtgagccctcctagtaaattaaacccagatagatgatcctgcaaacccccatttatagctgattggtcagaagtataactgacaacccactgctaccaattgacacccgaaacttggggtgatcttgtagggctgagcccttaacctgtatgagctcatgaaatcagcagatacatagtattataattgaattataaaacacccaactggtgtctcctggagaattggttgtgaatgtggagaaacccccacatacttcagtgactattgtgttgagtggtgtatgagtgtagggaaaaagtcttattccttctgaacacataataagccgtgaaagaacaatggacagaattggagggagaaattgttttattgagaaattagcaccgtatattaaataatgcttagaatcaccacgcacgatatcaacaaggaaatagacttgaacaacataaaaaccaactagatctaacagatacctgatgacaggagagtaatctttaaagtgtacatgaaaaatgctcaaggataggacaaaattcgcaaaaagggattgaaaacatacaaaacatgtttctggacataatagaatgatattagaaatcaattaaaggacatttatgtagtcatacaatatactcctaaataaccaataggtccaaaaaaaatttacaagaggaactaaaagatagtgatgaaaataaaaatatgttggccggttgcagtggctcatgccagcagtctgggaggccgaggcaggcaaatcactttgaggtcaggagttcgagaccagcctggccaacatggtgaaatgccatctctacttcagaatacaaaaaatttgccaggcatggtggcatgcacctatcatcccagttactcgagtggctgatgtgagagaatcacttgacccaggagacggaggttgcagtgagctgagattgtgccactgcactccagcctgggcaacagagcaagactacgtctcaacaacaacaaaaaaagcaaaatgaaaatacaacataaaaaacttatggtatacagctgatgaattgccaaattgcaaattattgctctaaattgctgtattttagaaaaatgtcaaatttacagtctaacctaatgaaagaaacaaaagcaaactcagtccaaagaagggaaagaataatcagagcaaagatgaattaaacagagaatagaagagtaatagagaaaaagcaatgaaatcagaagcttgttttttgaaaagatcaacaactgacaaaagttgaattagactgaccatgagtaaaagaactctcaaattactaaaatcagtaatgaagagggcattactattggccttatggaagtaactactgtaagtgaatattgtcaacagctagataacctagatgaaatgaacaaattcttagaaagataaaaactactgaaactcaaaaggaaacaaaacctgaatagatccttagcaagtgaagagtttagtaatcagaaaacttcctacaaagaaaagcctaagatcaaatggctttacttgtgaattgcatcgacatttaaagaagttttaacatcagtttttttacacccttcagaaaaaaagagtaacactttttaagtaattctatgagagcactattaccctgataccaaaatgagacaagtcatgataaagatatcccttatgaatatttcttgcattctaaaacaaacctaattcaacaaaatataaaaaggattatatagcatgaccaagtgagactgccactgccctgcctacggccatgtgccacccagctgcgtgccacttggatgctcggtgatggccactaggccctttgtacccctaactgctggcacccaaagctgtagcttggggccccaagttagccctctgctgctgttgcagccgcagacattatgcataccatctaagggcctgaggacccattcactcagcccattgttgccactgctagcacacagacaatccacttgaagaccaaggattcgtcctcctgacctgcttttaccaatatccacgtgtgttgaccgagatcctgcatatccatcccagagttgccatcactgttgcctaagaactggcctgcctgatgtccctttcactagcaaagcctcactacagccgttactaaaagccacagctttatccactgaggaactcatagacaccactgatgctaaagatagtcaaagaagtcatatggagactgcactgcttctcccacccagaatcaaagccaaaacgccttacccaaacaactctatagatagctctatagaaaaaaatgtctttcccttcgaaacccaatccatagagttggatgaagcaaatgttacaccagatgcatagatataaatgtaaggacacaagaaacatgagaaatcaaggaagcatgaaaccatcaaaggaacacaataattctccagcaacagatgccaatattaaaaaaaatctatgaaatacctgaaaatgaattcaaaatatttctgaaaacccaggtactacagaaaacagatgaacaatgcaaagaaacatttcaccatctgtatgagaaattcaacaaagatgtcagaaagaagttaaatagaaatcctgaaactgaagaattcaaagagtaaaataaaaaatataatcatcagtttcaataacagactctagatcaagcagaagaatttgtaaacttgaagacaggtcttttgaaataacctgagcagataacatttttaaaaaaaataaaaacgaagaaagcttatgtaacacatacaatgacgaaatagtggaattttcagttttcctggaagagaacagatgggtaatggcatagaaaacccatttaacgaaataataggtaaaaacttctcaagtcttggaagagatacagacatctagatataggaagctcgaagatcttcaaatatattctaccctgaaaggccttctccatgccacttcatagtcgaactgttaaaagtccaagaaaaagagaattctaaatacagcaaaggggtcaagtcacagagaagagtatccctatcacactaatagcaaatttcttagcagaaaccttccaggccatgttccacggtggaaaagtctatacaaccctacccccaaagttcaaggaatatgagaggccaaagaaagaggctgacaaattcagtttcttagaaacatttaatagggacttaggaacatttaatagggattgtgtcttgggaggtacttcaagagacaaagatggtggatccctgtgcctttactcccaagacctagggcttatatgccatagaaaaaggatatgcatgcatcagaagggctgtgtaggataactgcttaagggcattgattatagcaagtacaataacatttacattgttttgacctaggaatgggatttatggtaagtacatgctcttaagtaaaaataaactggaaatcttagaggccttcttggaactggggttaataagaaatcaacgtggtggatggaattactttggccactgcagtccaggagtaaatgaaatgataactccaaagtggtgaaaagcagaacaaacaaaaaaacacaactgtcagccaaaaatattatacctggggaagatataaaaaatgaaggagaataaatgctttccaaagcaaggaaaaattgaagttaatcaccactctactggccctacaagaagaggtcaagggagccctgcatttagaagataaaggacaatatctgtcataatcaaaacacataaaagtataaaactctgggccaggcgcggtggctcacgcctgtaataccagcactttgggaggccaaggcaggcggatcatgaggtcaggagattgagaccatcctggctaacacagtgaaaccccgtctctactaaaaatacaaaaaaattagccaggcttggtggcaggcacctgtagtcccagctactcaggaggctgaggtaggagaatggcgtgaacccaagacgcagagcttacagtgagccaaggtcgcaccactgcacactccagcctgggcaacagagtgagtgtcggtctcacaaaaaaataaataaataaatagaggaggcaagtgttactactacagaaaaccagcaaaccacaatgataagaggagaacaggatgagaggatacacaaaaccaaaaaataattcacaaaatgacaggaattaagtactgaataataaccttgaatgtaaacagtttaaattccccccttaaaaaatatagattggctgaatagaaaaacaaaaaaaaaatgacttaactatatactgcctataaaaaactgactttactggtaaagacacgtagactcaaagtgaagggatggaaaaagataatccatgcaaacagaaaccaaaagcaagcatgagtagctacactagtatcagataaaatagactttaagccaaaaagcggcaaagaaggtaattctataatggtagagggaccatttcagcaagaagattaaacaattctaaatatttgtgcgcccaacactggagcatgcagatatagaaagcaaacattattgaatctaaagggagagactgagtccaataaaatcagattaggtgtcttcaacaactgactctcagccttggactgatcatctagccaagtcatcaacaaagaggtattggatttaaacttcgttttagatcaaatgcgcttgatagacatttacagaacatattgtccaacagctacagaacaagtattcttatcacatgggacattcttgaggctagactatttgttatacaacaaaagtagtctcaacgattaaaaaaatagaaataatatcacgtatcttctcagaccacgatggaataaaactagaaatcaacaatgagaactttggaaattgtacaaatacaaggaaattaagccacaattatgagccatcactggatttaaggagaaataagaaacaaaaagtttcttgaaacaaatcaaaatgggaacacaacatatcaaaatatgtgggatacagcaaaagccatgataaaaggatgtttaatagcaacaaatacttacatgaagaaagtagaaagattttaaagaacctattgatgcacctcaaggaactagaaaagcaagaacaaaccagatacaaaattaacagcaggaaataataaagtcagagcagaactaaattagaggtgaaaaaaaggctatacagaggatcagtgaaatgaagagttgggttttttttttgagagaataaacaacattcataaattgctggatagactaaccaagattaaaaaagaagacacaaataaaatcccaaccaaaaaaggagacagtaaaacttatatcccacaaaaatagaagattgttagagactatcgtgaacaactgtctgaacaaattggaacctacgggaaacagattcattcctggacatgaggaaactaccaatatttggccatgaagaaatagaacacctgaacagatcaataatgagtaatgaaactgattcagtaataaaatgtcttctaacagagaaaagcttgagcccaggagatttttactgctgaatgctacaaacttacaaagaagatctaacatcagttctcctcaaactattccgaaaaattggagaggagggattttttcctagcttgttccatgaggccagaattaccttgatgccagaaccagataaggatacaataagaaaacactataggccagtattcctgacgaacttagatgcaaaattcctcagcaaaataccagcacaccaaatctaacaaatcaataaaaagatcattcacgatgatcaagtgggttttattccagggatggtaggatggtttattatatgtaaatcaataaacatgatacgtcacaaaaaggtcaaaaattatatttttaatataattatatatttttgcatctcaaatgcaaaaaaagggtttcataaaattcaacatcccttcataataaaaaaactcaataaattagacatagaaagaacacatcatagtaaacgccatgtatgacaaagctgcagctaactacatactgaggcagaactgaaatcctttcttctaagaactaaaacaagataaggatgctcaccttcaccactcatattcaatatagtactggaagtcctagccagagtaaccaggcaaaagaaatgcatccacgtttgaaaaggggaattcaaattgtcctttcttcagataacatgatcttatatatagaagaacctaaagactctacctgaaactcttagatctgatagatgaactcagtaaagtttcaaggtaaaaaatcagtgtacacaactcagcagtgtgtctattctctaataatgaactagttgaaaaagaaatcaggaaagtaatcccatttataacagctacaaaagaaaaaacctgggaataaatttaacccaggagtaatttcattcgatccagcaaccccactactatgtttttatccaaatggaaggaaattaatgtcagagttatagggcatccctgtacttactacagtactattcttgatagccaagatatggaattaatctgtgtccatcaacttatgaatacacaaagaaaatgtaacatatatacataatagaatattactcttccattaaaatgaaatcttggcatttacggtaacgtggataaaattacatttcattatattgagtgaagtaagtcaggcattgaaagacacatattgtatgctctccctcatgagggagtttaaaaagttgatatcatggacatagagagtaaaatgatatttaccagaggctgtggatagtggtggtggtgggattaaagggaggcgaatggaaacatatagttagaaggaataagtcctattctttcatagcaccggaggatgaatatagtttataattgttgaatatttcaaaatagctggaagatttgaaatgatcccaacacagagatgtagtaaatgtttgaagtgatgggtatccaaaatatcctgatttgattattacacattacatgcatatttcaaaatatcacatgtaccccataaatatgtatagttattatgtgttaatgttttcttaaacttagatttcagataaacaatctaatgaaacactgtaaagaactagaaaagcatgggaaaaaaactcaacattagtggaaggaaacaataaaggtcagagcataaaaagtgaagttcagattttaagaaacaatttaaaaggtcaacagaaatgaaaagttgggttttttaaaacattggcaaaattggcaaggcacagtggctcacacttgtaatcccagcactttgggaggccgaggtgggtggatcaggaggtcaggagatcgagaccatcctggccaacatggtgaaaccctgtctctactaaaaatagaaaaattagctgggcgtggtggtgcatgcctgtagtcccagctacacgggaggctgaggcacaagaattgcttgaacccaggaggcagaggtttcagtgagccaagatcgttccactgcactccagtctgggcaatagaggtagactccgtctcaaaaaaacaaaaggcaaaattgacaaactttttgctagtctaagaaaaaagaccaaaatcaataaaatcagaaacaaaaaaagagacataactactgataccgcagaaatacaaagaaacacaaaatcattagagactcttatgaagaagtattccccaactacttggaaaaacgagaagtggaggtatttttagaaacatacaaactaccaagaagattcaagaaccacgaagttcatcgggaactttgaagaaagaaaaaacttgaacagaccagtaatgagtaacgagatcaaagcactaataaaatggtctcccatcaaagggaagctcatgatctgacagtttcactgctcagttctgtcagacatttaaagaagaaccaggccagatgcggtgactcacacctgcaatcctagcacttgaggaggccaaagctagcagatcacgaggtcagaagttcgagaccagcctggccaatatggtgaaaccctgtctctactaaaaatagaaaaagtagccaggtgtggtggcctgtagtcccagcaactcgggaagctgaggcagacgaatcacttgaacctaggaggtataggttgcagtcagccgaggttgtgccactgcactccagcctgggcaagagatcgagactccgtctcaaaaacaaaaaaaaaaaattatatatatacatatatttagatatatatatttttatactatatatatttatatagtttatatatattttatactatatatatttatacattatatatatatttatacattatatatatatagagagagagagagagccatggtaaccaatatagtatggtactggcatggaaatagacacattggtcagtggaacagaatagagaaacctagaaatccatgcatttatagccaacttagttttgacaaaggctccaagaacatactttgaggaatggggagtttcttcaataaatggtgctcagaaaactggatatgcttatgaagaagaatcaaactagactcttaactttcacaatttacaaaaatcacctcaacttggattaaagagttaaatgtaagaactaaaaatatgaaactactagaagaaaagattggggaaacactacaatggtgggatgagtaaagattttgcagggggtcggcgggggaggggaagacctctaaattatgagcaacaaatgctaaaatatttagatgtggtgtcccatcaagctaaaacccttctgcccagtaaaggaaataatcaacaaagtgaagatacaagctacagaatggtagaagatatttttgagctatccatttgaaaagggattaataaccagaatatataagtaactcaacagcaaatggtcaaataactcgattttaaaatgggcaaaatttttgattgaataggtatttctcaaaagaagacatagaaatggccaacagatacatgaatagatgttcagtgttacagggaaatgcaaatcaaaaccacaggagatatcattttacccgagttaaaatggtttttatcaaaaagacaataaacaatgagtgctggccagaatgaaaagaaagggaaactcatacactctctgaaaaagacagtatgaaaaagagtgtgaatgctcattgaaaaactatagaactaccatatgactctccattcccactgcttggtatatatttaaaagaaacgaagtcagtatattcaagaaatgtctgcactcccatgtttattgtagtactattcacgttagccaagatatggaattcacctaaatgttaatttatagatgaatggatatagaaaatgtggtacataaatataagtggaatattactcggccatagaaaatgatgaaattatgttattggtagcaatgtggatggaacacagaggtcattatgttaagtgaagtaaactggcacagagcgacaaataccacatgttctttctcaaacttgggggggcttaaaaagtagatttcatgaaggtagagagtagattggtggttaccagaaggtaggaggaggaggggcacaggggatttagaaagggttttgaaaggttgattaatgggcacttttctctttccctcggggcatttggcagcggtggtggcttttgcagccgtagccaagattaaggctcaggatctttgaggcaagaaggaagaggagctgctaagacagctggacaacctgaaggtagacctgtcccagatgtatgtcgccgaagtgacaggtgcccgacattccagttctcttagattgtagtcatttccaaatctgttgcctgtgttctcaccgtcattagccaaactcagaaaacaaacctcaggaagttctacaagggcaagaaatactagcccccagatctgtggcccaagaatacttgtatcatgtgccactggctgaacaagcatagggagaacctgaagaccaagaagcagcagcagcaggaacaggctgtaccaacgacagaagtaagaggtctaggcatgaacattgctgagtcaaaattcaaactggaggaaaaaaaaaggtgttaggttaatgggcacaaaaatacagttagaaggaacacgatgtattgttcagtactgcagtagagtgactatagttaacaataatttgtatatcttaaaataactggtggagagcaattgaaatgttcccaacacaaagaaggggtgaatttttggggagatggatgtctcttttgccctgttctgatcattatacgatatatacatatatcaagatatcacatgtactctaaaaatatatgtagctattatgtttcagtttttaaaaactctgtttatatgtagcataataaaatattttgtgtctttaaaacaaaattaaaggaataactaaaggaatctgtatgggagaactgatcttgtgtgtagaggatcttcaggactatacaaaagaaaaaacctattaggactaaagacgttcagcaaggctgcaaaatacaagttgagcatttgcaaaacaattgcattgctatatactagcaatgaacattaaaagtgaaataattttacagtagcatcaaaaaatcaagatattagagaataaatttaacaaaataagttcaagtgaaactacaaaatactgaagaaaggaactgtaaaagtggaaagatcttttatagtcatgtattggaactttattgttaagactgaagtactctccaaactgatcttcagattccacagaatcactgtgaaaatccaagttcactttgtatatgtatgtaaagaaatggacagacaaatcctgaaatttatgtggaaatggaaagggcccagaatagtcaaaatatagaaaaagaggcaaaaaattggaggactcctgatttctccatttcaaaacttatcaaaccatgctgcagaataataagatgcaaataaaagggaaaatatttcatgttcatggactggaagacttaatttttttatatattatactatacaaagtaatctacagattcaacacgattactatcaaaatctcaataacatttatcccagagatggaaaatgttctaaaaatcatatgagagttcaaggtaccccaaataatcataacagttttgaaaaagaacagagttagagtactcgtatgttattttaaacatattacaaagctacagtagtcaaaatagtgtggaactggcataaggacaggctaatggaatagaatagagtgcacaaatcctcaaatcttcaacaagagtgctaagaccactcattggggaaatgtcagactttttaaaaaatggtagtgtgaatacagtatcttcatgcaaaaaaaagagaagtaggacccttatatcacacagtgtataaaaattatctcaatgttttaaagacctaaatgtaatcctgaaactataaaatcctgagaaaaaacataggggaaaaacatcacgttattgtatgtgccggcaatttcttcactgtgacaccaaaagcacaggcaacaaaaacaaaaatgggactacatcaaactgaaacgtttgtgccttaaaaacaaaggggtgtgtaaaggcaacctacagaatagaataaaatatttacaaatcatatacctataaggagttaatatcggactgtgtaaagaactcctatatttccacatctaaaaatcaaatatcctgattttaaaaggggaaaaatactttaatagatatttatccaaagatggtctagaaatgttcacaagggccgggcgcagtggctcatgcctgtaatcccagcactttggaaggccaaggtgggcagatcacctgaggtcaagggttcgagaccagcctgtgcaacatggtaaaaccccatctctactaaaaatacaaaaaattagccgggcatgatggtgggcacctgtaatcccagctacttgggaggccgagtcaggagaaacacttgaacttgggaggcggaggtcacagtgaccagagattgtgccactgcactccagcctgggccacgagagcaaaactccatttcaaaaaaagaataaaagaagtgttcacaagcatatgaaaacatactcaacattctctaatctagaaatgcaaataaaaactacagttgggtatcacctgatacccactacgatcattgctatcaaaaaaaatagaaactatttttggcaaggatgtagacaaattggaaacgtactgttgtaggaattgtaaaatggtgcaatcactgtggaaaatagcttggagggtccacaaaaaaatgagaaatataactatcatgtgatacaccaatctcatttctgcacgtatatatataaaaagtttaaagctggattttgaagagatacttgcccacccatgttcgtagccacacttttcacattaaccaagaagtagaagcagaccaaatgttcatccacagatttatgtataaataaaatgttgtctctacataaaatggaaaatcgttcagccttaaaaaggaaagaaatcctgtcacatgctacaacatggatgaaccttgaggacattatgctaagtgaaataagccagtcacaaaaagaaaaaatatgattccatttgtttgaggtaagtaaagttgttaaattcatataaacagaaagtagaacgttggttacaagtggctggcatgaaggggaaaagaggagctctttaatgggtatagagtttgagattagtgaggtgaaaaagttttggaattctgttccacaacagtgtgaatatactaatgtgaaacagtactgaactgaatgcttaaaactgttaacatggtaaactcagtgcaaagcttcagtaatcaagagttatgctgatataaagctcaacagctagatcattgcagtataatcaagtgtctaaaaataatcccatacatttatggtctgttgatttcaaaaagagtttcaaaacaatttggtgggggaaaagtagtctttccagtaaatgatgtcgtaacaactgaatatccacatgtaaaagaatgaagttgaatctctgctttctatcgtacaaaaatgaactcaaaatgggtcaaatatctaaatataagagctaatgctacaaaattttttggagtaaatctttgtgatgttggattaggcaatgatttcttagatataaaatacacaagtaagaaaataaaacacaggtaaactggatttcacctaattaaaaccttttgtgcttcaaagtgatagggacaagaggcagggaaattctgggcagaagaggatgggtccccagtgagggctgcaccctcaagctgaaaagcctgatgcggtggcccaaagtgagaacttacatccctgatttcctgttcaaatgttgccttttccaaaaccacccatggcctgctctgccccccattcctgtgcccataaaagccccagcctcagccagcagagagaggagaagcagctggacattggagactacagctggatgtcagagagaagtggcttgacttcagagggacagtctgacagcataacttctgagaagaatctggccagagacagccaaacttcagtggcatttaccttcccactctgtccccttttcagctccccttcctgctgagagccacttccatcggcaataaaatttcctgcatttaccatcctccaatttgtttgtgcaacctcttttctcctggatgctggtaaagagctcaggtgccccaagtgtggttgcaaaaggctgtcacactgaccctttgcccttgctggcagaaggcagccatctcacccaaaaaggcagaggatccactgagctgttaacacttaagccatatgcagacagccaagctaaaagagcacccaaacacttcctctgggacttcaggggtcactggcacccctccccagatgttgctgcgggaccagtacagagttcactcctgctggtgcccgaaggcatttgcccgagctgccgtacccactcacctgtttgctccctccagcaaggggtggaacacagcagatttgagtgagtggagttggctgactccagtgctcatatactcccatatctgcccatgaaggggtcagggaaatatcctgcttcaaaaggacatcatcaagaaagtgaaaggaaaaaaatgaaaagacccacagaatgggaaaagatatttttaaagtacatatgtgataagaaaattatatctagaatgtgtaaagaagtcttacaactgaataataaaaatataaatattccaataagaagggaaaataggattttaacaggcctttctctaaagaagacatgcaaatggataattagcacatgaaaaaaagctgagggtcattagtcattagggaaatgcaaatcaaaaccatagcatacccgttcatacccataacaatacctaaagtaaaagggacagatgttagtgtctgtgaggttggagggaaactggaaccctcattcgctgcttgtgggaatgtgaaatggtgcagccactttgaaaatgagtctggcagttccttaaatgaataaacaagattaccataggactcaataatcccactcctaaatatatgcccaggaggaatgaaaacatgtttacacagaaacttatacatgaatatttatagcagcattatttataatagccaaaaaaagaaaatagtctaaacattcatcaatttataaatgaagaaacacaattggtatatccatacaatggaatgttgtttagaaataaaaggacattaaatactgatttatgcaacaacatggatgaacttggaaaacatgttaagtaaaagaagctagtcataaaaggctacattttatatgattccatttatttcacatgtcctgaataggcaaatctgtataaagaaaatgcagatttgtgcttgccaggtggtccctagtgagggtggtggaagagatttggagaataactgctggtgggtatggagtttctttagggagtaaatgttctgaatgtagatagtggtggtgattgcacacctttattaaaaatcactgaattatatggttcgaaagaatatactgtgaattgtattttaataaagatgatacttttttaaagttatagtagttgatgctatcatcatgtaacaaaattaacacacttttttaagagaaaaattttcgtttttatactcatattttagtgtacttttacaaagaagtttattaataacaatttatttaaagcagataatgttacaagcagttgaattttgcagatcacatatcaaaaaatagttttggtgattaactgatgactaaattagaccttcctttattttcatttaaagcaaagaattaaacaccacctgacttggaaaaagatttgttacctagtcattatttattcatctccccagaacatatctaaaaaggtattgccaaggtatatcataatgactgttcattgtatgtgttatttttttaccttgagacaccttgtttgacctgatacagttggaaaggattgggaaaactgagttattgtcgtcttcagtatactgttgcaaaacaatatttttcattaaagttcctttctgtgctttaaactaattatcaacaaaatttttaaactgcagatttaatttatttaacttatgagaaatatctactaaataagttagctgacaaagccacttctgtcaaaccatttttttcagtgtttcatacaaactatgcattctttgctgatgaaagaggcaaggtttttaacaacaacaacaaaaatgtcagcactgtcattgtaactatttagacagcttgaatgggacgaattgttttattttgtgaaacaggagaagggtggctgggaaaggggaggtgggaagtgatgactcctatggcacacaggtgtatgttctcaggcaaatctgtctttgaatttgaggttgtgtatacatattcccttaaaatgatgcctgtgcgtcttcttgaaagtcttcctctgttacccgagctggaatgcagtggcacaattatggctcactgtaacctcaacatcctgggctcaagcgatcttgcccctcagcctccagagtagctgggactgcaaagcacgtgccttcatacccagctaattttcatattgtttctagagagggatgttacccaggctagtcttgatctcccaggctcaagtgatcctccttcctgggcctcccaggcagtgtgggattataggcatgagccaccatgcctggcctcctttatatttatttttaattatttatttattttttgaactggactctctctctgtcgctcaggctggagtgcagtggcacaatcttggcttactgtaacctccacctcccgggttcaagtgattcttctgcctcagccccctgagtagctgggattacaggcgcccgccatgacatccggctatttttttttttttttttttttgtattttcagtagagacaggattctattatgttggccaggctggtctcaatctcctgacctcaagtgatccgcctgtctcggcctcccaaagtgctgggattataggtgtgagccaccgcgcccggcctctgctactttttaaaagtctatctccagaagtctgctttctcattttgaataccgtaggtattcaaatgaattcactttcaaatgaattcactaggtgctgttctacccttctgttagccttttacgaaagaatagcgtgaccttgaaaagcatacatttatgcatagtagtagtgtatgcaggtatatttatttatttggttggttggtttttttattttttatttatttatctgttttgagacggagtcttgctcttgtttcccaggctggagtgcagtggcacgatctctgctcactgcatcctccacctcccgggttcaagcagttattctgcctcagcctcccaagtagctggagttacaggcggccgccactgcacccggctaatttatgtatttttcagtagagacggggtttcaccatgttgagcaggctggtctagaactcctgacctcgttatctacctgcctcggcctccgaaagtgctgggattacaggcttgagccaccgtgcccggtcacaggtatattacgatgttggtacactttgtattcacttggactacattttgctagagatgatacctgtgacacttctctgtgctctgcgttcctctcctgcactcgtaacagatgtatcttgctgtctatacggaacctaaaaatcctccacagctagcagcttctactagttgtttggaactagaataagaggtgattctctgtgataacaattttgttagttttcttagtttgtttatatctttgctctttttgtagtttggattttctaattactttattaatgcaatttccttttgttaaactttattgtccttaaaccagcttggagacgtgctgggagataattttccatgggtctcacactttcctgtacgttttgcgaacagaggctgtgactgcctttgttcttttctgtcttttcaagattatttctatatacagtgagtagctttggaagatgctgtagtgacttcacagcagcggtcaggtttgcatatctccctggaaggtagagctggtatctcccgctagtgcaaagggataggcgtatttcccatgattaaagattccagctcctgaaggttagggtttctctcctataatgcaacacactgcatgtgcaggtggcctgtggccctattcaggttgctctgtgacatttgggacttggggaactagagcccagtggtcacaagataatgttgatattctggctgcccctgttagtgtaagtaataaataccttgtctctcacccaggagacttctttcctctgccagcattttattagcttgtgacaggctaacttgttagtttgaaagtagtgtaaatctcagatccttcacaggtcttgatagtatgtaggtaacacaaataaatgcataaacagctgagttcagctcagaaatgtccgtttttacccatgtttttcattaaaaactgtattatatattgtataaatgtagcgtcggtttttcaagtttttttctacattataataagtttttggtataagtttgctatttatatttaatgagaattttaaaagcataataaaccatgtttttagtgcagtaaaattgtatgtatgtgtatataaacctgtggttgctttgtttttgttttttgagatacagttgcactctgtcacccaggctggagtgtagtagtgcagtctcgactcactgcaacctctgcctcctgggttcaagtgattctcatgcctcaacctcccgagtagctaggactacaggcgcctgccaccacgcctggctaaattttgtatttttagtagagacagcattttgccatgttggccaggctggtctcaaactcttgacctcaagtaatccacgcacctcagcctcccaaagtgctgggattacagacatgagtcaggagccactgtgcccagccctgtatttgtaaatagatgtctagttatgttatttgtttgtttgtttgtctgttttttgtttttggtttttttttttgagatggagtctcgctctgtcacccacgctggagtgcagtggcaccatctccgctcgctgcaacctctgcctcccgggttcaagcgattctcctgcctcagcctcccgagtagctgagactacaggtgcatgccaccatgccaaactaattctttgtatttttagtagagacggggtttttactaaacatgttagtagtggacgggctttctgctaaacatagcccggttagccaggatggtctctatctcctgacctcgtgatccacccacctcggcctcccaaagtgtggaagttacaggcgtgagccaccgcacctggcctagttatgtttttagaaacaaattattggtctgcctcatcatatatttatgaatcagtcttaattccatgaatgtcatagtgatgtactgtttgcctctgtttcagaatattggaaagaagatgacctgtcaggagttcattgcaaatctgcaaggggtaaatgagggtgttgatttctccaaggatctgctgaaagtaagcatggaactattggtttttagtgtatgcttgtatttctgtttgctgcttacagcttaatcctaagtaggctaaggatcacttaagtattttgctttttgcttttggttttattggtgatgtttcttttaagccttgtccttgatttttcgtgctgcaaagtaccttaagttgataatttctagaagtctgcattataatcaataatactgaggtaagtaaatttggaatggttggtgatacaaatagtgagtggcagtttttgttcgatttatttgtaaatagactatcagaatttaagaaagatcccaaaggtatatgcactacggaaacagagtagcatttgcaggctataatggaaacagttccaactgtgttcaatccctagtctcagagccactcatgttgtctctggaaatagattaaattaaattctcagtaattgtagaatgcctgaattatttgcatttggctttattattggtaacatcagcatgatgtttttccccctcatcagattgttttcaaggagacaacaaaatcaactttggaattcatgcattctccagcattgtaaatgagatgggcatttgattgagtacaaaataatgataatatgagtatttggggggttgtagggtaagattgtatacattgagaatgtggtttttacagttgtctttttgattctagccttttaaaaaacagtacacgtataggtttcttttggaatcaatttctttaaatgaattttcaagaaaggtgacatttgaatcagctatggtatggaaatgtatgatatgatatggaaatgttgaaagagaagtcctttgttgtgttttatgtaacctttaagctacatagaatagagttctgccagatttggaaagacttatctactatggtaaatgaaagaaggcattacgatgtggtattacgacattcttagtcttactaactttatttgcagcacattacaagaaattatgaaaaaaaaatcaggaagaaaagtagctttaatttatggagtaaagaaggcattttctttaggtcctttgtacagcaagtgctgccatttctaaaggtataaatccaaatgggagcgggagataaatggtgcaggattgtgacgtgataaagatgttttacatcttccattgaatccgtatggtgttaacaagacttttttcagtctagtgatatttgcatggaaaattatggagtctctctaagagaggatttgtgaggcttttatcaacttatgtcagaaatgaaagttgacaggaaaattttcatagtgaagcttttagaatttagtggtaggcttatggtaacctgcatgacggttggcaaattattggctaatttagagcatgtttggcggagctgtatgaaaccgtgtatggttaatatacagtccagaggctactgttcaccttgagtaaacgtgttctttgacttcctctaccaagaatttgccagatgatttgttgctgttgtgcaatgagattatgtttataaacctcatgggaaagtatgtattatttgtttttttgttgtgagaagatgatagtgaaatgataccgaaaatggtggtggttagcatggtaattgtcaagtgaagtattgattctcttccataacaaaccccagccgctcacccacccaagatagttttccatttcagtaggaatgggttttactgaaaatttcagtaagaaaaggttttctttaaaccacgttggtttcattcctctattctgtgtgctgttcggttttccttccctttcctccctttcttcctgccttccttttctcctggtttctttttatttctgtcttttactttctctttggctttctatttttcttttggtgtctttttttctcattctctttctcttagaatagctgtcgctggattccctgctgagataaattattgggtggagtatatacttgaattctgggggaaaatattgttacatatgtgctacacagatacatacatacatagaaacttttcaaaatttggtgtcatcttacaggtttttaatatcatggtcattctctctttctttgccacctttccaatctccatgttacaggcatgtgtgacattaagttttttttgtgtgaaataaaaggaaaaattatgacctttattaggtttcctcataatcatatatagaaactgctagattcaatattaaaaaagcttaaagttacataaactgaggcttttattgttacgtattgaccttgatacttttagattaatttggttcaaaagtaacatttggatttatgtctgttcagatttctttggcccagaagtaacatttgtacttgaatgtctgttgttccatgtcattttgtagctggaaacatttattaaaggtctgctgtgtgtttactaggtgttgtgggattggagaagatgctgaaaccaaatgggcacctgtcctcagagatcacagactactgagaaatattggaggtgtctttctccataaaataaacagttattccatgttgaaataaaagtataagccaaattctgtttttttgttgttgtagttgttttctgaagagaaagggttaagaaaaaatagaccttgacatatttaaatgtgtgagaaatgagaagcttgtgtacagtccttcaattcagttgatttaattaatattttgcttctgaatttgccttatactgtattgaagggatagatgatacattgagccctttttttagtttaaaattccattgcagctttcgttgtttactcaaataacctaaaccgatatttgacattttttcccctacagggtgtttacagtgtaagatatggatatgtgtaataaaagtgaaataagttggatatcagaagacaaccagtgatagcatattacttaggttcttcaaagcagaaggctgggaggaggtgatgtttgagatggtgtattagtccattctcccactgctgcaaacaaatacctgatactgagtaattcataaagaacagaggtttattttgatcatggttctgcgggctgtacagaaagcctgatgctggcatctgcttggcttctagggaggcctcaggaaacctaaaatcgtggcagaaggggaggcaggcacatcttaagtggccggagcaggaggaagagaggaaggaaggagatgctgcacactgttaaataaccatagctcaggagagctcactcgtcatcatgagaacagcaccaaggggacagtgctaacccattcatgagagctccgccctcctgatccaatcacctcccaacagaccccacatccagtactacggattattattcaacatgagttttggtggggacacaaaccatgtcagatggccttttgaagtataggtaaaagacttgttatcttggttattattccattgcatttcctgccccttctttcacccaaagacattctcatatttacccctctcaactacatgaccaaatcaagacagtcattcatataacaaaataggccagatcatctggtatgattcacatagtacagataaacacagaaaaatttgctactgtcttacaagtttctgattaaccctgtgatcatgtttctactggctccacccatcccagcggttggatgtggtttgtattcaagcatccttggggacaatggaagagaaaggggaggttctgctttgggtctgatagattttgtaaaacattcgtaaggctctaataagtattacaggtactaacgacgtgaataaagagggataagaatgtagaatgcaggctagctctgtattgtaggctgtgttttgagagacagtacggtatgaggattgagattatgatttgagaactgtactgactgggttctaataccaggttctgtctcttaatagtcaggggactacgtcaagtaaatagtgtatttcaatatcctcatctataaaatgggagattttagagtcctcacatatagtaagtattgtctgttagctattaaaactttttatttttgatattattttacttagcctaaagtgggctggaaggaccctatcccttcctgcaggtatctggttttaagactttttagaggcgagtgagattagcggcagtagtcaaaacctctacccaccatccctttttagcttgctgctttccaaagatacatagcctctgctctttgaaaggaagcacctgtgacgttgactgaaaatgaatcttgcttaacccttacctttttaccttgttaacagcctctttctcctgggcctatccttcttcccacatttttaaacctgacgtttgatttgcgtttttagtgacttccctctttgatgctacaagaggggaagtactagggtgcattggctcttgaactggtcctggaatcttgaagaacctttgaggaagcaaactagttcatattctgctaagatcccaagattatcctggaatattgatggagatgtgaattacttgaagtgattaaaacatccctgggggagacaagggttgctagagatgtgccttcctaatggagaggcgttggtctgaaggatcaggtccaggaattgttgggattctgctttgtctcggggcaatttttatggactcttgactgtgtcagcctggggacttctttcacccagtcttatcagcggctgataccaactagtgaagtgttagcttttgattatgtgcatatttctgaaactcttcactctgtagaataacctttgaaaattcataacagcccagatacggaatcatcctaaatgttcatcagcagacgaatggataaaatgtggtagatatgcacagtggaatattatttggccttaaaaaggaggaattctgtcatttgtgacatcgataaatctggaggacgtttcactaaatgaaataagccaggcacagaaagacaaataccgcatgatctcacttacagtggaatctaaaaaagttgatctcacagattcatggagttaaatggtggttaccaggggtctggggatggtggggatttaaacaaagggtacaatttcctttcgactatataaataaatcatagagctttgttgtatagcatggtgactatagttaataacatcatattgtttgtttgaaaaatactaggagaatagattttgaatgttctcatcacaaaacagtatgtgaggtgagaaataggttaattagctttatttaatcattgtacagtatgtatgtgtactcaaaatactgcattgtgcaccacaaatatatacttttcatttgtcaattaaaacatttaaaaataagaattttcttgaaagttcctctatcttaatgttcaaaatgcagtgtcttgatcctctgcatttctgttccctgaattttatttctactgagtttcttaggaaacccttgttcttgtttgtaacagaaaagctgcgtttctatcttctatcgaatctgctctgcatttctaactctggtggttgataattgtccatttctcattatatacagaaaagacacagggcctttcagtgatggtcaccaggtatttatatatttagagatgaattgtccatttgaaaatgtatttacatgaaagaagggaagaaactgagaaataaatgacaagaagatcctggcaaatggtctaggaacataaagggtggaaggtcagttattggccgtcccataatttcattctgaagagacatctagactgtagattttgatatgacatgaacccaattgttttctatcccactttcccattgccatctaccatttaatactctgatactgctctccttagtatttttattccagtcattgttagatctttatttcttttttgagcagcagttaaattcagtaagtaccaagggagagtagaaagaaattagctgaaacagtctctcctttaaaaatttttataccaacttattgatggaaagaacagaaacaacaaaacaaaatgttccaaatatttgtgataaaactgaacacaatttgcagaatgtttaaaaacataccttgaatgtatttaaatacacaagtaggtctaagaataattctagttagaagacagtgtcactggaaatcatttaaaaacgtagggaaataaatcttacagataccaatcaatatgacagtcttttaggttattgcttgctattagatgtttgacattagaatattctttaaatttttaagtttttttatagaaattgctttacttgggaatttatgaactttgaaattagcacgtcttcccttaagggaagagcaaaagttttaatgtggaagaaagagagagagagagagagagagagtgtgtgtgtgtgtgaagaatgggttaaattgaaaggatgtaaatcagtatgcttggcctagcaggatttataagcttcactccatgaatggagtgataaaaaaacagtgaattaaattgttacatagtctgttggttagaattttaatgaaagttgtcattcaaatacatttgttttcccttgctttctcaaaggacagagtttaggcaagattctcttaggagacagttccaagaatatgtaggatacctccatcccgtttttaacctatcttgtcagctgaaaggattatatatgttgttttaaacataattttctcatttggttttcttaaggaaaaataatttgtgaaaatgatggagtaattagccaagaaggtagaatttaaacagactcaaaagatcagcaaagataaaacacattttaaataaagattaatgcatctttttggataaggaagaaacataattagaaaatataaagtgaggctctcagatttgtaaccattaggctttttaatcagttacagctgtatataagggtaaagaacaacagatgaatcagccattaaaaatctagagataagccatttttgtaagttcaaaccccaaaaaggatctgttcacacggagtgacagcaaaagctgtaatgattcttcttaaaaaaaaaaaaaaaaagagtaaaactgacccatctctctttctgagttccatctacccctttcagccagggagaagattggaaatttaacactgacaattgccctacttttcaatattttctaccagaaggcttaacctaagcaacatgaagtcttttttccctatttgatcttcccactctcattgttgctctctcctctctcatctttacttcctgattatcgctgagtacaagtatagctggagacatcagaataagactaggttttattaatgtcaacattctggtttgtgctatcatactatagttttgcagatgttaccattggaggatactgggtaaatggcacaaggactctgttcttttcttacaactgcctgtgaatttgtaattctgtcagtaaaacaatgacaaaaataatggacaagtccactctaaaaaaaaaaatggggcagtttgtctattcagccagaggttttaggcatcatataaaaataggcttaatgaaattttactactcttggtcattcttttaaagtactgagtacagtgtaatgaccaacagttcagaaataactatataacagtattaaaaacactgacgttttaagaaaaagacaatgggaattgttttgaagaattgaaaactggaaagtaacatgatcctatgtttattgtcatgttttactctggatatttgaagaattgtttaggaaagtggaagtggaaagatggtaaaatcgcaattgtctatgtgagaaggatggtggctcggatgctggtggtgacagtattgaaggaaatatattaagtattgaattatttagagcttcctattagagattctgctggtagactggtttcctcattgcccctttgtcccttacctgaacgaagtagaaaagaaacaaagagtagaatctgaattttctctacgcagttaatgtttgtttgtttgtttgtttgcaacggagtcttgccttgttgcccaggctggaatgcagtggcatgatctctgctcactgcaacctccgcctcctgggttcaagtgattctcctgacacagcctcccgagtagctgggattacaggcatccaccaccacgcccagctaattttttttttttttttgtatttttggtagagacagggttttaccatgttggcaaggctggtcttgaactcctgacctcaaatgatccacccacctcggcctcccaaagtgctgggattccaggcgtgagccaccgcgtccagatcccagttaatgtttatttggcctgttaggctgaatgtcatggaaggctgtgtggcagagtaaaatgagtagttacagatctggaaagtaatcccaatatcttaccttggccaagcaacttaatccttttcagttttctcaggtacggcatgggataaaaacaccttcctctaagagcggttaggagaattaaatatgatgaggtgtgttaagtggctagcagtgtgcccgtgtggaatgcactagttgttctgactgggttatggaagtcgctgggctctaagcctgtcttagtgttgctagtgactagtggtggcgcctccgggtgatcatttcactttgtgcctgagtttcctcatttgtaaaataagatatttggcctgtgcctatggttttcaggttttcggtttaggcttctggagcctgtgtccagtgttcactcctccctgtcaccgctccccttctgctccagaagttgttctctttttctgtcatgttctaacttcctctggtgatgtcttttgagcaaaatattatgtggcaaaaaagaaattggaacaacttcacagggtgatcttgtaaggatcgtttcagtctaagtgctgggcattttcttaacgtcattttgaatccaaatcgcatttctaaagtgttaactctcttagctctcaccttgtatttactggtttagacaaagaagtgtatacttaataatgaaaccagagaatgttcagatttaaatccaagaaaattgcttttgtcattgcagcattttcaaaagattattcccaaaggactacacaagaggaagaagcagacctcagtcagaaaaaggtctgaactttttataaaggaaaagcctgaactgaattctcaaaaatacttgatctgagttatattcggagtatgtagttgaaaataggaacttatgggtggtatttaagtgtagctaaaaaaagagcatcaactgttgcctagagtaggtgagttctttccaagagaaggtcatggaaacctggtagcaacagtatccatggaggaagagggcttggatgcctgtcctgtgtaagtcggagagccttttaagagaaaagctaggtttgcaagctttttaagagaaaagctttaaaggttctggcttaaaatatggaatattgctgcttttttcagtaaagtaaatcaagctgagttaggtgatgaaaggtgcgtggcgtgtttccgcttctgccctccccgtggaggtctggcagcctgctttcgctttcgatcacgtgctcatcatgggcagaataatgatgctgcttttggtgtggttcagaccatgaatgaaaaatggtgacgataatgagggtaatatttgaagtaactgaagatccacaaatcatgttcatgtgttttcttaaaaaaaaaaaaaaattaccaaaaagaagtctgttacaatgttttaacagaacagatgctgcttaagagtacaaacagatttttaacccccaaaaaaagaaaaaaggaaaaaagtttgagtggtggtggttgtaatcattaagggtactgtaatggaatattaatgattcccagtgggaatttatattgaaatttattttcaatttgatcatgaagaagtgctacagaatttcctattcagatgcatccatagacgtttgaatgtttgtatgtttggagcatttttatgttatgttatgttatgttatgttatgttatgttatgttatgttatgttatgttgagacagggtctcactctgttgcccaggcaggagtgcagtggtacaatctcggctcactgcaacctctacctcctaggttcaggcgattctcctgcttcagcctcccaagtagctgagattacaggcgcgtgccaccacgcctggctaatttttgtatttttagtagggacaggggtttcaccatgttgaccaggctggtctcgaactcctagcctcaagtgatccgcccaccatggcctcccaaagtactgggattacaggcttgagctgctgcacccggccttgtttggagcatgtttaaagtgtcataacagtccaagattgctgcccctctcactaacatgagcatgtattattgatatgaatgtaactggtcacatcatgaataaaagctatcctctttttgcttatgatatgtcaggagactgaggagctccttgggatgattgatgccctcctttcagcagaccagcaatgcaaggataagtggaactaccatggcaaatattctatcctgaacatggtatttacttagccaataaggatacagaaaaacaaattttattttaaaggcatttataattatatagtcaaaatatcccataaaggaaaacagtgtgttgttatagtaatgcttcacttagctaaaggtcaatctttttttaaaatgactaaaaaaagtgaaaacaagcaaaaaaataaaaataactctcaacagccagaataattacagagtccatgtattaataactgacctcacaaatttcacacaacctgtatttagatcctgtttttaataatacccacaattagttttcactttgaaatttttgacctgatcctccccctggcatatcataatcttgggcctgtagacacaggcaaataccagcatacaagttactgctgactatcaccgagccagctgttcgtgggcaagttaatagccaaatccaactgattttaataagatgaatttaatagaacacagacatttaggttattacataaatttttaagtggaaattattcatttattaattttgagatggagtctcaccctgtcgcccaggctggaatgcagtggcgtgatctcagctcaccgcaacctgtgcctcccaggttcaagtgattcccctgtcttagcctcccgagtagttgggattacaggcatccgccaccacgccctcctaatttttgtatttttagtagagacagggtttcaccatattggtcaggctgatccggaactcctgacctcaggtaatccacccacctcggcttcccaaagtggtgggattacaggcgtgagccaccgcacctggcctaaattgaaattattttaaagaaacaattgttttctcagtttggccatgaattagaagaatggagttcaaggaagtgatgttcctcagatagaggggcagtagcaagaagtgatttgctaatgaggtaaagagaaaatgttgcaaccttaaagggcactaggtctccaaatggtacatctggagttgttttgaagagaggcagtcaaatctgtgtcgtcagtagcctctcagaatggctgcattacagcactgcaaagtaatggatgtacttagtgagtcatcaaaaatgttacattttgtttacttggtttgattaaggagacagggagtgtgaaatagattggaaagattgccagtaaaactatcttataaagattttttggcatttaaagaaattaccttcaatcagaaaatgcgctaatgtaggataattcatttctctatctaaaaccattcttgaactctgttccctgtcaatgttggatttttactgttatttaaaacattttatttgcttgttttaattgttttaacatttactcttcccttaaactttccatagatagcagcatagtttttgtgctaaattgttgtttttgcagaaacgccagaagccacattatccagatcttgcaaggaagtattttctggataatgcaggtacatgaactttcctcttcacaacataccatcttgtcagagggagttcacacattcttttcttttgtgtggatttttttttttttggagttggagtctcgctctgtcccctaggctggagtacagtggcatgatctcggctcactgcaacttccacctcctgggttcgagtgattctcctgccttaacctcctgagtagctgggactaaggcgcacgctaccacacctgactaatttttgtatgtttagtagagatgggatttcaccatattggccaggctggtctcaagctcctgacctcgtgatccacctgcctcggcttcccagagtgctgggattacaggcgtgaaccaccatgctcatcatcaccccagactgttgagaaaaatcctgataccttcacactttttcccagaaaaaaatgaacttaccctgttcatttggaaaccactgccatttgtaaaagatcacagagggaagtgaattcctgctcctggagcaaatcatgtcacgatgaggttacctattctaaaagcaatcaaaagcaattattccttgagaatgcaagacaggtacattgttactctttttgcctcatttccatgctctttctttcactcccaaaaacagcaatgaaaggcaaatatgtatactcaaaatcgtatctcgaaaggttatttgcatttcaggttgtttgtcatacagtatagacttagacaaaaatatatatatattatatattatatcatatatgattatatatttgatatatatcaaatataatatattatatatattatatatattatatataatatatattatatgtattatatataatatataatatataatatatataattatatatataatatatataattatatataatatatataatatataattatatatattacatatattatatatattatatatattatatatataataatatatatatttgaaaagttagggattttgagaacttactgattagatggtggtattgcttatcacttgcatttgatctccttccttccagtattcttaaggacaagagaccctcctgttggccacagtatgcctcatacctagtgtaattcttagaacagatcagatactcaacaaatactcattaaagaaataatttcagttttccgtaaaacacagtgtcagtgattctgcatgtacaacttgatattgtatgtagaattgttaatgtgtgtaagtatatgcataattttttattttttgagagagaggagctatacctatgatcagatattcagatggttgctcactgcaacctccgcctcctgggttcaagtgattctcctgacacagcctcccgagtagctgggattacaggcatccaccaccacgcccagctaattttttttttttttttatgtatttttagtagagacagggttttaccatgttggcaaggctggtcttgaactcctgacctcaaatgatccacccacctcggcctcccaaagtgctgggattccaggcgtgagccaccgcgtccagatcccagttaatgtttatttggcctgttaggctgaatgtcatggaaggctgtgtggcagagtaaaatgagtagttacagatctggaaagtaatcccaatatcttaccttggccaagcaacttaatccttttcagttttctcaggtacggcatgggataaaaacaccttcctctaagagcggttaggagaattaaatatgatgaggtgtgttaagtggctagcagtgtgcccgtgtggaatgcactagttgttctgactgggttatggaagtcgctgggctctaagcctgccttagtgttgctagtgactagtggtggcgcctccgggtgatcatttcactttgtgcctgagtttcctcatttgtaaaataagatatttggcctgtgcctatggttttcaggttttcggtttaggcttctggagcctgtgtccagtgttcacccctccctgtcaccgctccccttctgctccagaagttgttctctttttctgtcatgttctaacttcctctggtgatgtcttttgagcaaaatattatgtggcaaaaaagaaactggaacaacttcacagggtgatcttgtaaggatcgtttcagtgaggggcttagcacccgggccagcggctgcggagggtgtactgggtcccccagcagtgccggcccaccagcgctgtgctcgatttctcgccgggccttagctgccttcccacagggcagggctcgggacctgcagcccgccatgcctgagccttccccgcctccgtgggttcctgtgcggccggagcctccccgaagagcaccgccccctgctgcacggcgcccaggtccatcaactgcccaagggctgaggagtgtgagcgcatcgcgcaggactggcaggcagctccacctgcagccccggtgcgggatccactgggtgaagccagctggtctcctgagtctggtggggaggtggagagtctttatgtctaactcagggattgtaaatacaccagtcggcactctgtatctagctcaaggtttgtaaatacaccaatcagcaccctgtgtctagctcagggtttgtgagtgcaccaatcgacactctgtgtctagctgctctggtggggccttggagaacctgtgtgtccatactctgtatctaactaatctgatggggacgtggagaacctttgtatctagctccgggattgtaaacgcaccactcagcgccctgtcaaaacaggccactcggctctaccaatcagcaggatgtgggtggggccagataagagaataaaagcaggctgccggagccagcagtggcaacccactcgggtccccttccacactgtggaaggtttgttctttcgctctttgcaataaatcttgctactgctcactctttgggtccacgctgcttttatgagttgtaacactcaccgcgaagatctgcagcttcactcctgagcccagcaagaccacgagcccaccgggaggaacgaacaactccagacgcgctaccttaagagctgtaacactcatcgcaaaggtctgcagcttcactcctgagccagcgagaccacgaacccaccagaaggaagaaacgccgaacacatctgaacatcagaaggaacaaactccagacgcgccaccttaagagctgtagcactcaccgcgagggtccgcggcttcattcttgaagtcagtgagaccaagaacccaccaattccggacacagttctaatgcccactgagacttgaactattaaataggatataatatgaaggagaatgtgttagttttatattgctgtcgttaacaaatcaccacaaacttagtggcttgaaacaacacagattgatcattatctcatcgttctgtgggttagaggtttgggtttgcttggctggtttttctacttctggtttttccatttccaaatcaagatttaggcaggactgtgtctatttctggaggctctgaaggtgaatctgcttcaagttcattaagcttgttggaaggattaagttctgtgtggtcataggactgcggtcccccttttcttgttggttgttgcccaggggtcctcctcagcttctagcggtcacctttagtcctttgcgtgtggtccgctacctccattttgaaagctagcagagatggcccaagttcttctcactctctggtactgtctgacctcctcatcctcttctttttgcctcgtctttgtctggtttccttttctggtgcatcttctgagtgcctgttctcccttcctctttgaaggtcttgtgtgattacactgggcccacccagataatccagaataatctccctctattaaggttagttgatgagtaaccttagttccatctgccgtgtgccttcttagcagtggctagatgaacatttgattaaatcatcaagggatgagactcttagggggccagcatctttaaaatcctgcataaatgcggaattacgtataaaatactgtgggatttcagaataaagagaaatgactttcaactgggcagcatctggaaaagcccctttgagatggtagcaccttgtcgtctattgaaacgtagttccgatgggtgctatagagctggagtagaagggactctggttgtggggtaacagcttagatgccagtgtggagacaggaaggatgataacgtgtggtccactaagagcagccatatcccttgaatgtactccatgtgttagttactatttacagagttattcaggctcctaacatcagatttttctagatcaaagtagaaataagaggaacgtcaagaagataatcaacacgtagcatgcagaatcattattttaaaaggactaagacagttgtgtggtgtgattgttgtaccaccttctctttggctgttagaaagaactgagtagcgttacacatgaaaatgtgaaatctgattttcttatttctaaacttttaaaagctccatatctactgatacaaaccagagaatgtggcctttgggaaaagtctcccactctccttttgtattgccccacagggcttacctctgtgaccattctgagtgggctttgtaccctactttaggtggatgataacttcagcacagtcccagcttgtgtggagagatgatgaggtcatgttggcaggtccttggtgtctctaaacattactgccgtattataactgattttctataacaattccacataaaggaaaaatcttttttttttttttttttttggagacggagtctcgctctgtcgcccaggctggagtgcagtggcgcgatctcagctcactgcaagctctgcatcccaggttcacgccattctcctgcctcagcctcctgagtagctgggactacaggcgcctgccaccaagcccggctaattttttgtatttttagtagagatggggtttcaccgtgttagccaggatagtctcgatctcctggcctcgtgatccgcccgccttggcctctcaaagtgctgggattacaggtgtgagccatcgcgcccagcctggaaaaatctttattagcgttactctctaccacttcccttccttttcacctaatttatttataagctttaaaaagagttgtatatacctttttattttgaaagcatgcatctatacaaaggagtcacagaatactttctgccaacctttgaaaaatacaaaggatgtaactgcccacagttgcttttcttcagccttttaaagtgtgtatacataagggctaaaataacaaaaccagtgcagccagctggtccttttttcacatgctgcatatgagaaataggattaaaaggggaagttatggtggcagaaagccaaggggtgttttatgagagatcagcaatttcacttgcctttggtgactcatattttgcccttaaagcttctagtacatacgaagacttccgtagtctttccaaacctttctccctctctcttgccagagtttgttttccttccttctcttcccaccttccaccgaaacctgaagtgctggtcctgatgattagaggcctgcaaaaggaaactcgtcttcttctgtgtctttttttttcttttttttttactcactttgataagaaaaatagccttttcttggagttgctctctgcatactgagcagacattggtacacatgtaattcatatagtagttaattggcactatttagcagctggaaaggaagcactaccttccttaccatgtggcagtctcattcttgtcactatccagccataatctctgctggtgttctgattaaagctttgtgctttcagattcagagacactgggaactgtttctggtttcctctttttccattcattttcccactttaatatgctaaggtatgttttctgataattcagaaagattgctgttgctttcacctgtagttttctcttcctgtttccacaatgcatctgactttgagaatacattactttgcccatctattatgtcagtcatgtccacttctggtttctttcctgtagggaaaattgattttttaaaaatgaaaccaaacctttagaaactctcttaggtaatttcttccagctctcatgttcctatattttccttgtttgtaatatctaattaaaagcttattataaggatccttccagtgtcgttaacttcaagtaaactgtgtctgtacacctgcaggtacccacatacatttttatgaaaaggccaagctccaatttgtggtacatttttaaatcgttagtattaagaattgaagatgtgggggcattatttacgtttgagaagcccttttcaatcttaaaatctatagggttctaagcttcacattatctcatatgaacaaaggtgacaccgccatttaaaaactgaggctatgcatacacaggtagagagagagagcaagcaggcacatggatgcaagcacaaacatgctgagaaaatatccatgcctaagggcatttctttcagtcctcactgaatgtgcccttctattcatttgctacattaaatcacaaccctggcatttaccctcttaggatacaaattaataattaagaccaaccagtccatgaaaactcaaagtggaaagtataaacagtaacaaatgaacctaattgtattacaaattaagtattttgtaatttacactaaagggaatggaaaaggaaagaacgaacataaataattttgaaaaacagttttttaactgtatgccgtgtggttgaagacaaaaagaacagtacacaaacactgtactccagttagtaaatttgtcttttacaggggtatgagctattaattctgaaactattactgatgcagaatttttcttcttggtcacttcgcaaggtggggacccctgaccagcaacaccccccctggacctcccttggccacgctggtgtgccccagcttacctgtgttagagcttgtacctttgtttggtgtttccgaactcttagactgcactgaagaagaatgaggacacgtggggcatggaagggtgaggaggatggagaagaatgttttcgagttatgaaaacggctttcagcaagggtcagcaggggagggagggggttcctctgtgtggctgggtctggggccctttatggactcagaatggggagtgcatgctgattggtttgtaagtatgcaaaaaagattaaagcaaaaacaccactcaaaggtgggcaggacagtgtagaaaaaccaattaggaaagggtaggaaaccaattaggaaagggtatatgtaaaatacgtgaagggtggggacccatcagaggaaagtatgccagacaggaagacactctcagtttggtccaaagatttaacttgtagctcagctttcaggctttaaactatctttggcctgaaggtaggattttgcaggggacctgcctctgtctgtctgtctaggcatttgtctgcctctatcattactttatctgtatactaggatatgcaaataaacaaacatactatagatgataagaggcagttttctctctatgggagaaagaaattatgaataaggaaccctgtggtattggattccagttgacgttattcatatgaacttgtaatttttaatgtatggattgatgcagaaacgtaggtgagtttgcatgatgggtatgtatatatgcatgtaaatatacgcctgcatatatttcttagctctgcctgccgagcggatctagaagcactgatatctcaatatcaatgagcagcgtagcttccagaccttggtttctaaatactgttcaccagtaaaatgaattaatgctctgtggagaattggttggttgtagtcctggggcagggaaaatataaaatgagcctagaacatcttgtggtgccagaaagtaagtgctcaaaagaagagggtggtgtgccagaaggccaacctagccaacctggaggagctcctaatggccaaagctggaacaatttgagcaacaaagtgatagtattagattatactcagagaagaaaatgaatatccgttgaatacattttaaaaattgtggagaagggacaggtttttattacagaaaaattttaacaattgtgaaaggaaaggaggaaatggcaaatatcgcagtaattattgttgttgatagagccattgaaggatactaaatttagtagatgaaagttagggaagaaacaggatatttgtgtagtctcaaagtatctctcccaggatatttattcattatgaggggaaaatactaactttacaatgtagacagtgaaagataccaccttaaccaagtgatcaagattaacatcaccagtggcaaggcatctcaacatcatgaagcctctgatgctctaaaggagaagataacatcacttaacatcacttctctttcccaaaatgcctaacttcattgtaaacatgagaaaacagcagccaaacccaaattgcaagatattctatataataactggcccatcttcttttgaagtgtcgaggtcataaaagacaagggaatactgaagaactgtcaccaaatggaggagactaagaagccatagtaactgaaggccttgtgggttctagagaggatcatggaataggacaagggcagtaatggggaaactggtgaaatttgaataaggtgtatagttcagttaatactataccaacattaacgttctggttttgataattgcactgatggttacgtaagatgttaacattaagggaagactgggtggaggatttacaggaactctgtaccatttgtacaacctttttgtaagtctaaaattatttcagaagaaaaaagaaagatgctgggtagttaaacgtacaaaggtatgtgtacaaggacattaaaagcagcattgtatacaatagcaaaaaattgagaataatacaaatctcgatcagtgaaggattacatcagttatactttattcatgtaattaatacagttgttaaaaagaccacgtagagttatgagtagtggtatggatggcaaagtgaagagaaggggttaagagtatagcttctttattcatgctgcctggattctctgatacttagcaccaattctgtgaccttggggaaattattcctctatcagcttcctcatctggaacttgggaaaagtaaatatacctacttatgaaccaggaatgaggtttaaatgtgaaaatccatgtaaagcctacaggatgatacttggcacataaaaaatacttcataaaatatgattacctaattattattttcaaggaattgatggtggggaacatcaatacaaaattaagtatggaatgataccatttatgttaaaattcatatgtgagaatctagaagatgaatgtgttaatagtggtgatgtcaggggagcagcatattagggaacttctgggtggtggtggtggtggtggtggtggtggtggtggtggtgagagacagagtttgcactttcacccaggctggagtgcaatatagcgatgcaaccatatctcactgcaaccacaaattcctgggctcaagggatcctcccaccttaacctcccccctcaaagtagctgggactgcaggcatgtgccaccaagcctagctaattttctttcttttttttttttttttaatagagacagggtctttctgtgttgcccagattggtctcaaattcctggcctcaagtaatcttccccctcggcctcccaaataggaacttccactttctaagttaaatattttaaaatttattttgcataaagtatactgaaggtatccagggaacttcactccaaaatatggctccctggtataataggtattttgaatgaaaggttcttagagatcagtaaatgtgggaagagacttttcccccatccaagtaaagactggacccaccaaggagaacgactgtttgtccttcacctccttgttatctcattatctattgtaacaaagaatactaaagaatgtaagcatgctcgaacattttctaaagaggaccatttacaagttcatctctgttttcccatccgttcattctccttggtaatcatttattgccctttgacagagttccctgcattcgctatctccccgctcctctatgaaaagaagctgtaggagtatgttggccccattggaatatttggggaatcactctgtgattgtcccttgtacatattaataaattgtatgcttttttcgctgttattctacctttggccagttgattttcagtgaaccttcaaagggcaaaggggaggtttgccctttgttcctgcaatacagttgaagaagtatgcatagcaacttttaagagaagcctgctatcaatatttattaagtaaaaccagccatgaaaactatttctaaagctaaaggcatcgcatagtgtccaaggtcatatgacttgtccctcacattggaaattgtaagagacctgactgtgctctcagccacttaaaactagttgatgtctacagttctctgaaatgtgggtcttaacttggaagattaactaattactctagtgtataatcctaggttgtgaaaggttatggataacctaggtaaggatgggtatgactagctctttgtctttatgaaaaataaaccaaatggcttctaaactgtagcattttgccagtaataaataattcctgacatttttattagagtgattaaaacctggagttgggcaccaaaatggtgatgtaatctccaggactgaagttaaaaataggatagatatcaattgctttttaatctttaggtggtgatgggccaactgagttacagggggatccggaattcactaataccttcacaaaagctatctatgattatatacactgtaggtaaaatatatatggaaataactacatgttttcaaagaatatgcttatatttatattttggatataacatcagtttgtttcacgattataaagattttttcttccttgcttggtttgatgcctgtgtcattctgaagttctttatagtgtttactagagaactcagcctgaccattctaatttaagtgtatacaggttacgtagcaaatttaaggcccgtctgtctttgtggttttggtgatactaggttggttgcttggttggttggtttgtttctttctcttttttcttttttggtaaatcatatataaagcaaagtataccaggtttcttaaagaggtatattgcaaggaaataggaagatgattctaagaaattagaacaaaaggtgaaactttcttctgttctcttggacttgtgattcctttttatatcttccctattatagtccttttaaatttgaatcaccaaagctttccaaggataaaatgaaaatgtcgaaagcattattttcctcatattactcctggtaatgtttttatacatttttcatcctggtttcttaaacactttcgtttaagtatacattactggttgaccagctatttttaaatcttttagatctcatttcagttgtacttttttttgtcagggctccacctgcttttttattctgtttgcaacagtcactatttcatttgttggtaaccatatggcatagccttttttttttttttttttttttttacaataaaattagatgcagtgtgttgaagcccatattgttgtatcacagtctctggagagcttaaagtaggtgggagagggcatcccaaaatgcagcatgccgctgataggacggataatcttagcacaggattggattttaaaatactgcatttcaaaggtgccgacatatgtagctagtgccagtacaagagtagagtctatagatgaatagcacagctgcagtgttggtggagttttccctcctatttcccaaatactttggtttcttaaattctaggattgtttttaaactcttcttcctgcacactgaaattctaagattttaatatgatataagctactcccatggaccactgttgtaaagttgagatcatcatggtaacaaactctagggaaagatcaatggactcttggagtcacatcatcttggttaaagttctgaccctgacacttactggcattgtgacattgggcaaattaaggaggctttcagagtccactttctctaaccataaaatggagatgacatcgcatcttgtgaacagttgttacaggaggaaatgagattacatgtgtcacatgcttcgctcgttctctggaccgtaactcgtacctgtaagtgtccttccttcctttctccccaccacttactctcatctccctcttactcagtgttgtgttttctaagatttaaaaaacagacaacagaaaacaatattttaatccctttttatgttaggatctgaaaatctttagatatttcctttctccctttcattccttcattcatttttggctttgcaccaggacttatttcttgagggtcagataagccctctgacctcagggaggcacccaggttaatccacactcagagaaaagccggaagtcactgggaaagtctagtggaagtgctgaacccggaagcagctggaaggtaggggaagtgaagtcagcctcacagagctgaggtttaagggacattaggaggactaggagacaaagtcgtgggacagagggaatcatttgttcatttgaatatgaggatgagtgagagagaggatttccatgtgacttttgggatttaagtacctggtagggtcatttcactgagataaggaatatgagcaggttattagaaatggaagtaatcttaaaagattttctagatagtctgatattcctaaatcattaggtaatgaaaccgaggggctgtcaaggttaagctcaaaaagcagttgagattcatccaaggtcactcagactctctctgccaataataagagggcaataatgtgactgctaaaagggcccttagagaacaggactgaaggtgtgatggattctacttgagaattttgcaaatgaaacccaacacagttttctctttgtagctagggaaggtcactgcaagctgtcagaattgaggagaagtgaagtggaacagaaagggtgcagttgaggtcagattccgaggagagagagagtaggttgccaaaatttagtgctcataaagcagtgtgggggcgatccaggctgagttaacacagcaggagctgtcactgtggaacccgtgtcagcgtccagttttgcgggccagtcggagatcagacctgggaacagaagacaggaaagcaacgccgtgctaggggaatgtggagtgggtccagagcagctccatggacagcagctcctgctcgtggaggctggctggcctccactctggttgataggaacatcttgcagttttgtccctgtgagcttgtccatgcacaagaaagttactacgcagtctgttatcccagatttgatattatattatttgtgagttcttgacatttcttttagaaataacttatgttctaaagatagctgataatgttactttcatctgatttctaatattctttacaaatattagaattagactgatgaagacagatactatagttgatcttagccagaaagccaggtcaatttcaaatgttctcactgcaaaaaagtatttgaggtaatgggcatgttaatttgtttgatttgattatttcacactgaattttcaaatcataatattactttgtatcctcaaatatatacaatgataagttgttgatttataattaaaaaatgtggtttatttttttgctactataaataggataaattagagccctgtgaccatgctagctaatagtggtactgtatttataaaatgaatgtgttatctttagctattagacacatgaaaaatggaaattagaaaatagatttcaaagtacatattaccttcttctttattttcaaccctataataaaacagatgttttagaacactttctggttctctatagagtccagacaaaggcactgtatttacatgtgttgttttccaggtttgcccggcctcttgtttctttaaatactcttggtatttcaacagcgagtttataactaataattaagtatgggaacacctattttttcccttaaatagcttactctttttcttccacaaagatctgtttattgcctacagttctatatttttgtgggggaatcatctgcttccttgttactgattataactgggaagcattttcaatttaaattaatttttggttggttaatattcttccttaaatatatttattactaaatattcatccatctgaagttttcctagttttccatatgtgccttccaaaatgatttttgaaccacaaacatgtttattaattaaatcactaggcgaaatccgcctttagtccaagttgttctgaacaatctgtgatacctaagagccgaaggttcttcttaaaaggaaaagaaatccttgtggtatttttttgtctttaaaatatattaaaaggtacatttcagaacaaaaaaaatgactagaatttttttctagaatattctttgaggtgaagggatttcttggtgttttttttgtttttgtttttttttttcggagcgggtgtggtatagcttacttcttagcaatccaagaatagcatttctggaaagtgatcagtcagttcaagctatagtctgcccttgaatgtgtatgctgtttatatctctgtcatggagttatcaggtggctagtacgagtctttattgctgagagtaagatgccagtttgattttcagcctacttgtgttaaggtttaacctgtgatggaattcacatttctgataatgattactgtattaaaaatttaacatgtgatgtgtatggtagatcccttttataatatggctgctgtgtggattctatttagcatgtggtagattctgtccacaggaaaagcaactattcacagtataaacatcataggccagccctgtcctccttgacaatgcagatgttatctcatcatagaacattgtaattcgaagtcacccttgagatgatcttgatgaaccttcccattttataaatgagaaaaggagtttcagagagatagtgagttgtttaaggccctaattagtgtgggtaaagacagaacagagagaaggacagctacttgtccttctcactgccatggttttcccacctgccaggaggcctctaatttgaaatgatatgcaaaattggtcaccagaaagtcctggtaacagtttgtgatgtagaggctgagctgtggaattaacattcagttctgggcttgctcttctttccctgtgaccccatgttagccattcggatttcctgatttccattcctttgcccttctcccaatttcacactgattaagacttttaaaatctagcaaagatagcttctagttggtgtcatctgcaagcagaaaataatttataagcagtttctcttgatcacaaattgagtagagggagcctctgcctcctgcctgtgtgataaggatctgtgcaagggcatacttgcaaaaacaataggaaatcaggctcaagtaggtcaaaatcaaagttagaagtaaaccccatgatgcaagactagttttgtgtatattttctactgaagttcagtgaaataatgtctttaaagttagaaagtgataatagaccagagaacagtctgtaccctggggaaaaaaaataaggtatatactttcccctccgaaactgatatttgcaagacttatttatagccttatgcatattataaagccatagaccttttgagtaatttattgaaaatagcatagaggccaagcgtagtgactcacacctgtaatcccagcactctgggaggccaagcgagcagattgcttgaggtcaagagtttgaaaccagcctggacaacatggcaacactccatctctacaaaaatatatttaaaaaagtaagtcccacctctcgggaggctgaggtgggaggatcgcttgagcccaggaagccaaggctgcatgagccatgagcatgcactgcattccatcctgggctacagagtaagaccccgtcacacgcacacacacacacaaataaacaaatagcacagcatagtacctgggttcaaattaaagttccattattttctaactgtgggccctatttttctcatttgtgaactaatgcagtgtttctcagctgtggctatatgttagaactacctgggacaattacaaagactaaagaaaacaaaccagcaaaatagtgcacagcctctatccccagaaagttctgattttaattgatctggaaagagaacagtattttttcagatgctccccaggtgattccaatggacaactaaaccacaaaagcagatgactttgaagtccttttcacattttaatattctacaattctgagatttttttatgtcatctagtccaggctcacactcagcataatcatctctctatatttgaaaagcagcattttgtttttaatgttagcattcatttggaaagaatgctcattgccatcagaaagctttgatttaaaagatttttctgatcatcagccaaatttacctttggaaaaacaaataataagtctaattactgatttaattgatgacgattctgatatttgaagattacttctatgattcagcaaagttacctcttcttaggtgaaacctttccaatttttttcatctcttgtttttgtgcaccattatttccgtatctcaacatgctattctgctctggggtaatctgcccttatctctataaaatatttccctggagttgaactacagccccattgatgatcaaaggagggaacttggggattttgggtgattattcccttctcaaactcttactgaatgtaggattaataaatagactctagttttagtaaacagtttagtaaatggtgtttactaacacatactcgtctataaatatgtatactaataaacacagttgatgataaaattcccagcatttaaaaattttcatggtgtgccaggcattattctagtgtttaaatatattaacacatttgattctttcagtaacccttgagggtaggtaccattattttactttttagatataaagaagaaacagactaaggagcagagtagttaagtgtcttgccttcaatttcacagtaagtggcagagctagagtgttgattggataatatagggcatcttattccagagtttgtaagtatggaagttggaggttatagaaattacgtgagatatataaggtttatgcttatacttaaataggtaaactgtagcataggagatgtgctcaagtttgttggaattctacgttgttttaagaaagttgaaatttgtcagaagctactttccataaaaacaatttatagttagattgttttttgtagttagatatatctagttagatttatagttagatccataaaaatcaattgtttttatttattctttgtatttttaatgaattctgcttgacaatctttgttcaatttgccaaataagtttcctaaaacttaattttactattcaggtgcgtgtttcttagttgacttaaacagaaaatttctggtgctgtgtcactgaaaaattatttgaagaactgttgttggtatccaataatcctttgttttcccatagtttcatcagcctcataaatttgtactgattctaactgcttatgatcattatttcttagtccttgtctgattcattctgaaaactgaagctttttatgtaaggcttacccacttgaggttgccagtaaaaaccatgctaccaggagatagaaatctgtcagagaaaaactgtgcttgtagaacctaccctccatttaactactacagccttaaatatgtttgtagggcgaataaagaatataaagtgtaaaggcagcaaagaaagcattcctatcccctgggaatcttatcctagggagtagtgtgtccacttgggtacgtttatcgtccattcgccattcagtgtattactctgattgtgagtatctcaatgaccattctgataattgaagattacttctatgattcaacatagttatctcttcttaggtgaagctttcccaatttttttcatctcttgtttttgggcaccattatttccgtatctcaacatgctcttctgccctggcggtaagtagtctcctcttatctctataaagtgttttcctggagttgaactacagccccactgatgatcagaggagagaacttagggatttttggtgattattcccttctcaaactcttactgaatgtaggattaatcaacagaccctagttttagtaaacagtttctgattctgtatgctaaggcatgagtggtcctcggcgtatgtgccaatattactctgaattattgctttcaaggggataaagggcacagtctttgatgtgaggacttgattttccctttaacagtagaattttaagttttcaactgagatgaggactgttcgtttttaattcagaaagcctttgtaatggtattgctgttctctggaagcttttgattttggcttgagaaaaaatgatttaacaccttacaaaacatcagaatgagaaactgtggtcttccttctttttgttgacttttatatttacagttacgggttcacaggcttaaagctggagagggtcttgaagatattctaacccagtcacctcatcgtttagaaaacagtagccaacactgtacattcattgcttttaggtctcctcatgacttgctaagttccataagggcggggactttatttgccgtgtttactgttagtgcctccaaatgaattcaggtttacaagcaaataaatgaaatggagaacctaggacttggaaagagaaaagacttacccaagatcatcttgccaggaggaacaaaatctgacctagaaccattgaaccatcatcttgtgacaacaaaatttgtgtcttttccatgatttaaaaaaagaaaaaggacttttacttgggagtcttaatctgtattaaagatcagaatcatacacagtttatatttattagatactgtttttcagacatatacatgaatttcattgaaaagttatagtacaactctttgaatgaaggtatttttaatccatatttttatagatgaagaaacttgggctttgaaacaaaaagtaattttccaaaggctatacatagaggcagaattcaagtctggtttctacctccaagtttagtgatattttctacttttgtcttttacatggataccaatgtttgtcaatattaagaattatctagacccataagtaacaatcactgaaattatttttctagcaccttatatgttatagactttaatacctgtggatatgttaaataagtgctgcctttgcctaggggtctgtatttaaaaggcagcaaaaaaaacccatagcttctcagttcctttcatctgtggttttggccttctgtgtggtctgatttgaagggcttttctgctctttttctttttttcattttcccataattggacttggatttcctccttttggtcctaaatgatttgcaggcttcaaagcctttctactacattgcagacactgccggtatgggatgttagttgaggattaacatctgtagctggaagaaagataattgccttttttttggtttctgttgaggagtggagggaggaatgatgataaaccaggacgtgagtggaagccattgtgacatggcacatttgtctacgttctgtgaaagtaaaaagcctctgatccagtgaaattcttgtccaggctcaactgggctacttgcatagggactcagaataatctcatcacatctccactttgctgggcaaacccatctgccagccactttttggcaaaggtcatgcatgagtaataccaccatttgctattctcaaagagtcaggatttcaagagggggatggcattctgcagcattgcagttttagtgcaggataaaggatgtcgtcacaggatctactatattaccccctccatttatcagtttcctttttcacctgtggctgttctagtctttcttctagaaagatatgctagaaacattgaacttatacaattatgaccctaaaaagtagaacctctcattttttaaaaaaagagattttccttttttccctaacaatttatatattgtttacctggtaccaaatccttgtagcatttctttttgtgtaaaacatacattgagccaaaagtcataagaaaaagcagtaagtggtggttctaggttctccttcatttgttctctttctgtatttttaaaggaccctaataagatgttgtaaccaacgctgctgtccgtgatgctatagtctgcattgcacgtttcattctcttctttcttttctctccttcgttggttgaagagtcaagggcagaagatggtggtgatagggagggggcgtgtgtaggcaaggtacttcgtcccggtcatcttatctttttcctaatttcattttatattatcgtggttcacaatagtggggcttgtggtagaatatctgtgaaaaaaaaataaaaaaaaaaggaagaaatgatcacttggagttctcccatccctgcacgaacatgttgttccattcatcaggagtgtagagtctatttcccctcccgccgaagcctgggctggtttgtgtgacagaatgtggcagaagtggtgctgttgtaacggcaggccttaagaggcctggcagtttcggagccaccatgtaaggaaggaagctcaagatatcctgctggagggagaagccatgtgtaggagcatcaaggtgctccagcttgcagctggcaccatgctcatacattggactggggcatcttggatcctccagccccaggtcagctcggccattagcacatggggttgagacatcctgttctcactgagttctgccccagactgcacttgtgcagaatctctagcaaatgaactgatgatgatttaaagcccctcgcttttggggtagcttgttacagagcaatagattactgagacaggatttgtagcttcctaatcttccttcttttctcatatctgtttacggtgtgtccagatagttctatgactccgtatgtccatctacaatcagtattttgttttagtacgagttcgttaggcattcttcagtcgctatttcttgctttgtagttagtgggtttttttttcgggggggaggagggttgtttttttaccagctttatatttgtcctcacttgaagcaggtgactctcctgaaatgctcctagggggacatttctctgaggggcacagtgataccattttcttctagttgtatatgagagacagaaaattacttgtctctctcaaaagaaaaacagtggaaaaaagatgacttattttccctaaagaatatttcctgctacccattaaaccatagtgacctctcagactcctcaaatagctgtgcatcctactcactgatgggcagaaaacaaagcagaaggatctagggtaaacatttttatttaaaagcaaagacccagacactccaaggagagtttgcaatgtgtattttctgttcaaatggcaagtgttcccaggaaaacctggaaggtagttacctagttttattttagattttctggaaggatctgaaaccctttttaaaagtacaacttttaatttcctgagtagaacacatgactgttctgagtcctggtttcagtttctataagcaatttcctttgagcacacaaggtagtatttttctcatttcgttgtcagttttttgtacttaaaagatttattgtttctcctgttgtctttctgcctagcaattcctttcctcaagctgtcctaaacagttgattaaaaaagaattactgagatcatgtttgatacagggcagtaaattttaagtatcaaatagataaaagaggaagggtatagagaatctaagttgcctttcttaattggcagaatcttccaatgtcactttcatgatttgtttgctgtttccatccttctggtctttattttttaacactgactccatgagtgcattagtccatagtcagaataaatgttttgctatgtgatgaagaaggttttttgttttttgtttttgagacagagtttcactcttgtcacccaggcaagagtgcagtggtgcaatctctgctcactgcaacctccgcttcccgggttcaagcgattctcctgcctcaggctcccgagtagctgggatttcagctgcccgcccccacgtccagctaatttttgtatttttattagagacagggttttaccatgttggccaggctggtgaagagtgtttattttgtgggggaggtaaaggggtgaattttctagagaggacagattggaatgacttttagaaagaaattatctttttaaagttttatttaaaaataaacattactttcgaccttagctaggtacatgtgattttttttttggtagccatcttgccaactctaaaatgttattatcggctatttatttgttcagtgttttcatatattttaagtacacacatcttgtctttcagttatatcttaaatttctgaaaaacagtgcccacagaatcttaaactctaagacaaggcttcccaaaggacatctggcaatgtttggagatctatttggttgttacagctgaggcaattagctgctactggtattttaagggatagaagccaaaaatatgtgtaaacagtgtatagcgtacagtatctggcacatagaaagtgatcaataaatactttttgagtggatggatgaaaggccagtgaatgtaacaatggatatagtgtatcttttctttatctttcctcagaggtactaagggtcaacttcgttaaagatcagattgctagttcaactataaggcatggtcatctcattaatatttatatataaagggtttttgtatttcctccacaatgacaagtcaaagctagataatgttttagttataacgtggggtgtatatgtttgtttatattggagaatacttaccgcttgtcagctggagaaggagacattttacatattagcagatgagatttggtagcagtgttgatgattgtgctgtggtaccttcatacctagaaggtcaggtcctcattttattgttgtgtgattgtggaataaatgcagattttttagagctgtcccacggaaacatttcatagtcaaaatatctcaaaagaagtggtgccttgggaaaaacacagcatattacttgtcattagaaagaggcaatacttgagcatatttcttatttttgaaagtcagtagctagtatcccgtatgatattcctgtttcaaaaatgaggaagctttttttgctttatgatgctttcttccttttccagtctttatggaatgtaggctttgctattctaattaaaatggaaataaatgaatgtgataaataagagtttttactgggtagaaatgtttagtgcattgtagcaacgttggtaagagaaattgaattagtaatttcctcagtggaaggtttagcatgaggatttatttccttctcctgtgtagtaggctcaagatagggatgtgaaggattttcctccagaatggcatttgtaatttctcacagtggcctcatttcattcatggcccagagagagtgcaagctatttagagaaagaagagtttttgaaggtaatacatgagacagatgttgggtatcttttcttgatatacaattactaaaaattatccagttaaaatctataccttacataggaacctgcactgtacccttttttgtcttaggagctttgacttttgtttattcgttttatggttgttgcatgctacttttatttaatgtggtggcatgttcttaggagaactgcataagtctagatacagccctcttcatcttgaaataattttgggtaagaaccttacacaaggtcccacatttgacttgaacttggtattgagtatggactaatgttagacactgctgtgggttaaaggagtcagttaatctgatgcaacagagaaattgaaatcagaaccacttagagctgtttccttagctcattgcttaagcttttacagaatgcataattatgaaaatttataggtttgtggattgtgggggacgtgtggttcagaaatctctactgactagttcagagtctcaaaggggaagaaaattgaaagggacataaggttcttatagttgatgaagtctctagcgttaaaaattgcttattagtctctgttagttgttaaattttacagctgttctttttctttgggtgggaaaggtgcaggaagaatcaaagttttcaaatcaacaggttttcttgtgaattccacattttttgaacagacattttgagatacagagaaagcctgaaaccagatctctgcttttcttaaaagaaatcttccagaataactgagaagcagaactgacatgtgaggcgtccaccctctctgtccccttccccttcccagcttccctttcatattcattttcatagcttttttttcaaaagttttatatttttcaaaattgacatataaaggttatatttgtcatgtacaacatgttttgaaatctgtatacattttggaatggctaaatcgagctaattaacttatgcatgacttcacataactcacatttttagctcacgcagcgtaactcaaggtgactgcttggcccttgaaagtctggtccttgcccaccccagcagctttggctctttgctgcccatgtactccagaaccactgaacttccttcaattcccaaacacttttcctaaacactctgtcttgcctctaagtctccatccatgctgtttcctctgcctgaaacactcctccctcctttttgtctgggtaactcatactcacccttcaagtcttccgttagctgtcccttcctctgagaagccttccctgtcatcaaagtctaagtgttctttctatgtgcacctgtggtagctggtttttaattgactttgttgaatgtttctatgagactataagtttggagaaggcataaaccatgtctgtgctgtgcagagtttggtggataggaggttctcaacttttcattgaattcttgcaatgagtatttcagtgctcaattgtacggtgcagaaattccatggaaaatcagagaagagagaaatcagtgaaggctgaagtgatgagtgaaagtgggacttgacctgaacctataatgataaactcctttgtgaagtttaacactctctcttctacttccctttctccgcttttttttttctgtttttcataaaatcattcattcattcagcaaatatttaagggtccagtcttcaggcattgatctaggtggtgaagatataacagtgaaaaatccctgccctcatggaatatgtgttctaatagactaaatggataaaaatgggttaaatataagtctagaaagtagcttagtagactagtagggcaatgaggaggccaactcgatgggtgggatatgttacaaacttggactttgaatggttttccttaagagcataattttacttgggagagtaggtgggtaatagggaagtataaataacttctgagcaaaagagacttttcgtctgtaactggtatgcagacactgaaagtaaaaagtccagcttagacaggactgccaaaatatgggtaatgatagccagcctggaatagtgtagtaggggagggttgtggcagagaggtaaagatgaataagaggggtgtgtgtgtgcgtgcgtgtgtgtgtgtgtgtgtgtgtgtgtgtgtgtttggatttttttttaatttagctattgattgattgatcgattgagatggaatcttgctctgttacccaggctgcagtgcagtggcacaatcgtggcttactgcagcctccacctcccaggctcaaggagttctccctgcctcagcttcccaagtagctgcgattacaggtgtccaccaccatgcctggctcatttttttttttttttttttttttttgagacacagtcttgcggtttcctgggctggagtgcagtagtgcgatctcggctcactgcaacctccgcctcccaggttcaatcgattctcctgcctcagcttctagagtagctgggattacaggtgcccaccaccatgcccaggtagttttttgtatttttagtagagatggggcttcaccatgttggccaagctggtcttgaatacctgtcctcatggttcacccacttcggcctcccaaagttctgggattacaggcgtgagccactgcgcctggcctgcctggacgatttttatatttttagtagagatggggttttgtcatgttgaccaggctggtctagaactcctgacttcaggtgatcctcctgcctctgcctcccaaagtgcaagtgctgggattacaggcatgagccaccgcacccagcctagcaatttattttctaaagaaaatttcctagatggtggactgtctggatagtggaaataaaggacagggatgagttaagactatctaaagttagagccccgaagcgtggttggaacattaagatagtagttttggtttagttggaatgaaggtattttgcataagctgaatctgagatttcattagacctaggttcattcagttgatacctattaagcatgttctaggggttataaagatgcaacagaacagacatcgagttcatgttctaatagactctgagatgagaagatagaattgtttggaaatctttcgccatgagcatgaattaaagtcatgggaatggatggagatttgggcctagttctaggtagcagataatcctgtagtttatttaaacctctatatttagggtttgatataataacgtaatgattataatcagctatacagcagttgatattaaaataaggatacaagagaatattggggaattacagtggatcttttaagcagctatgttccttttctgtatgtggaagacgataaaagacatttctttgtctttaaattctaagctgttatttcattaaagttcagtaacttaatgtctctggctgcttattacttggcaatatctcactagctcatcgatgtcagtgtaggctggtctacaataaatgcataaaagaaacagaggccagtgattcatatgatttttaaacagatttggcacaggagtgcctttctgggtttagggaagtggtggacaaggcaggagagaaccacattcatcttctcctcttgtgtttgtcttctgtctttcaataacgtccatgaactgtgaggttagtgtcttggctgagagataagtatggcttggcattgattcttctgttgttacctcaagctgttttctagtccccaagaacagcactctcagtgggtgtggaagtgggcgggacatgaagcaatggttttacattgcattgcctggctacagcttggcatttctttcctttttctttttctttgcgtcattgccattggtgccactaattttgcttcccctctcttttataacttgtttcttcgggagttgcctagagtctctgcattatatcttatttggtattgaggcagtgtgttcttggccaataacctaggagatgatatctgttcatcttacaggtttagtgctggaggaattcattaaaaataataataaaacaaaaaggaaaaataaaagttcctttcagtgggtcttcttcttcctgtccctggctgtcctttactttgggacatgtactgactccattttagatgtccccgtctctcaaaagaggggaaagtggaacatgaggtgggagggtgatagaaaagaatgccaagcccattgtccccagtggttccagaaatcaaaagctagcccgcttgaaggaagtataatggatttctcccctttaggacaaagtgggattggaatactttgtttttcatctttcttctgaccccaaccaaggaaatctataatattcagttctttgaagatctgatcctacttatattttctccttttgatatttctgtcccttgtctgtttgtagcccctcttccaaaagctgactgcaggaaaagagaaagattactattttctaagtttcctaaaaaataaaagagttcttggggggcttgcgtcgcgttagacctaaaggatggatagaatttgggtggattggagtagaggcttactccaggcatgggttacataggaaatatgatggggagccaatacgtagaacctgtttgctgcactgaaaactttaatggaagtttatttggtagaaaagaacaaggaaattagatttgctcaatgattcccaacatggtagaattctgttcactttgtcttttaaaatccttttacatgacttttctttttctttcttttctgagccactaattttgcctaagcccacctgcccattccacatctcccattgttcccatctagttgttacgattgttctttgaccacatatttctccttatatccagggacgcagactgttagttagttatatgttatttccttgctgcttttattcatgccttcatttatttttccatttattaataagcttatttgttcttgaatcatttgttaagcccatgtatctttctcaaatgaggaattacgtgcccacattaactctctacacttcccccgccaggtccccaccagcagaaagaattattttatttttatttttatttttatttattttttttagagacagggtctcactctgtcacccaggctggagtacaatggagtgatcatagctcactgcagcctcagactctgggctcaagtgatcctcctgcctcagcttcttctcaagtagctgggattacaggttcacaccaccacacagctcatgttttattttctgttgagatgggggtctcgctatgttgcccaggctggctttgaactcctggccacaagagatgctcctgccctgacctaccaaaatgctgggattacaagcatgagccaccacacctggcccaacagtaagaactctaaggagatttctggctttaatattactgctatttgttttgcccaatatgattttgcctcatttttcttcttccatttatagaccgctgtaatagccttggtgacaggcattacccctctactcgtcctgatgctgagatctctaatccacatgattcttccacccctacctgcttataaagaatccaaaccctaggctcatattttcatcttctttttagtattttcattcttcttatgtctattatcattaaccctcaaaagaataattttctgtataactgtagacatgtaagtttacagatctttacttgagttcatatggctgtgatagtgtttcactgctgtgactactggaagcttccttaggtattccattgtgtatggaaacggaagttgccaatcacattaaattaatttctgcctcaggaaacatgagagatttaaaatcaataaatgatttttcagtgacactgtcagggaaaatcaaatcttctagaaatttaagtcagaattaaaaatgtgttcttaaaatgtatttatttttatgtacttggctttcatatgatagtttattttaaaaaggctaccgtactttgctatgtttatacttaccagtgtcattaatctgtaaacagtgcagtgccactgacatattctttgaaccattagtgtatggaaggcctcgggagagatggtactggagatacagaaggaacagggtttttttcccccacctcaaaatagaaagggaactctgtcatatgtctttttgtatttctttcaggatgtcgctctgtgctaagcatttaattgatcttcagtagagaaacgcctaaggaactaacttagattatattaaaatagctactgaagatctttttaatgactttctataaaatgagaaagtgcactggatgatgaatgcaaaaatgaaagaaaaattaaatccatatatgcacaaaggcatttgcagagtttgcatgacagctcattcctaagtattacttatggcacttagctttctatgcagagagtaacaataacagtaatattgatcgttacacctgggcttttcaaacaagctagaacacacgtgtcatctgcagccacatgtccttcatgtgctcctgggttcatgcactgcccacggaggaaatactgtgggtcactcttaagaggcatgagttttgctgtgtcaattcaacggagcatggtttgtttgttcgtttgtttctttgtttttctcaagcacctgtttgtccatttgcatgccagtattatggaaaacattttaaaagtatgagttatgttgcatgttcttcatcttaatggtttaaatagggaaacaaaactgataacatgtaaaacagctagcaagggacatacggcattctataattgttgctcattgtggggttcgcataacgggtgctgaaatagttcagaaaattagagtttggagggcatattgtactccagtaatgctccttgggagtgatagaatttgaatgggctctatagatagatgagatttaggcagatggaagggggcgctggtcagaggcagcctcagggcatcccaggccgaagaggtcagtatgcttttctccctcatccattattgcttcttctttctcctcctacttggtttcagtcttttggaaatgagattgacatctttctctaatgattatatttagatacatttattcacatctgtacttccttcaggtggaaatgaagggggaggaaatggagagaaagaattaatgttttccattttttaaagattaagtttattcttagtgtggattacgtattactcacttgaagggaaaccttttacaaggccatctagataagagaaatctcagattatcaactgtgattagtgttttcaactgcactggaaacagaacatataagaacatggatatttttagattctgatttaactcttttattctatttgccagctctaaaaagtagactgagcaaaggtaagggtgagtgctgctgctttaaaaaagggaacaaccagcttcttgtctagttagggaatctcttaagactctgtcacatacattttagtcccactgacatattactcccacctccttgtgggtagtaaagttaaaatgttttaaatgttctttgatcgtccacccaccgatctagtagacttttaagttcaataccgcagctgggagaaaggggagttgaaattcaatttttactgttaaaaacaaggctcaacaatcatagtctgtatgtctgcaccagtttagaaattgtaacaataaattggcttccgctttcaaatgtgttgttagtcatcacactttaaattacgtggcattactatgtgtgacctacttaaaaatggttgtcccttcagtgggaacaatatgtgtgcagccattgggtgtctcgtaggccttttaaaaagctcacttttaatgcaacacattttgaacatcaacacattaaataaatacttactatgattctttactggctggattttattgggtaaagaagtgtgatcagtctttagggaacgatttagtaaacagttacactagcaaatgcctccctcttgccctgtgttaataggacacatattccagaatgatcatcggtttatgcagtatggttcctggaacaggagtccaaagacccaggcccatctctggtcttgttgttacacagcttcatggccttgagcatgtcacctaaccttatacaatatcaccttcctcatgtataaaatgagacattgcattattgtctcaataaacgtcaatctttttaacttctaaggctttaatggtcccagctatgctatagaacttcaaggaaaaacaaaaggataaatacagcagttcctggtcttgggtggctcaagcacttggtcctagttacttgggatacagttagttcattctgatagacatttgtaggcatgtctcaaaatgagtcttacatagcacccctgggtgccttccccacccctttggagcctgtattggaacattggcaggttttttttttttaatgaaataatccttaaagagaaatcagtgattgataaaacagtatcagaaattgcacacaccttgttttgctagccagaagtgagttttcaggggtgtccggtgggacagatggcgatgacatgaatcactagggctcttcgggtgagaagggcctttgctccgagtgggatgtggattgtgggcttttctgcagagacttctttccccaagaaaaccagtagaatgctagtgatgtaaactccttgttcacattgacagatgaacctttctcctcagtatgaatttttttcttcatcttgtcttttttaaatagaggcttgtttttgccctcagatcctggggtttgggagagagtgatatcaaataggaaaaaataaaacctttaaggcatcactacaaataataaatcactgctttggaatgtgaccctttaacctcattttattttcctgaagacttggattgttgtaattatgtgtgtgtttaaaacgcactgagcaaatgcatcggcgctcctgtgactggtattgtatgccatctgcagagcactgtgggggtggccaggcagggaggatgggtttgtactaaacactggatttttcttttaattttactggcacattcagtatgtacttctgtaagaatcaattttcatttcactttttggtcattttgcatgtattttgtatttatgtcccactcaagatcttctaattcttgccaattgttaattgctgtaaacacatataattccaggtagtctgaggatatggatagaggtttgcttttgttgttgtttttaactctggtttcttagattgctcatccttgacttaataaaattatacccttttcctagatattttattaaaatgtgttgtcaatccaaagagtcaccttaagaggctcagagaatccaattgtggtaaaatgtgtaatccagtaaacatctggtggttcatgttgccaggaatgattggaatgtgcctggtactttaatgaccattttaataaaatatggttatgtttttggattcaaagcaggagctttgagggttttttgtttttttgtttttgttttccaacttctctgcttgcaagggaatatctgcagattttctctacatatatgagtttcccatacattggaaatggcagtagtccctaatgagttgggtcagaatggggcagtcataactgcccatggaattctattttacattttagggcattaagggcaagaaaacttacgtatctttacctttttgggtttcgatatgagaaatatgatgcatatatcgctatgaacagaagaggcctggttggtattctttaatccttcgtgtttatagagcctgatatacaaaagaactattgtctaaaaaatctttgacaaagcaaaatatacagagttttgctatctagatatatgctatattcctacagagctttctggttaaaatgaaaccagctctaaagaatagatttaggtaacttgaagattaaaaataaaataaactagaataaacaagtcaggctttctcaaagttggaggtgtccatgaatagatcatactatctcgggaaatagtgggttccttgacctgcaaatgttcaagaatagttgtgcaattaggatgttgaacaaggggctcagctaaacgagtaaatgagtatttggagtaaatgatttttaaagtcttgttcaagtgagattctatagtatctgttttgatacagttttatacaaatatgaatattgttttaaagcagtatgactagtagcacataataaagataatgtccttgacctgtcttttgcttctgccagggttgtgtatgtggcttgagaaaattctttttctctggagttctctaaaacatggaataaagcaaaagtctggatttagtagtttgtacaagccataaactcagtttcagatttttaaaatttcagttaaaaagtcaaggtcagaatgcagtcttgtttagaggaactctgtgtattgtacccaggaaacttttcactttgacaatctcagtggcgtccactcatacccatcttccagggtgccttctagacactcgtttattggccaaacagagcagagcgcttctgaagcaggctgcgggactatccgaagtcacagccacctaattttcgatctctgtcttagctttttccttttagcctcattctcctgatctaggataactctgttatcacttacattctttaatgctttattcccacaagatctctacatcagctggttgacagctccacagataattgtagcagtcaagtggagactgaaggtctgtgatgtctttttttgaatgttgtcttggcttttgtgctgaactctgctctccccattgcctcctttttgtaaaacctgattttcccattttagtttaggtggggtttttttgcaccaaacgactttcaaactcattattaatgtctctaaattataaaatttccttgacctcctactctcttctgtcatcatttcctgtttttcttgtaccatatgtcatctcctaaaggtttttagcggttttcttcagattatatgacatttcgggtcttaggagagtgctatgttcaaaagcacagctaatacatgaatacatgtgatactttttgttaatattcttctgattataaaatgtattaaacatttgttttagcaaatctgtaaagttttaaaaatgcatcagtattcccaaagctgagataactgtgtttgaatattcccttctagtcctgtatatctgtctatgaagctaaatgatctaacctctttgtaatccctgtctctgcctacttcactgcaagaacaaacaaaccaaagcacacacataataatatgctaaagctacaaatcttcttttataattccctatggggaaaagtaaagttaatttgagcatgtaatggataacatgggaaaataggtaaatattgctgtgattctagatgaatgtagatgaatagaggaattaataaaataaaagattgtgagggtagaagactattacatacaaggtaaccttgttgagggtgttgttttaggaaatggcgacagggtaggggtgtggcagctgctccaggaggtaagatacagtcagagcttcaagggctcactagggcagggtgaaactaattccatttctgccgaatgtgcttgaagaaagactgttaaacccttggacagaagtgggaggcaatacacaagcacatgagtcccagaggcaggccgctgggtgccgtcttggaagctggccatcaccagtcccactgagccagcttcagcatttagtctaatcctatggagcattttttgtgttctatttaccaagtctcaccgcagagaatttaatgttcgtaagggagctagagcaggcaaaagtttatgaaatacaaagaaaatgaatagttcagatttatgtgtgaaaagaattacaaggcaggctgtatggagagaaggcaaagggaatattttgttttgcttttttatctttctaactgagtcaaaaagtcaggagttgactcaagtggttatagtgtgacccttcatcaaagccagtattgtggctgctttggagaaagtaaaagaaattaaatttaacatacaaacatataaaatatataatataacaaatttgtttaaaattgattccctttctgcaattttgcttcatggttggtttttttttaactggagcaaaatatgttttggctcaaaagcttgcaacattaacattgtataaagaaaagcaaattagaacattcagaccacatttataatgggtgacctcataacagtaataaatgctcctggcagaagcataatagttgctaaactaggcatgtacttatagcaagaactcctcactcccattctggaacaatttttaaattgaccttttcttttaagtggttctgctccttaagaaagtggcccgttgcaaatggatgttagtataaaatggttactttttgaaaaaaaaattaaaataaacgtaatttggttaattttatttttatttcattctcttgtttgagtttgaaatgttttggctttaggttgcatattggagacgggaacaaaaaaacctttaagactgtttaaaataggttgattttagtgctggaagctaatttcgtttttgtttctaactaggaagaatctcaggattttaagtccagaggtctgagttttgttttttagaaaaaaacttacccttgattaaccacatcttcctggagcctggcaagaggtgggtgtccaggcttgggcctgctacctttggctactcctcttggtcttagagaaggtagagatgatcatgctcacacatgtgctgtatccgtgagggagttatagattgagaaatattaccttttaggccttttttaattgaaaaagttactccatagaagatcaaatgaagtcactttaaaattgtacatttttaagctattgatgtaaatcaagcatggagaacagtttatagaactacaatggtctattaagaaaggttattcagaacatgttattcctctgcttaaaatcctcatcctataacatccttctacacttaggaaaatacatttagactccttatcaaagcttgcaagacttacttgaactgggtcttgaataccctccctgcctcatctctcattatttcctctcccactgcccaagcttcagccaccctggccatcttgctgctgtgtgaatacaccaagctcattcccactctcagccttttgtttcacccacctggaacacttcctttcattggctcctcattaatcaggggcctgcaagaatgttgtgttttcatagaggcatttttccatttattccactgcagagcccggaaaggtaaaaactatatttccctctcctcttgctgctcaggttctggttgtggtttgatgccaccgtcagacacaccatatgaggtgtgtaaggtgagtgtggaccatgagtggtaagtatggatgtgggcgtgtttcgtagacattcagccttgaagtttttctttgacctttccagcaatcaactgtttaatacctgataaatcatgttttaagctagctaactagattttgttctctgcactcatggcctgaccaacaattgggccatggccatcctctttgaaatagcactcacccactcctgccgttatgctctgtcctcttaccctacttttgttcgttaaagcacccagagcaacctgaagcaaccaatgtatttgcttattcctttgttagccagctccctcactcaaatctatgttctatgaagttagatgctttgcatttttactgctgtgtctgtctctacctagaacaatgcctgtcacatagtagggactcagtaaatatgcgttggatgtacttatttgctacagttttttggtagctgcctggagggttggagtaagaagaaattgcagattgcaatggggttcaagaaatgagcagtattattagtaagtggtgtttgccatgggttctagagcagcagagccctgttgctatgcctgccatagattataacaactgaggtagagcattgatgcctgtgtttgggaaacacttccaagcgattttgcttttttaaaaattatgttttatttagctccagagacaaaatctaaagccttctagtctgtaggaaaaacattccattttaaaatttctgtcagtttataagtcattaagttagagtttgtagagcacttactctttaataatttgaatgaggataattcaaggaatagcaaaatattggctttcctgaaagtgttgaattacatacatggatacattaataatatgtttcttagatctgcttaatctaggtcaatgcttttcaaagtgtagattgtaacctattaatgggtcattatgttaatttagtggtttgtgactagcatgtttttttcttttaattttacatgtgcaggatgtgcaggtttgttacatgggtaaacgtgtgccatggtggttagctgcacctatcaacccatcacctaagtattaagcccagcctgcattagctatttttcctgatgttctccgtcttcccaccccctacaaggcccagtgtgtgttgtttccctccctgtgtccacgggttctccttgttcatctcccacttatgagtgagaacatgcagtgtttggttttcttttcctgcattagtttgctgaggatgatggcttccagatctatccatgtccctgcaaaagaaatgatctcattcctttttatggctgcatagtattctatggtgtatatgtgccacgttttctgtatgcagtctatcactgatggacatttgggttgattccatgtctttgatattgtgaatagcactccagtgaacatacacgtgcatgtgtctttataacagaataatttatattcctttgggtatatacccagtaatgggattgctagattaaattgtatttctggttctaggtctttgaggaattgccacactgtcttctacaatggttgaaccaacttacattcctaccagcagcgtaaaagcgttgctgtttttccaaagcctcaccagcatctgttgtttcttgactttgcaataatcaccattctgactggtgtgaaatggtatctcattgtggttttgatttgcatttctctaatgactagcgatattgagggtttttttcataagtttcttggctgcacgtatgacttttgagaagtatctgttcatgtcctttgcctgctttttgatggggttgtttggttttttttttttttcttgtaaatttaagttccttgtagtctctggatatcagacctttgtcaaacggatgtttcaaacattttttcccattctgtgggttgaatgtttgctgtgatgatagtttcttttgctgtgaagaagctctttagtttaattagatttcatttgtcaatttttacttttgttgcagttgcttttgacattttcatcataaaatctttgcccatgcgtatgtcctgaatggtattgcctagattttcttctagtttttccagttttgggttttacatttaagtctttaatccatcttgagttaatttttgtataaggtataaggaaggggtacagtttcaattttatgcatatggctagccagttttcacaacactatttattaaatagggaatcatttccccattgcctgcttttgtcaggtttgttgacgatcagatggttgtaaatgtgtagtcttatttctgagttctctttctgttccattggtctatgtgtctgttttttgtaccagtaccatactgttttggttactgtagacttgtagtatagtttgaattcaggtagtgggatttctccaggtttgttctttttgcttaggattgtcttggctgtacagactctttttcggttccatatgaattttaaaatgatgttttctaattctgtgaagaatgccaatggtagtttgattggaataacattgaatgtataaattattttgggcagtatggccgttttcatgatactgatccttactatccatgagcatagaacgttttttcatttgtttgcatcatctgatttccttgggcagaggtttgtcgttctccttgaagaggtcgttcacttcccttgtttgccatattcctaggtattttattctctttgtagcaattgtgaatgggagttcattcatgatttggctctctgcttgtctgttgttggtgtataggaatgcttatcatttttgcacattgattttgtatcctgagacattgctgaagtgacttatcaggtaaagaagcttttcagctgagataatggtgttttctagatataggtttatatcatctgcaaacaaagacaatttgacttctcttcctatttgaataccctttatttctttctcttgcctgatttccttggccagaatgtctaatactgtgttgaatacgagtggtgaaagagggcatccttgtcttgtgccggttttcaaggggtgtgcttcctgcttttgcccattcagtatgatactggctgtgggtttgtcatgaatggcttttattgttttgaggtacgttccttcaatacctagtttattcagaatttttaacatgaagggatattgaattttatcaaaggtctttttggtatctatcgagataatcccgtggtttttgtctggagttctgtgtatgtgatgaattacattaactgatttgcatatgttgaacccgccttgcattccagggatgaagccaacttcatcatggtggataagtttttcaatgtgcttcgggatgcagtttgccagcatttattgaggatttttgcactggtgttcaccacgtatgttggtttgaagttttcttttttttgttatatctctgccaggttttgatatcaggatgatgctggcctcataacgcgagtaagggaggagttcttccttttcaattttttggaatagtttcgcatgaaatggtactagctcctgtttgtacctgtggtagaattcagctgtaatgcatctggtcctgggcttttttgtttgtttggttgggaggctatttattactgcctcaatatcagaactcaatattggtctgttcagggattcaaccacttcctgattcagtcttgggaaggtgtatgtgtgtatgtgtctaggaatatatccatttcttctagattttctagtttatttgcatacaggtgtttatggtattctctgatggttgtttatatttctgtggggtcagggatgatacccctttatcatttttattgtgtgtattcaattattttttcttctttattgttctagctagtggttcatctattaattttttcaaaaaaccagctctgggattcattgattttttttttttggaaggatttttcatgtccctatctccttcagttctgcgctgattttagtcatatcttgtcttctgcgggctttgaggtttgtttgctcttggttctctagttcttttagttgtgatgttaggttgttgatgtgaggtctttgtagctttttgctgtgggcatttagtactgtaaatgtccctcttaacattgctttagctgtgtcccagagattctggtacattgtctttgttctcattagtttcagagaacttcgtaatttctgccttaatttcattatttactcaggagtcattcagaagcaggttgttcaatttccatgtagttgtgtggttttatatgggtttcttaatcttgatttctgattggatcactctgtggtccgagagactattatgatttcagttattttgcatttgctgaggagtgttttacttccaattatgtgatcaattttagagtaagtaccatgtggtgataaaaagaatgtgtattctgttgtttcggggtggaaggttctgtagatacctgtcaggtctgcttgatccagagctgatttcaggttctgagtatctttgttaattttctctcttgacgatctgtctgatattgtcaatggggtgttaacatctcccattatcattgtgtgggagtctaagtctctttgtaggtctgttaagaacttgctttatgaatctggatgctcctgtattaggtgcatatgtatttgggatagttagctcttcgtgttgaattgcatcctttaccgttatgtgaggcacttctttgtatttttttatctttgttcatttaaagtctgttttgtcaaaactatgattgtgacccctgctgttttctgttttccatgtgcttttcctccctccatttattttgagcctattgtgtctttgcgtgtgagatgggtctcttgaagacagcacagcaatgggttttgactctttctccagctttccattctgtgtcttttaattgaggcatttagcccatttacatttaaggttcatattgttatgtgtgaatttgatcctgtcatcatgatgctggctggttattttacagacttgttaatgtagttgcttcatagtgttattggtctgtgtacttcagtatgtttttgtagtggctggtaaccattttccctttccatattcagtgcttcttacaggagttcttgcaaggcaggtctggtggtgatgaattctgtcatcatttgcttgtctgaaaaagattttatttccccttcactcacaaagcttagtttggccagatattaaattctaggtcggaaattcttttttttaagaatgttgagaccaggcgcagtggctcatgcctgtaatcccagaactttgggaggccgagttgggcagatcacctgaggccaggagttcaagaccagcctggtccaatatggtgaaacccaatctctactaaaaatacaaaaattagctaggtgtggtggcaggcacctgtaatcccagctactcaggaagctgaggcagaagaatcacttgaacctgggagttggacgttgcagtgagcctaaatcacgccactgcactccagccttggcgacagagagagactccatctcaaaaaaaaaaattgaatattggcccccaatctcttctggctcgtaaggtttctgctgagaggtccactgttagtctcatgggcttccctttgtaagtgacctggcctttttccctggctccctttaagattttttcttttatttcaacctttgctgaagattaggtatcttagagttgttcttctcatggagtatcttactgtggttctctgggtttcctcaatgtgaatatttgcctgtcttgctaggttggggaagttctcctggatgacatcttggagtatgttttccaacctggttctgttccccctgtctctttcaggtaccccaatcagtcgtaggttttgtctttttacataatctcatagttttcgaaggttttgttcattccttctcattttttttccctctaatcttttctgcctgtcttacttcagcaacatagtcttcacctctgagattctctcctccacatggtctgtttggctattgatactcatggttgcgttgtgaagttctcgtgttgtgtgtttcagctccatgaggtcatttatgttcctctctaaacgggttattctggttaacaggtcctgtagtgtttcatcatggtttttagccgctttgaattgggttagaacccactcctttagctcagcaaagcttgttattaccaccttgtgaagcttacttctatcacttcatctgtctcaggctcagtccagttctgtgcccttgctggagaggtggtgcaatcatttggaggagaagaggcaccctatttctttttaattttcagtgttttttctttgattctttctaatctttgtgagcttatttaccttggatctttgaggctgctggcctttggctggggtttttgtggtgtcttttttgttattgttgttgttgctttctgtttttcttttaatagttaggtccctcttccatagggctgctgtggtttctggggttccactccacaccctattcacctgggtacctcccatacctggaggtatcaccaggggagtctgcagaacagcaaagatggttgcctgtttgtttctctgggaactctgtcctagagggacactgacctgatgctagccagaactctgctgtatgaggtgtctgatgacttctgttgggaggtttcacctagtcagggggcacaggatcagggaccctcttgaagaagcagcctggctgccccttggcagaacaggtgcagtgggctgaggggattcccacttttctgagctgaccagactcctcagagccagcaggcgggagagattaaatctgctgaaccagagacagtggccgcccctcccgtcaggggctccatcccagggatcaagagttttatcctaaatccctggctggagttgctggaattcatgtggggagaccctgcccagtgaggagggatggatcaggtcccacctaaagaagtcagcccatgatctgccacagtcgctgtgcttcactgtggggaattcctcctggtctaaactgcccagtctccctggcatcagcaggagaaaacggccaattggagccacagtgatggcagccacccctttccccaagaacttggtcatcttagtctccagcctgctaccgctgtccacaacccgagcagctgctgagagtctgcacagctctgtgcatgggacccaaggccctggtagcgtgggttcacaaggggatctcctgatccgcaggttgcatagatacttggaaaaagcgtggtttccctggtggggtagtatgatcactctccacctcccttgactggaggtgggagttcctcttaccccgtgtggctctcaggttggccattgttctaccctgctttttcttgctctccatgggtcacgccaaccacctcattagtcccagtgagataatccggatccctcagctgaaggtgcaggattcactcactgtttttgttcctctgggtgggagccacagaggagagctgcttctagtaggccatcttgacctctttcttgactagcatttcttttattaaaatgcagtagaaaatagagggtattatgcatatttgcatcttttatgtactgggtcatgacgaaaatgttgtctgttacagaaggttagagtaaaaacttttggaaaaacacggagagacagctgtgtggtctgtaacttataagtgatggctctactcagaggtactgctaagactgaaagttagaaatttttctgtggaaaaaaaaaattttctaatttttttttcaatcccaggcctagagctgccatgaggtgctatattcagtattcacataggtggaaagtggagagagagcagttaatcacccttgtattgagctaggtgctttaccacagtctcttatttggcccttccatacaatgtagaggaattactgttactctcatccctaaatcctaagaaagaaaaggaaggtttttctgttgtctttatccttatatcctctttgccatatgtgtaaagaaggaagaaagagtaagtctgaggtttaaagtgagccccattaaaactgtaaattagtcaggattcctctgtctgttttccctttctcccctgtctccaggatcagactgggtacctctgccgagattgtgaataaatattctttacataattggccaacatttctttaaaagcaaggtggtttattacctggtacaagagcagagaaggaaatgtaggtggcattgcctaatctttcctctgttgccctgagcaattcagctctagccccaaactttgatgtcctacttggccacatactgcagtcattgtgacctgtcttctgtggaagacatcagtatctgtctgtttgattcaggctttcctttttgcgtctcttacttcccatcccaaacttttccatctcagactgtactcttcggggaagaagtataagaatttcttcctagcttactatgtttctaatgagccttattttattataatgagctaaaattggcaggaggtaacaaacatgggccctgaatcccagccgtaccacttctgacctcaagagtgttatcagtcatatgagctttgctgtctcatctggaacatgggagtgatgataatatctatctcatagtcttgcactttttgtttttataagatcattgattaaaaagtattcagaactgcctggcagtagtagcaagtgtgtgtgttgtggggctgtcaactgtaaatcccaatcctccaatctgccaagataagtaggataagccctgccctgaagctgttggattaatttagtcagaaatcaatttcatgaacacttcttgagaatctgctacttacctgttgctgtgggctgtgtatagaaaacttcaaggagctgatattcatctagaaaagtctcatagacttgacacaggagcagagcagtataaaggggtagtgctgctgttgtgaattgtcgggtaggttttctggaaaggggaagagggtgagctttgaggcgtttttgaaggatgggtaggatttggacaggcagagaagaatatgcaaaatcagcacaacgagagagtgagtatatgatgtgtatacatgtgtggagtggcagctgaatgggaataagcgtaataggaacatggaattgcaaatgagaagtagtcaagattgcattggatagaatgcagtatggaaaatcctgatttcctaaatgagaatttgacttagtagtcaagaatctttgcctatttcttccctcattcccttataaaaattaaatttaaatgccagtttattaatttaaataaatgctgtctaagctggtttaaccaggacattctttcctaataggtaactaagaaaccatataatatggtatactcagaaggttgcttagctggtgtggcatcaggacaaaggaagctagaggtggtgactgtttaatgtcatgaagcttaggcagcttgatgtagccatttccagtgaggatgtgtttgccaaaggtccacaaacctcacagttcattagatgcagcttctatatccatctccttgctaggtgattgccagctggatgaaaaatatatccaagcccattagctaaggctttttctcccctggattgtgcatggatgggcaccaccagtgctcttctatatggcttttttgctaatcttctttggctgacaaatagtgaacaatgattatttctttggatattgaaatgactcagtcaagttagaatcaattccttttagtttgttgacctatcctgttgttttaaggttttcttttttttaaccaatgtgtgtttgtgtaatacatagttataatagaacaattaggaaatataaataagcaaaacgagaaaaaattcttccataatgacaatttacagcacaatattgcattgtgtatttactaaacagcttttctgagtaacaaagaaccctaaaatcttaatgggttgaaacaggtattcatttcccttttcaattactttttggtggctacagaacggctgtggcagagctctgctctaagcgtcttctcgttgggagatccattttgaaataacagttgctcagtgacaagcccttcctgtggtggaagggaagaactggacgctgagccaacctatacagtgcatttaaagctgctggaatgggacatgggccctatttgttcatagtccactggccaaagcaagttacatgggtgtggtcaacatcaatggagtaggaagctttccttgggaaaccttgggagtaggatatgcagtagatatttgtgaaaagtagtatttttgatactcttgatcacaaatattctttttccacatacaaaatacgtttgtatatagcaatacaacaaccacattccactttcttgatcacgaatactcattcccctccaaaggcagaatatactcaactcctccccaaagaatagttacccagacatagcctatgtcactttctttaagacttttttaatatagatatagatgaacacatatttaagtgtggtcttcttttttacctattaatatactaaaaagatctttacatatcaatatgtatttcaacagaattttaatatttacactagatttcattttatatgccttatgttatttaacgaatttttttttttttttttttttttttgcttgagacagggtctggctctgtcacctaggctgaagtatagtggcacggtctcagctcactgtaacctctgcctcccaagctcaagtcatcctcccacctcagcctcccaagtagctaagactacaggcacacgacaccacacccagctaatttttctatttttttgtataggcaccgtcttaagccatgttgccctggctgatctcgaactactgagcttgagcagtccacccggcttggcctcccaaagggctgggattacaggcatgagccatcacgcctggcctagtccctcatttttagacattgttattgttttcattttttgttattttcaacaactgcttcaactaaacattttttcatttccttaagaattactgagtcaaagaatgaatgcagatgtttttgtgctttttatttgtattattaatacaataaattgtcatctaggaagggtgttccatactatttctgggccagtttgactgatgaaattagtactcattgtctcgatttgcatttttggtactagttaatttttatttttcttatgtttatggaaaacttgctttcttcattttggggttgcccatttattttttccaatttttaaattgagatattcatctttttcttagttgatctccaaaacctttttattttttttaaacattattattacctttgtcgtatatgctgcttatatttttgctggtttgtcttttaacatattatttttctactttcagtttttaatcataagctggacaaagacatgaatgttgtaggaaggcagaatgaaaagaacaaagcaatagaactagataggaagtgtctcagcaacttagcagaactgagatggaaactcacaataaggttctcttattggggccagacatggtggctcacgcctgtaatcccaacactttgtgaggctgaggcaggcagatcacgaggtcaggagttcaagaccagccagcctggccagcgtggggaaaccctgtctctactaaaaatacaaaaattagccgagtgtggtggcacgtccctgtaatcctagctactggggagggtgagacaggagaatcacttgaacccaggagacagaagtttcagtgagccgagaccacacaactgcactccagcctgtgcgacagagactctgtctcacaaaaaaaggttctcttattttcctttatacacggagtttaaggtccccattgtgtaagttcatcttgctagaactggtcctctagtaaagggagattcttcatttagagtctagtaagaaaaataaatgtccagagtaaagcacattcttatttcagtaaagggttgtgtgaagctatggcatttttcttaccctttagttgccaaatggtctaaagaactactagcgttttaaagagaggaaagaaatgtatctgttttcagttggaaagtagcattttggtacatcatgctttgctttgtttcttgctttttcatctttttggcatcttttttaaagatcttatctgccaggaagttccttttttcttttttttccctttttcgtggatcagctgctttttggaatcaatgccacaattttaggaccaaatcagtgatgctgcagtagtttcagggttaaaagcactttggttaatgtgaaattcattgtcaaatatacttcaggacaaattatgaaaatgatagcattgagattcagctgtatccatttctattcatggcttaatgaatattttcaggcttagtgttatatattctcattagcaacatattcatgttattttacttattttaaaaaataaacaactaaaggttagccaccatcttctcggaaatattaacagcatccattgtactgcagtcatccagtcttctgtggaagtcagttgcatgttatttactttaacaaagaatttcatgtccaagggaattctctatatgggatctcttttctctgggtgatttattttcactggcaaaatggtacgtttctagaggtttgtgtgcttatgagtttggtttaaacttttccttgaaaagtaaatgcttgatcccctcagagtccaaccacctagtgataatgaagaactgaaggatagttatttcaatttcgacgtcttaaaagtgcttaatgagcaccttttcatacctttaaggggacctctctgtgtaagtctctgaaggcccttgctgagacattggttcatcagtggcaggctcatttgcatcttggtccctgagcggcttcagtgtgttttacagctgcagaatgcactggaaacttctgcccctttgtagactattaattcattggggagaaaagccctcgtgacgaggcagtggcatctgctggtggtgttgccttctttttcttgtattccttttttaaccaaaaagttaagacatttccttcagctctcgacactctcaaataaggagagttcctcccattaggatttttcacagttcttgcctcagaaaaacacaaaaatcaagataataccagaaaagacatggagaaagacattttaggagaacatgaaaatggctatagcaggcactacacaaagcagtaaaatgcctcttataaagagtacctatagctgtccaagcgcggtggctcacacctgtaatcccagcactttgggaggctgaggcgggcggatcatgaggtcaggagatcgagaccatcccggctaacatggtgaaaccctgtctctactaaaaatgcaaaaatttagccaggcgtgatggcgggcaccggtagtcccagctactcgggaggctgaggcaggaaaatggtgtgaacccgggagccggagcttgcagggaaccgagatcacaccactgcactccagcctgggcaacagagcgagattccatctcaaaaaaagaaagaaagaaagaaagagtacctatagctagaagagaaaaattgtaatgctcccaccacaaaccaaagataaatgtttaaggcgatgaatatcccagttaccctgacttgatcattgcacattgttgtgtatatgtgtcaaaagaacacacatacccctaaagtacgtacaactatgattcacaatacaaaaaggggaaaacagtaccaattaaggtaaagatgtgctaccaaagatgtgctaacattttacatgatttccatctcataactcttagaacaacccataaagtaggttacctatgtacataaacacacaccaaaaaatttcctccatcaccaaaatcaggtgatgttttgaagtcatccgggagaatgtggatctgagagatacatttccaatatatttcaagatgatcttaaacatgtagaaagacctgtcggttacaaattgattatttcagccttcctctacagatggacaagttattggtgtaaatacatggcagctgtaaatatcagtcggagtatctgaagtcactcccaggattcctgggaaaacattctgccttgggaagtaaaatgctgaaacgaatgcactcttaaaggggttttgtttttgcttcttttttgttttcagctctttcatgtaatttcacataatttgtaggcaaaaatcccaagagccgtaaatggtcctgtgaacatagtatttcacaccagtgatattttcatgtttttttgtcggttgaaaaaacctgagatgaaatagtgttcataaatctctactttgtacgtagatttttactccctcaggaaagctcatggctatgcagttgtaaagctcttatatttggtaaatattaaagcaaatattcacttaaagtcatactccaaatattactgcataaatcagtgcatttaaagaaagttcacattgacaggcacgtgtatatatcctttaaacatcttggaacttactctgcactactaggaagccacttttttgtttccttcaacaatggaagacttcacttaaatgatgagactagtacatacacatttggtttaactggactgcaatataaatgttcagcttaccctattgataaacgatgtgattgttccattctgtataaaaggtttcttgatacatagtatgttttcaattgtgtaagcttcataaaggggcttgttgaaataggttactgtatatgagtttaaaatttatagcaagctgaatgagacttgtattgtgtttgaaattatttataccaactcaagagacacagcatttcttgtgaccaaaaaaaactattttacttacagtatacaagataaaaatgtttcatgtggccagtcacagtgacttgcacctgtaatctcagaatttggggaagttaaggcaggaagatcacttgggcccaggagttcgagaccaacctggacaacatagagtgatcctgtctctacagaaaaaaaaaaaaaaaatcagccaggcttcttggcacacacctgtggtctcagctacttgggaggctggggtgagaggattgcttaagccaggaggttgaggctacagtgagccatgatcacaacactgcactccagcctgggtgacagagtaacaccctgtctcaaaataaataaatacacaaaatattgttttatgaaattatagagttttaaatttccaaagaccttggagattataacatcagtacagatatataaactgaggtctggagatgtaaagtgactcttccaaggctgtatcacaggatggtggcattgcgtcaggttcactcaaatgttgtgaatcttagtcctgcatcctttctactctactgtttgcttacccctagacggaaggaaagaaagaaaaaaccaaaggaaagaaaaagactgaaaaaaaaggaagttgcagtattctacgtattggtcttcagtgtgatggtgtgaaacccattggtgtttgagttgagaggtctcgaggcttggcttctgttcctggttttcccccagtatgtctgctaagagaccatgttgtgcttatgcttattcttagctccggaagcacattgttgattttctcaaatattgttttcaggttattagaagtggagcagaaaggtttaagcatgggagatagcctctcacgagtgttcacactatttcagcagtatgttatatctttaagagcttgatccttaagaaacaaccgtactctagaaagtacatcatttttcctattactaataatgtatagataactcattaataggaatctgtaaaatattcttatttttggccaccgatatgataaattcttggactttatgtaccttttaaagtacatctaattaagtgattaggaggtctgtttttaaagggaaacagggaaagttgctgcattattgtctgggtttggtttttatattgtatattatctttaatgttaatacaacagtcccaaaagatggttgctaatttcaggttctgtttctctaattcttggcctaggaaaatgaaaataaggtttgactgaaataagattctgttcaaatgtccttgcaaatgaggaagcctcacattaccaattttttcccaggaattttattgttgattaactgctgatggggtagaatttatagttgagaataatttcaaaaagttaatcagttgccaatgggcttagtaaagaaaggaaaatataggagcggaatctgcagcttgatttttgtggtttttttttttgggtggggatctcattattgtttgtacaatgtgtgttactgcgaaaaaccctaatgaactttggcttaaatactggtaataactaaaactgctcattctcccagtgtgaccacccaccattctatagcctaccatgcctatccaaaagtttataattaatttatttttatatcatttgaattctttttcctgtattgcccagcagtctttacgctacctgaaatttttaccagaaatgacagacattccagcacatattttctaagggcactatccttcatatagagtattcggtcaagtgagtagaaggttagtcaaactcattcaatataagtccccagttttcactacactctatgaattgttatcaacctgaaaataagctcaagaaagaaatgttgggtcgtcttgcctgactgtgactaggtgtcttcatctgagtaggctacattactgtagtaaatgatctcaaattgttgactggctccaacacagtataagtttgtttcttgtttacatggttgtcaaagctagatattcctggtgaacagattgcttctttttgcaaaaatacagcagcctctttccattttgtggcatcatcatcttcggggacttatgaatttttctgtatttggcctgtaaaagtaaaatgagtagtggctcttaaaaagcttggcctggaagtggcacacatagctttcactcacattccttagcaggaatctagttgcaagggatgctgagaagcagtctctggatgttcccagaaacaaccctgtaccatgggaggaagaagggatttaggtggacaaacaggcatctctgccacaccaggtaaccttttcattcatttccttatgagcctggttgagtggggtttcatctttgggtcttcagatgattaatattaatacagatttactatctctcattaatgttaattttaaatgatagtgtttctacatattttctagaaaaagctagtacttttttattgaaacttatctcacatattattgttcctgcatataaaagctaacacagaactccttaatcctaattaaatagattagttggaaatcaatacacctacttctgacaaagaagccacatagatataccatcttggatgttacttgtatgattataggtatatctgtttgctattgctactgtatcaaattaccataaacttgttgtcttaacacaatatattagctcataggtctgaaggtcagaagtccaaaatgggttggcagggctgtattccttctggaggctcgaggggagaatctttttgcttgtcttttccagcttctaagagctgtctattccttgattcatgaccccctttctccaccttcaaacctcttcttcccttctgcttctgtcatcccgtcttctctgactctgaacctccaacctcttttgtaagaacgctgtgaggctgagcatcatggcttgcacctataatcttagcacttcgggaggccaaggcaggaggatcacttgagcccaggagttagagaccaacctgggcaacgtaatgagacctcatctctacaaaaatttttttaaaaaattaaaaaatgttaaaactaggtgggcatagtggcatgtgcctgtagacctagctacttgaaagattgaagcaggaggctcagttgagcctaggagttcgaggttacaatgagctatgatcgcaccactgcacttgagcctgggctacagagtgagaccctgtctctgaaaaaacaaaacaaaaatacatcctgtgtgcccactgagacaacccagggtaatctcttctccttaagttcgttaacttattcacatctgcaaattctcttttgacatataatattcacagagtatcataaaaatcttgtgatctgagagttaggacatggacatctttggggggaccattattcatctttccacaatagataaattatgtacagactttttctcagagaaaagtgatgcaacgatgaaatggatttttgtttgcttttcagaaaacaatttgctgatcagactgtgctgtgtagtgacgaaatgttgatgccagaaggaactggagaggttatttcatccaacactcacatttcctggatgaggaatctaggacccctaaaaattgatagatacttgcccagaggtaattcacgcaatcacaggcagagctttgggaccttctggggattttaagataaaggaggagagaaggtgccatgttcttttcttagaactccatttaaagcattttgtttctttaagtaacaataatgttctagaatataaaatgttcccaagttgacttctgatagcaacgaaatgttttagtgaatcatggacctcagaccttaatactgtatataaaagaaacacttttctataatgttctgcagagcactcttgtttacatagactgtcaaggagatgggctccatatttaagagaaaatgttttgagtcttatcacttgtcaggtacttttgttggccagtcaggagtggatggtaaaagtactgacaattctcttatctcattcttagcccgttgtttcctaccctctcccccttgcctgtgatacccagtattgtcgccactcaccccatgtcgctgtcgagcagttaatacctggctagtccaaattgagatattctgggagtgtaaaatacacaccagatttcaaagactcgtgcagaaaaaataatgtaaaatatctcattgtttttattgattacatgttgaaataacttcttttaaatttgataaaatagaaagagagtcttactatgttgcccaggctggtctcaaacccctgggctcaagtgatcctcccacgttgtccccgcaaagtggcaaagtgctgggattatagacatgagccaacgtgcctggcctgaaatggtaacattttggatatatggggcaaacaagatgcatcgttaaagttaattttacttgttttctttttacacattttaatgaggttactagaaattttaagttattatgtggcttttatagacttctattggacagtaccattctatacttttccccagctctaatgatgttccgatttgaggcacactactgctcccttatcctatgagaatcagatatcttagaactagtgcagtaaaaatggagtatttcttatttgtattcacaagctaggaagctcatcatatcttgatgagtgactgtgatacttattataatgtactaagacctttgtaattctggggaaaatgcaattagtaatatctgaattaaagaataatttaaaagaaatgcacttttatttgctcctcggaatgtatcttaacacaagctgagcaacgtgctgcttagtaaaacaggccacacagagtaattgaaagagcatagtcttgaggatccaagtagattcaacattgaatccaagctcctgtcttagctgaaaagctttagacaagttaactacttcctctaaaaccatgtataaaatgggactgataatatctatctaatagtgtttgtcatacgtattaaatgagataatgtgaagtttccggcctgtatgaaattccctggggaacagactgagtcgtatggaggtgaggaggaggtggaaaggaagcaggattgggcagagaggaacggacggcaatgccatctcaacaaaggcctctgtgaatccttgcagagctctgggaccggaggtcggtggagaaagctagagaggcattgacacatcctcagatgcaggtcctgtctcccatgaccctgggccaggcaccttttttcatctcagggcaattctcagcgacagctgccaggtgacgctggatgtgcccttgattcctgaaggggtgtctgggcagctcagcacagagtctacccaggaatgtgcattccccccgttcctgttaccagcttgcattacacatgagagagggtactgttctggtcacatgaagttatcattgttaatttatccatttgacttgtttcatactccttcttgttacagacaacattttttaactcatctgttccaagtttctgtaatggtctttctagagtgtagtccttggaaaagaactgtgaggttacaaggtagataaattcaactttacaagataatgcaaaattattttctggtatgtgtatatacccaggaagagcaaaaccgttgagattggtgtcctcaagaagtttaatggtgatggttatgttctgtttcatgtacttggaggaatgtttaagggtgttttttattatttctaatatcttgtgtaaatattatatgtattgtttcgtatgtgtcagttattacataataaaaatgccccttaagggggaatagatcaaagttatccacagttctatggaatccttcaggggtcttctggcatacatggaagaagtctaatagtttgtttctacagtatttgatatactacctagtttggtttatgacatgacaggaggcatcaaagatgctgttatctttttacttcatgcatgcacttttatgtctgcaaggctgatttggggctgacaggtatcaatgactgttgtgtctgcagtttcctctgagagagattaagatttcatttagattgtcagccttcacatagccagcccaagttgtgatctcaatattactgtaacattagctctcatcaggcctttgtcgttgctgttctttgcaaggaagctttctccctctgctagggatctttagtctaaaagtctagaaggctaaggatccctagtagaaggggaaggagtagttttacccctagagaatttgggaattgcacagcctaactctggtcccttcctgtcttagagggtcttttttcctatccatttattgtttccttcttatataaaaatgtattagatttttttaaatatctaagagttagtatttttatgctataattttcctccatacctttggccagctccaaggatcccttgaatcagtactaccacatgaaaacagtttcatttatcagaataattttttttttcagtggagatagggtttcactatgttgcccaggctggtcttgagctcctgagctcaagtgctcaagtgatccgcctgtcttggcctcccaaagtgctaggattacacatgtgaaccactgcacccagcctatcagaataattttaatttattatttaagaagtgaaagaagcttccatctagagaaggaacttcactttttttttttttttcggagatgcagtctcactctgttgcccaggctggagtgcagtggcacgatctcggctcactgcaagctctgcctcccgggttcacgccattctcctgcctcagcctcccaagtagctgggactacaggtgcccagcaccacgcccggctaattttttgtatttttaatagagacagggtttcaccatcttagccaggatggtctcgatctgctgaccttgtgatccacctgcctcagccttctaaagtgctgggattacagacgtgcgccaccgcgcctggctggaacttcatttttaatttagttaatttgagttttgtagaatgttttctccacaggcttagggaacagtgtggtggtagcagatgaggagagttggctggcaggttagggctcaggtgggtgtggtgggcaggtgttgaagggaccaggaacattttattgatgatgatttactgtgtggtgcctcaggcttgagtaggtaccagtgtcttcttaatctttgtcactgaaacaaaacactggcttgaggtgctctagttaccttactgtttcatgacacttggacaggactattttcagatcccaaattcttttttcagatctttcctagcattcagggtccagtgttactacccatcatcactacttacctatcagatgccatgctaatgcttcatctctgtttgccctgcaccatctaatataagtcagttgtaatagccaggattcctggctccaaaaacatggaaactgacctttaataacttaagagtaaaaaggaatctattgaaaggtcatcaggtagttcacagaatggaggaggaggctattttgaggatcatattagaaaaatagacttgaaccaaggaggctgagtgcagaggaaagtgccacgttgcttccgtaggaaaagtgtggggctagtagcctgcagttgccaccacaactgcaacaggggggctctgtcaccgactctgagtctttacgccacttttttgagagcatcatatggccgggcttaggtcacatggcttatacctttgtttccagcttacagggacagggaatacctgaagatttccgctaaagcaggatgttgttttggtgagtagcctaaaatcaacaaattttaatacagcatgtttccccctgtttttaagtgaaatatagagaatttcaggaacttattcaatgtcactgaccagtcaatgacaaagccaagatatgaacacaggtccgtttggctcatagccattgcgctttgctgccgccttatgtgctgttgacctggtagaaaccatgatttggggcttggccacattgaaatttggatgaggcagagtatgaaatagcaaatctgttgggtttgtttgttgtatttaaggtcgtatgtgtcaagctggtctgattcatagaatccctactcattgaggggtagcagcagtacaaccagcagttgggggaaatgtgtttgaaatagccctgtcttctccaaattttgtggtgttctgctccatttgagaagttcatcatctccatgttttatgtagcccggccttcacatatgtcagcgtctgtttcagatttttctaaacccttcaggaatttacttgaggttgagctagtaccagtccaaactcccacctggacattctacccccggtagtgaatttctgcagccccagagcttagctttggtattaaagtttgaattttaattgttccccaactatctgtactccatcctttaatttcagagagaccttatccagtgaggagttaaaataacatctatataatataggcagtttggtttactgcccttttgaatataaaggccgaagatacatttggttacagaaaatgtgcccaaagtgacaattcttgcagctagccaaacatcagttactgggaagaaaaaaatgaataatcccctcaaaattccaatcaggttctgttactactttttaaagtccctttgatagcttttcatcatctttaaaaaagcctctcatcatccttcttaaatatatttctcagctcccgctccattatggcctgattttcttctggttgctcctgcttttaccttttacccctccgtcagagggccttggcacagactgctgttccctcttttctcctgttcattcttcagatcctgcctcattttctaaagtcctcagggaagcattcccagacttccttaaggccaggcccattccaattgctgtcagagacttccagagctgcagtaccttgtgattctcttccattgtattggcacagttactgttttacatttattttgggtattatttgattattacttattgattgattaatgtctatctcagtgtcagctcagtgggaagaggaatctctctggatttgcataatattttattcctcatgcctggcacagtgaatgagggaagttaaaatgttgaacagaatttaaacagatgttttgtcttttgcactatagagcttacagttactcttacattgtaccaaatggtcacccttttttgatgaaactaaatatggcttgacattattaaggactgatagaaattcataagtgacccagactaccaagcaaactaatcaaagaaatgaaaaatgaaatgttggtaattttagaggacttttgataaatgaaaatgagacagcaaaaagtggctccctctctgtctctgttcaaataatctttttttagaaaaaatgcacctagggtcatgtacttcgactggcattgttttttacttagagaataatttgtctttgatgtgaagcacaagggcagggatctctgatcattttattgcctcctagattcaatgattggcatgtattaggcacttggggaatatttgttgagttgacactagatgttagagataattatggacgggcttattggattagcttttgaaacagtattttctcagcactcacccttttatatacaattattggtttactcatctggatgaacagctttggaggctgtgaaatagcatttctgtatttgcattttgtgtttactttgggctagaattaagaataccttcttgtagcacagaaagaagagtttataatgcctcaggtatatagggtaagtttttctgatctccggaaggccctgtagcttcacagttttgtgtttgttttccatatgatggttggaaaggtctgagctgactgtggcattgtcagctatacagagttaagtgtgtgaacacacagaggccgtctttgttctgcattgtccgtacttctaaacagcaaatctaatgcatcactctggtctaaaacatcttacatgactggtcttgttcatgagggggaaaaaatgaggtttttttccaggttcaaaactgtttaacttatacgggtgttccccctgccttaagaatgttatttcatttgcaatgtaagaacgttctatttaaagatttttccccccatcctgttgctttgtatgtttgaggaacagatggaatcaaaagcgtgtgatgctccaggaagattgaaggctgctggagtgaggtgatgcgtcctcataggttgtacaaatcataggatttttttttttttactcctaaccgccaattcttatagtgattgttcattaaggttgatttagcttagattctagtgatgtcttatggactaaggaaatccgtagccccactgctagaaaaaactttgcagttttatgtccaattgagatgggtgaaggcaagccttattggacctttctgagaaggggcaggggaaatcaagggaaggggctctgaagctggttcagcaggctggggtcgaagggtgacggaccagacagcgaggaagaggtagcccggcactgtgggccaagtgtttattctgggagaaagggtctgagtcccgtttaggaaagcggtggtgtgtccatcaaggtggtaggttagtgacacatggcagcagggttctggtgcaggctcagatgtcaggcagtggagcctgtatcaggcctcatgtggctggaccatctaggggataagaatcctgtcctggggtgtagagtgttagaagaagctaggctgccaccatctgctggggttcaaaatagatccctagactagaaaagtattagctggaaaggcctggaagaagacaggaaaaataaagcagtacgttttgatccaatgtatctgttttcctcatgataccttgtgtgtttatgtatccttaacagtagtagctatcgttctctgcaaaattaacttgctttgtagtcatgttaccgcatggaaaggaatagcactcagagaacgaaaggttgcgtacctcactcctgccaggtcaaggacagggagctgtcacatacgtttcaggactccaagaccagttcctacgctattggtacagttgattttgtcctttcatgtctccttttcgtagttcttatgagtagctggcctctatttcacttctagagtcagtctcccagccttgaactttccatttcaagataacctttcaggccttaatgtagtctgaagagatatgtgttcgtggaatatttagctttcaagaaacaaatagcataggaggaaaaaaagaaacctcaatattggtaattaagaaacctgggcccaagtctcagtttggtcacttcatagttatgagctcctggacaagtcactttgtttctgtgtctcaggagtcatctatagaatgaagagattgaagatgattcttgctgaggcctctcccagctctaataataagtccaaatgaatagtctaggaaacaattaatcattagcatctttataacagcagcactagcctcttgaatatgttgggctacgtgacaaacatggacagaaaatcttggcaagcccctgccctgtcactcccaaatcagcctctgtcactttactctgtttcagtacaagcaaatgtaatgtgaggaacctagggaaagtcatgagagccttttgaattaactgagtgttacaaccgccattctgttctgaaaataggctgaggctgagttcctcttgacacctcatgcctctcttccctccccagtccttcttggtatcctgctaattgtacctctagacaattggtatttataattcatttccactttagcttttctccagagttcatacctcagtcttcacctccttctactaatggttctgtgagattttcttagcaaagagggaagtgtctgcctgggtgccgtttgatactctcctgttgatttcacttgggatctgaaagcctttcagttcattgatactctgaagatattcatcattataattatggcaacagaatttcttgttctctctacctcctacccccgactgaatgtgagctgctcaaagttaggggcctgatggtatcagcgttgtgtgtccccagcatctggtacctagtagacacagcaaagaagtgtattgagttcatttctctggtactcttttgagaggttgagtttttctgatgaccattaactaggtcccttgttagaagccttttagggtttatctaccaaacggtgtccttagagaaagcatcagaaggtgaagcaccagtttccagccttccgcttaattagtttgcttcattaaatgtctcctgctattttgatttgttatggaagtcaccttcactttctgctaaagcttttgtggaaagttattttgtacctttaaacagctgcttctctccaggaagcctgcttttattttatagcaagccggctcggctgtctctgtacaggctggctcatgtctataaatggtcaaggcctcagagccagatggggcaggacagggtcatccaacacgtctttgaagtgattatttcatattgaatctagttgtgaaccccatatgtacctaacaccatgattgtgggtgataagaaataatgtaggatgaagaaaataagacttgttcagaaaacaattggaaaactatgttgtttcaatgttaggatgtgatacattgcaggggtattattcactgcatcattattgtagcaaaagattgcagactaaatgttcaataataagaccctgttacaatatgatacattcacatgctcgaatactatgctgctattaacaagagtaaggcggctttgtatgtgataatgtaacaggattttgataagggttaaaagagcaagaaatattaagaaggccaggcacagtggctcacgcccataatcccagcactttgagaggccgaggcaggagtatcgcttgagaccaggagtttgagactagcctggacagcatagcaagaccctatttctaccaaaacaaacaaacaaacaaacagcctgacgtgatcgtgccaggtgcatgcctgtagtcctagctactcaggaggctcaggcatgaggatcacttgagtccaggatctttgctcatagctgcagtgagctattatggcatcactgcactccagcctgagcgacagaacaggaccctatctctaaaatataaataaaaatagcaaaaatagaccaagcgtagtggctcacatctgtaatcccagcactttgggaggcagaggagggtggattacctgaggttaggagttcaagaccagcctggccaacatggcgaaaccccatctttactaaaaaatacaaaaattacccaggcatggtggcaggtgcctgtaatcccagctactccagaggctgacgcagggagaattacttgaacccgggaggcggaggttacagtcagccaagatcatgccactgtactccagcctgggcgatggagcaagactccatcttaaaaaaaaatagcaaaaatatatatcatgcttccatttatagtccatgagaagaaaagggatgggcaagcgcacacacacaaacccaaacacacacacgcacgtggacacacacacgtggatggcttattatctctggaaggatgcataggaaactgggaacagttcttgtttcgggcagagggactgaacaggaaaatggtacgggaaggaaacaaatttcacttcatacttttttgtatagttaggggggaaatcatttcgtatttattgtattcattttttcagaaaaaaaaaaaactgctaaattttctttttttgagacaggatctcactgtgtctcccaagctggagtgcagttgtatgatcacagctcactgcaacctcaacctcctgggctcaggtgatcctcccaccccagcctctcaagtagtcaggaccacaggtgctcatcatcatgcccggctaattttttgtattatttgtagagatgggtttttcactgttttgcccaggttggtcttgaactcttggactcatgtgatccgcccgccttggcctcccaaagtgctgggattacaggagtgagccactgcacccatcctgaattttctttaaaagaaagttgaatgacgtgagagccgatagagaagggaaacttgtatatttaaagtagttcctttatttgacagctggtcattgagctccggctcttcaccaggttctgttttggcctctgagatgcaggtaatttcaaacagctatgagtgccctgaagtcacagaagtaggggttttggtggcaaatgaatgactagggtggagctgggctgctgtttaaggaaggatggtcacagaaggtccttttggaaaaagatactgagctgactgctgaatgaggagaagccagcttagtagtgaatcaggatggggcaacagagttccagacaggatgacagcagatggagggtcattcgggaaagcttcagaaaggaggcaagcttgccttccatgcatgggctgagtggaagctaaagtgccacgcactcacctggaatgaagagtcaggcctgactgacaaagataagaagagtgagaagcggttgggattaagtttaggtcagtaggatgaggcctgagcatcaagggcccctggatgctgaggtctgtacagctttttcaggtacctcttgagacatactcagatatgtcgcagggatcatctgctgtgagactgctagcagcattgtaggagttctcttcactctgtccacgtagaaatacgtgttctgcaacagagagtaaaaggcaggagcagaagaaaactttctctccctgacttgcagaaaagctcatggcaggtttaaaaaggacagggcaatgcagacagctatagtgtgagggacacagcgtggttcctggtatacttcatgcgagaatctgcatgctggctctgtgatagcgtcctcatcaggaaagtggggattgcaatattacctcaacccacttcgcagaattgtcatgttgagagtgaaaacaagagaacaagtggcttctgtaaggtattaggtgttaaacagatcgatgaaagtggttattagtggagacagtacaggagtaacgtcaattgggcagtctttgggtaaagatggcgtccttctgctaaacctcccagaaatgacatgtatcagattccatttctgtacatcctaccatatggttttagtttttgttgttgttgttgttgtttgtttgtttgttttttaatctaaccattttggtggagaaaagaaagttcatcaggagatagtttataactcctcattatgatgactgacaaatatccaaagggcatgtttcttttaagcccgtgcactgtctttatccccacacagaggcaggcgctcatgtcttttacacgggacattttgaatttttatctttattatggtattagtttcttactgggttccacctcaagcttacttttgttaactggagatctttacctgtagactcgtcgtctgcttaagttagaactaagtctattccaaatgatcgattttattttactgctatagtacaccactttttatgtctttggaatatgctttgtaaaatagtaactttacagaatttttcttaattctgagaaacagttatttggtagcttcagtttcctaagaagagaggaaaatgtacctcaaaggacaggagagtccccaagatcttccaaaacctattccaaaaataatctattattattttagatggtaacattttaccaatattaatgtcttcgtcttctttatagcacaatagaagcactaagtgctttaaaaataggagatgaaaagttaaaaaaaaaaaatgtaaaggatataggaagaaagcccctgtcatgaggatgcaacaaaacccaagggtcaaacatcaccctctgctgggcctgttgacagtagagggaaacagttacctgacattaaaacataactttagtaattaaagtttaagaattactttaaaccattttttaaaaaattaattatctcaaataatgctcaagaacaccagtgcgttgcaaaatttgaacattggtacattgtaaaaaaaagtgtatacattcttgagttgtaaaggaaaagtttaaatctgaggggtgggatggattgaggctgacgtttttcccagagtggtctttgtaaacaatgtttaagttttgttatttatattaacacgaaagcctcctttatctggagaacacgcttatgtggctgagcctctgtccctgggatgccagatagtgagacatcgcaatcctgagtagtatgctcaaaactcacttcatatgttaggagctaaaatggtcttgttttctagtaatctccagtttgtgattcgtactcagaggcttgcacattgctgtgtacactgacagaacattgatggcttttggaaaagctgcttgctgcttgttgcccggagttagctttattgctctcactctgtgccatattgaaagttaacctgtgctaaccccccagtcattttctcagtctcctagagaggtaacagaacatctttattctggatttgccgtacacactgacataattcctcttgaaatatctggctgtcgtagtctaaggtcataagaaacatttaattcttcagaatggcaacataatttgaattgctgtcaaacagtgtgtggcctgaaacgggaaagaaaggaaaattattgatcattgagatgcctttgtgtctcgcatcgtttcactagcctgtaattaattgagccttttgacgtccatccatattttttttcttccttgtggaaattcagctacgttcccaccccacatggtgccttggagattacttgagacttttatttgtggtatctctatttggttgttgacattaatgagcttacttcacaaatatcacaagagaaatagtgttgctttttggaatgttaatgaattgcttgcctggccaattgccattcgttccagtgtgtgaatatgatggggtgtgtgtgtgtgtgtgtgtgtgtgtgtgtgtgtgtgtgtgtgtgtggaaaagagagacgagtagcaggggtggattgcatttttttcctctttgcagccagtgacgtgagctgtgcctggaacaatcagactcgctgcaaacagggtagttgaagatgctgggggaggcagcctggtgcttcttaagctaacgcggatcacggcgctcaggagctgctcaggcacaaccccgcagagttcctccagcgtgagagccttggaacggttggaaagtgcctttttatttctctaaaccccttccttagttgaccttcgaaaatgattggcgtgaatagtgtccagagtgccagcaaggtacgggtgaggacctcaggttccgtgaaatactcccgggaggattctatccggcggcagtctcacaggtcaaagtccatgaaaatttccaactcctcagagttttctgctaaggagaacaaggtaaagaaataccacattgaaccttattgacagctgtgtggcagggcaacagaattggatagtctttggcagtgtctaatgtgcagtgatagactgagaaagtaacgaggagtataaaatggttctaagagaatcaggtgcgatcaggtgaaacggatgggacctgaactccagatacaaagatgctgtggcatgggtcagttttgtaaagagccagtttgtggaagagatgggcgaaagccgtgctcaaaatgagatgactgtgggaaactgttgtttggcacatcgatcttgtttttggtctcagaaaggttgccttgacaaatgatttttcagtgcggagtatttttagaacatcaggaatacagagatattgtgtatgattttatctttcagttagttcctttttcctttcctcccctggtcttcccccagcccccagtctgtggagctgatgtacaagtatgacctggtcctattatactacattcatgtcaggtttagagtggttagccccaggcatatgtaatgaagagaaatttcttctttcatgttccttacacatatatgtgctgatgctatgctgccatgaaaccactcgtgtttttgcagctgtcttgaagataatataatctttgttcgtgtgaaatgtgaagggagtgattacgtagtgaagtgggcatttactacatgcaacatattcttgagattcttcccaccaccatctgtgtgagcagggtactcagaaacactcccactccacaggtttaaaaatggaataatagaatcataggatcacagaactccaggtctggagatggagatgattataacggagattcatgggcttgataatgtgcagagagagcgtcaggaggtggatctcagtgtcatttcagccttctcggggttatatccagacccactgagagtgacatcaggctttcttcaccctcccaccactccccactgccctcctcctctgctacctccccatccctgtgtgacataacattattgaaagactttggcattaacaggttcccctcaaaatatggcaggggacaggtggcaaaataccttagtgtgactttaagaaatatgttggcttcctattcacccccttacattatgacatagtggagtctgaccccctccgtcattagcaaattgcctggctccagtaagtcttcaaatctggctttttactcctcactgtttttttaaaaagctttatctttagagagaaacgtgtcttcaaagtcctttaatgtgacctgtatagggatgtgttggcttctactgaaagtgttatgagaccacctgtggtgtcaggactgcggtctcctgctgaaatagaccagaatggtttatcatattcttaaataaatgtatgtgagcatgtatgtaattctcaacatggctataaaattggcttctataagagcactaagagacgtctctggattttgttttggatgttttaatgtggagtatacccatggtatgcagtcagaggctatgggaaattaagagctcatcatccttaactctgttgtagtcctactacctatcctcatgataatttaggcattgtaatattagtgggttcacccagaattatggttgtgtagtgtaatgttggaatccagcatagataccacatgaaaagattctctactgtcctctgtgtttgtcacacagtacaggtacttttacttgatatgtatctgtggaagagaaggccaagcactttttttttttttttttgaatattgcaaacgccgcaggagttaacagtataaaaggccactggtagaactgtagtcagtaggccatcacatgataccttaaagattatagtcggtttttaagagatgattagtatttttttgaggcatatgtggtccctaagttacagaatatgtgttcaaggatatagccaagctcccaatatctcacaagagatatttttaggattatctagtggcttaaaattgaacaccagagctaagagaaaatcagtagaatagaatattctatcagagtgaccctaatcattgactagccatttatattccctaaatgaaataaactgaataatatgacaggcttgtaccctaaattactgaacttaattatactataatagacatgtgtaaaatgttgatttaagcatcacttctcccatttttatccacagttacacgttttcctccaattttaatcagaattttcattgatcttacttgtatctagtagtattttttagcccttaaatcagtgtttcttcttcctcctcttcttttttttttttttttttttttgaaacagaaacaatgtctcagtatgttgcccaggttggtctccaactcctgggctcaagcagtccttccacctctgcctcccaaagtattgggatgataggcacgagctactgcacccagctggtatttcttcttgctaatcatgtaaacagcatttttgattatctgactctttcatccaaaatgcaggatgtctaatttgatgattagaagatccccattgccacctctctccaccctctcatgtcatcttcccaacctgtaaaaaataagataccattaactcgtggttcgctcctgggatttaatgttatctttctagaactctggctctttctagaataggtgtaataattgcttctccttgtcagagttggaattacatgttttgtattctttgaaactttcatctttgatgtttccagcttgttttcttggccattaaaacataatggtttattcaaatattaattatctgtagtcctcacttgttctctgatttattcatattcatttgaaaaaaagtgttaaaggactgtggaaaggattagaagttttgcttttaattttagtgagatatcttaaatgcttttcttggtctaaatattttaaattaagaaaattgaattttccagtactttatggttcatattgacctcgtctgaagaatattatttaacctactaaaattcagcttatagatgttattttctttaaaacccccttctccgtgttgactttttttctttattctgtgtttaaatcttaccatttcctctagagagagtgtggctttgtctttttctcgataataatgtttgtatcaacctctgaagcacataatatgggcaggatgcaaatctgaatatgttttggaagaacatgtgtttcgtggagaccggcattcattattaaaattaatgaagtctgactgagctcagctcttcattgggtgtctgttattggaagagttactagcaaggcttctggccatgagggggcagtgcagaccttcctgctgtcagatccagctggttgctctgcctttgacagaagtaacattttagaatcaattagattctaattgatttctaatttagaaacaatttcctaaaagtagaatacaatcagccccgggtattcgggtacccttggggtttcaaaacccatggatatggagggccaactgtactccagaatttggaatgtgcagtattagaaaatgttgatttaagcctcagttctcccagacatttccacagtcctcctctgagtctaaatatttgtcaaatataaattattctagtactaatttttaacttatggtttaaaacataaatctgtaaaagttcatgttgataaacactcttttcttccccatctcttgccaaactacgtgataccgtttaaatgaggcggaatctcaaactgttgtttctttatgttgttgtaggtgaatgtcacatgagtggattaatataacatgcgtggctgaatccttgaggccttttttgaggaataagcatgatgctagagattagatcaagaattctctagttaataatgttgattcaagtgaaccgtttaaagcttttattcagtgatatagcaaagaaatcaatttctgtgacaccgaaatttcaagaacttccagtaaagtactggtactttggttggtgcatagtgaaacattggcctgttggtttctcagtcaggatgccgcatcctggcgggctaccctggttttgctttctaagtagcaatgttcacctagacaagttacttcacctccccaagactcatccctaaaatgcagggttttgacaaaatgatatctttgttctgaacactgttaattttagaaatcttgccgaggttggtggggttatttcctctgtggaaggaaccttaaagactgagctagatttaacaaaggtagttttatatgtattctgaataaacctcttcctgtactaggagatgttaaccataaacgtgttaaaggaaaatggaagtcctttgctccaaacctctgctctgctaagtgcctaatccattgctttttaaaaacgtgttgcaataatgttgaaaggcaccatcacctctattctccccattctgcttaggcttcacttgctgtttcctttgcattgttagataactgctaatcattgcttcctctgtgagttaaagctatacacaaagaaacctgaagaaatcattacaatggccctttgcgacctgaagttttggtggcaggcttgcagattgttgtcatttcttcctagaccacttttgctctttagactaaggctagagcctgggaaggagattctggtcaaacaggacattgatatctgcctattttaaaatggagaaaattcttagtcataatatgaaaattttcttgcaaatgtctttacatatttttgttattcctaagttgaaggagtacatttttaacctcataaattcatcctttagctgaatagactttattaaaagaaaaacttaagcatatatacattttcaagagtttgaacattcagggatgcataaattagggttgtaccaaaccacaaggggctggcactctgatgagaggtgcaagaaggaaaacttttttttttttttgagacggagttttgcttttgttgcccaggctggagtgcaatggcacaatctcggctcaccgcaacctctgcctcccagattcgagcgattcccctgcctcggcctcccaagttagctgggattacaggcatgcgccaccacgtccggctaattttgtatttttaatagtgacggagtttctccatgtttgtcgggctggtcttgaactcccaacctcaggcgatccgcccacttaggcctcccaaagcgttgggattataggcgtgagccaccacgcccagctgggaaaactcttatgtagtatttgcagaagcaaggcgaagagaacagttttgattggctggaagttagttggtggaaagaatgataggcagagagaaagaaaaataaattttttaaaagaagttgatggtttctgattggtatattttctagtttccatttactgtttacattggcctttggtttgttcatgtaaaaatttaaaatgccagaggtacctcagtctaatgagctcccaaggagaattttttttaaacaacttaaactattaggtcaaaatatcaacatcctcctgcactagttctaatcctggcatttgaaggaattagggaggtggtgtgttgaacaaagtaaatctggtagtgcaaagataaaaacaattttatcttcagaagcctatttttcttttcttggctctcctatgttaagttatactttttcaccaggtattaattattctgccagattaacatgttctaatgttttgtgggtttttttgtttactttgtttttttttttttgagacagagtctcgctctgctgcccaggctggagtgcagtggcctgatctcggctcactgcaagctctgcctcccaggttcacaccactctcctgcttcagcctcccgagtagctgggactacaggcacccgccaccacgcctggctaattttttgtatttttagtagagatggggtttcaccgtgttagccaggatggttttgatctcctgacctcgtgatctggccgcctcgcctcccacagtgctgagattacaggcgtaagccaccgtgcccagtcaacatgttctaatgttttactgtgatccttagccaaaggagatcttaaaaagagacctgacttcttcagggacgtagttctacagattatcattatctgtatcattttcatattatcgataactgtttattccccttaagttgatgacttgagtcagacttgccccaaaataaaaactttcactccttacacaatattgctctgtcttctaggccagagtgcaatggcctgacctgggctcactgtaacctctgcctcctgggttcaggcaattctcatgcaccaccacacccagctattttttttttatttttaatagagatgggtttttgccatgttggccaggctggtctttaattcctggcctcgtgtgatctgaactccttggcctccaaaagtgctggcattcaaggcatgagccactgcgctgacctggttttatttttgttaggaaacctagcaaagtgacaatggtttttgttactgggttggtttgttagagctaccccctgctgcccacctcttaatttccctccttcctctagttcctctgtatctgtgaatttctcaaatcctgctggtactttcatataaataaatgtcttttttaagattgctcaaatgattacttaggagtaaatgttgagcacactatgctcctgatagagtgatatttcttgacccttgaatttaattaatagcagatctttacgatcactgtttacccattttcacttgagtaaagtgtaggtgatgtgtttggtttggatgtctctgttacagaccgcaggctctttggcttcccatgtaatggaaattaacatggagccgagcagatttcccagatgaggctttcaaatcagggcttgtgctcaagcacaagggagacagtggaggtgaggcacagggtcctctgactggctctgcaggaagcagcagggggaagctggtaggtgtttttttattaggcaaagcacagatattgttatcaaggctaaagtatacaggcttggctgggcaaagcacaaaagaggggtagggtatgcgggtcagcatatctggttgtaatagttatctcgagtgatgggctcctcgctggtctggccagcagcaacaaggctgtaaatcaattgttcggcatttcctactcaggataggacactccacaatcttggtttcctgttaaatctcctaaggccagtttctggactaagtgaaacatatttaaacattatgagagcagagagaatggctcttttctttgtgtgactaagtcctcagggttagcgggtatggcatcagtgaggtggtagaggtgtgggttttgtgaagagaagaagaaagaaatacatgaaggagaagccgcgtcccactcctgttgtgtcatctctaactcccaaggtcgtactgcattcttgctcccctccatttatgagtagactgtatttgaacacattcttttggggaaggtgtactgaagcaggtgtttgagaacttccatgcagtatttgaacattgtagagaaaatgctggtccatgctgtcattcctggcaagcttagtgtaatatccttttcagaatccagggaaaggaaaaagaaaactctatgcaataatgataggagtcgaaagagaaaaaaatatatatatatttgcattttaaagatagtcactgccgaagatcagggagtttcgtagcatcatgataacctgaagttgaccataaggagcttctgtgtgggaatatgtatggtgacaagctattctgcaacctgttgttagatcatgcctggcttagagcttagggattgcgtccagcttagagtctaataggagatttttggaaaatattttttatttactcatccatagtgaagcagagaccaagagtagctgtgcaagatggcttcctgcttgttaatttatgatattaatttatgatggaagttgctcttctaacattaattttaattaagatttttaagctttgccttaactatcattcaagcagattttatttctttttttaaaatccactgtaccatgttccgatggtacatttagtgtacctgtttggacacgtagatcacctgatatcggtggaatttgtttttctaggtagattctttgaaatgcttaatatcaaaatttttctgaacgggctggctgaggctctagtcctagcctgactccccttatgacatgccattgtttgtagcctgcagttaagttttacaacatgaaatgccccccaaggcactggaaacactagtgtactcgttactgccacattcaaatctggtgagccaagtgtgtgtttgattccagtaaataaataagattacgaagctatctcaaacagtctaatctccttcttgcactcagctgcagtttagtggtgtcagcgtcagctctactactcagaaatccactggggcaggccaaggtgtttacaggaagcagtaagaccttctctagatcctggtgccccagtggctcatgacaagggaacgaatccttattgagctttttcattacagttttcttctaaggtctcccagcataagtaaatctaaagggttgaggtcctacctaactagacgtacagatacaagaaagtactttgagagaagcagctcttgactgtcactccgagggacagataaaggtccagcagatttatatagattgatgacacttttctttattgttgcttttttttttaaattggagacagggtctcactttgtcacccaagctggagtgcagtagtaagaacatacctcactgtagccctgaaatcctggcctcatataatcctcatgcctccacttcctgagtaactaggcacatgtcaccactccaggctaatattttaacttttttgtagagacagaggacttacaatgttgcccagtctggtcttgaacaccccacctcagatgcttctcccacctcagcctcccaaagtgctgggatcacagacatgagacaccacatctggccacacttctttcttaatacatcttcttaaaaacaggtaaaataaaaaggccatttggaatactcttactatggttggacagtgttttgaggagattttctgtgccccatccaccccctgctgtgatctcttagactgtgattaagtggtatttacatatagcaaaaaaacttaactcttaaattagaatttaaggtaacagtgtgcttttatctttacacccacctaaactccactaaaatgacagtaggattcgtagaccttcaaggacccaaagaatgagagaggatttttcaaaacatcagcaaactttgaaacatggaaaccagatagacgtgttcactatttaagttccacagaaaaaaactggatgccaaatactaaagaaagaaatagatcaatctgtccccacagaacgcagggaaggcccaggaactgggggccactggctacctctgagggcagtgagtcgaacgaggacagccctttaaagcctctaaaattagtaagtcgaccttctgaatgccctcccctgctttgatagccgcatacccttcctcccaccattttctttttttttttaagacaagtttcactctttcatccagtctggactgcagtggcacgatcactgctcactgcaccctccacttcctgggctcaaggaatcctcccaagtcctcagcttccagagtagcaggagccacaggcacacaccaccatgcgcagctcattttttaatttttttgtagagatagggtcttgttttgtttcccaggttggtctttaactgctgggctcaagcaatcctcctgccttggcctcccaaatcgttgggattacaggtatgagccagcatgcccccctgcccgccctacaattttctgttctttctctctgataagtttaatccagaggttttggacttaggaaattaggctcagtcgaggcccacggggagatccccacgttgaaaatagcaggattcagtgaaaggtataaacgtttcacagcagggcgtctcttccctctctactttctcatgtactttttctcagttgcttgaagaagtgaaagagaagacatggtgtccagtagagcagagggggagagggaatccccaggacaatggcaaagggaaaccctgggacaacagctgtgccggagatagaaaccagccagattagaggagtgggggcagagacgatgccaagagacatgcttccaaccatggcaccgaaggaatgcctgctggagggtgtgaagttgacatagagatagattcgtagaaaactgagtaaacaacaacaaaataagatgatgattaactccagggaaatcaaaaatcttacaaaaaatggaaacgtagcctagtgttctgccccatgaataatgtctatatagtcacaataatatgaggactgaaaattcatgaaactgcaaattgtgactgtggtatgattttaatatgggagtggaaagaaagagacgggcagggtgtgtgtgggtgtgtgtgtgtgtgtggatgggtgtgtgtgttaagagaaccaaataaatgttcactttccagagttctgcagttgaaagtcaatagatcatattgaaaatagaaaaaccaaaaagagattgaaagaggtgacttttgagcagcaagaatcagaggtgaagttaaaagattatttgtattacataccttttagtaatttttgattatataaatgatatacatatattgccttgagaaattttttttaatgaatcagaaggaatgtagacagcatatataggtacatacgagactggaataatttccagggactagaatggcttttgtttatcttaattaactttgggtttaacaaatgccaggtaatggagactactttttaagaaaagcaaaaggtttcatctcttccaagactttatactctagcagttatcagactagaccatgttctgctgctagttgctgtcacagttttagtctatagcaaaatatcagtgaaaggctggtcctttcttgagaaacagttgtctcttctgagattgtccatgcaacttatttttatgcaacaataccgataatagttggtgctttgtttctttaaaaaatttattttctcatttagctaaacgaaaaactggcaattctatttagctccctaaaatttcttttgcaaattttcctgtttatgaaatttgaagcctgctatccactgggtgagattatttaatttgtttgtattgatcgttttgaataaaacctatttccatttggtttgtcttcattgctttgtctaatgcatggaaatgacagggaacaaatgccaggcctggcattctctctaaatgtcaaagtcccccagggattgttttttttacaggccatttatttaaaaggattgtgcttgttacccagcaagtttttttttttaataaactgtgcacgttaacttcatcatgtccatagttattaaatataattgaccgtttttcttgggtacttaaaaaatattgcatatatttacaaggtcactttaaatttatgttttcctatgttctcaaattgcattttttattatggtacatgcttgctactttccaacacttaaggcttaccaacaagatggacattaacaaatttcatcaagtacattccagaatctttattgaaaatactggttatggttatgtttttcactgatatggtttagctgtctaaactagacaagtttttgataaattgataaattacagtttcagaggatcagggtataaaagttaaaaacaaaatcaggcccggcgcagtggctcacgcctgtaattccagcactttgggaggccaaggcgggcggataacaaggtcaggagatcgagaccattctggctaacacggtgaaaccccatctctactaaaaatacaaaaaattagccggacgtcatggcgggcacctatagtcccagctattcgggaggctgaggcaggagaatggcgtgaacccaggaggcggagcttgcagtgagcggagatcgcgcactgccctccagcctgggcgacaaagcgagactccatctcaaaaaaaaaaacaaaaaacaaaaaaacaaaatcaggagatgactgtgaacacaatggcttctggaatcatggtgcttccaaagaagaatagttaaatctgctgtggaataccttggaagttaacctttaattcattgtataagaaagaaagtgattcactcagatcataactacattacctcttggaaagagagttgtggctggcatagggttgccagatttcacaaataaaaatacagaacacccaggtaaattttaattttagacaatttttagtgtgtctcatgtaaaattggagggcatgcttatgctagaaatgttattatttatctgaagttcaaatttaagtgagcatcttgcatttgatctggtaactttcaacctacaccaagcaacaatctgcctaacctccagctcctagatcggcgaagtggagtcatcctacttacttcctaggacgtagaagcaggtgtgaatctaggtctgcagctttctagtttattgttcttttttcctgcctttgctgcctcccatcataattgtgttatacagcatcgtcctcactgaagcccttgccttctcagcaaatgaaaccctcgctgtggttaagacaacttacgaagcattatagagactaaagggagatggaagacttgatctcatctgcaaggagcataaaatctaatgtcatctctatttttcatcgaagaagcaaagtgtacactgtgtggtcaacattcaaattgtccagaagattatacattgaaaatccccccaccctgctccccgagttgctgtgtccggagtcagtcattgtcggtggggttgtgtgtatcccctcagaaatgttctattcgtgcccagatactcgcacacatttttcccccacaaaatggaaacataccgtaacaatgttttgcaccttacttctttcctttatctcttaatgtatttacctccttcttagcttaaatgactttaaatatcataatgatacatttctggtgctactgttgaaactgttcgttgtacccagttttttatttgtgcttgaggtatgtgaaaatggtccacctttctcatataatttagaaaaacagcctgatccgtccctaatccgccactgcctgccttcatcccagtcaacttacctcacctctcacccagattccacctgcctcgctgctgtttccctttttctcttataatcctttctccacacagaagcggagccaccctttaaaaacatgaattacagcaggtcaccctcccgcttaaaatcctctagtggtcacccggccagcacagaataaacctctaacttttctggtttaaaagcccttcgggacctgctcacaccacagctgggcccatttgctccagccgcaccagccccgctgggtttctcagacccacccggttcagtggtgcccaggagctgcttacctcgctccccacacctgtgcgtggctgctcccggtcactcacgtcttacgtttccttgcccagaggccttctctgaccatccaggctacggctactctttccagtgaccttatttgaatcaccttataataattatctggtagcctaccagaaagtgacagaattatcgtcatctgttatttttcttatttattacctgcttccaccccactcaaatctaagttctgtgtctgttgttcaccactggattcacgatgcctaaataaataactgttcaactgaatatatgaatgaataaatgaatggttttaagggatttatttttactattataagtgttacaaacatgaattagtcttctagttgttataaaatactttactgtattaatacttataccatatgctataccattacgggattcgccccttatctgcagtttcaggtagttactcatggtttcacttaactgccatcaaacatcgtccaaaaacattaaaaggaaaattttagagacaaacatttcataagttttaaatctcatgccatccggcgtagtgcgatgcaatctcactgtcgtgtgccatcccatgtggacgcgaatccttcctttgtccagtgcctccccactgtggatgctccctgccctcagtcacttactagctaagttggttatcaaattggctgtcacagcatcacagttcttgccttcaagtcacccttattttacttaataatagctgcaaagtgcaagagtagtgaagctggcatatgttatcattgttctattttattattagttattgttaatttctttctgtccctaatttacaaattcaaccttataagcatgtaagtctaggaaaaaaacatacaatatatagggtttggtcccattcgtggtttcatgttccactgggagccttggaacatattcccccaaggatcgggagactactgtatcagaaaaagtacattctaattagtgtctagtagttacaaaaaacaatttcccttcatatatcagcatgtgttataatcaaatatttgttgtggtcattgtacaatagactaatacaatgaggatgcattaagcaaggtacgctatgtagggagatggagtagacaagttataaatagtcagtgatgtgttaaaggagaatttgaactataaaccatcaattcatgtgcactgtgatcataagttttcttagccgtgaacttaggatgatggatatctttccctgtgaaaacattattttttaaataaactaataagaaggcctaagctgatataacaaaaggaaaagctaagaaatgtaatactgtggatagcattgtttacttttaactttattaactctgatttctaggcaagacatttatcagagttgcaaaatttattactgattatctatatttaaaataatatgtacacaggtgtgtatgtgaacaatacacataatactgactttaaagtatgtatatatgtacacaggtgtgtatgtgaacagtacacataataatatacttacatggtgacaatattgtgttgtgattagggcagttaaaagcagagactatggcttaggaaagacctgtctgagatacccagctctgctgtatgaccttggcagcctacttaaccttcataggcatcagctgtggcatttctagagtgggaataatactacctctctcatatatggctgctgtgagagttcagtgagatcaagtgaaagtcaggctcttagcagtatcacatagtggggcctcattgatagttattatcagaggaagatcagttatttgaaatggctagaacatcatcgcagcgtcagaaataccaggcgaaacatgaaatattcagaagtttgtctataaatcaaaaattggaaattttgccgtgtttgttcagtgattcttactgtttcctccttacaatttctaatcacagtgagaggtgacagcgtgctggcagtcctggcagcccttgctcactctccgcaacccctcggcctctctgcccactctggccgcgcttgaggaacccttcagcctgccgctgcactgtgggagcccgtttctgggctgaccgaggccggagccggctccctcagcttgctgggaggtgtgcagggagaggcctgggcgggaacccgggttgcgcgcggagcttgcgggccagcgcgatttcttggtgggtgtggcttccgcgggccccacacttggagcggccggccggtgccgctggcctcgggcagtgaggggcttagtaactgggccagcagctgtggagggtgcaccgggtcccccagcagtgccggcctgccggcgctacactcagattctccccaggcctcagctgcctccctgcggggcagggctcggaggctctgcagcccgccatgcctgagcctcccccaccccgccatgggctccttgccccgcctgagcctccctgacgagtaccgccccctgctccgcagcgcctggtcccatcagctgcctaagggctgaggagtgcaggcacacggcgggactggcgggcagctctgcctgccgcctggttcaggatccactgggtgaagccagctgggctcctaaatctatttggggacttgaagaatctttatgtctaggtaagggattgtaaacacgccaatcagcaccctgtgtctacctcagggtttgtggaggcaccagtgggcactctgtatctagctaatctggtggggacttggagaatcttcatgtctagctaagggcttgggaatacaccaatcggcactctgtatctagctcaaggtttgtaaatgcaccaatcagcactttgtgtctagctcagggtttgtaaatacaccaatcagcactctgtatctagctaatctagtgggtaggtggagaagttttgtgtctagctcagggattgtaaatgcaccagtcagcaccttgtcaaaatggaccaatcagttctctgtaaaacagagtaatcggctctctgtaaaatggaccaatcagcaggatgtgggtggggccagataagagaataaaagcaggctgcctgagccaccagtggcaactcgctggggtccccttccacactgcctttatgagctgtaacactcaacacaaaggtctgcagcttcactcctgaagccagcgagaccacgaacccacaagaaggaaaaaactcccaacacatccagcaagaccatgaacccaccgggaggaatgaacaaactgcggacacgtctcctttaagaactgtaacactgaccgcgagggaagtcagtgagaccaagaacccaccaattctggacacaatagcattccaatctgtttcaaaattggtgtcctctttgatagtggatgtgcttgtctcacccacagtagtttacattgctctctctgttgacatacttgaacatttgccagccttgaataatgtgtgcttccagctacttccccccaccccccaaaaaaaagcaatagtgaagctacattcccacttggttgaaatcaggctacagctgagtgctagcttaccttgtacatggagctttctccaaacccccggagtctctccctggccttcctgacttatctgttacgagatatttgagttgtaactcttagtttgttttttgatgatgaaccagcatttggacttaatgttctaatcagttcattagatgtttacagttgtaactaggggaaaaattctttaaacaggcagaccttggagatactacaggttcagttctagaccacagcaataaaacaaataccgcgataaagcaagccacaggaattttttggtgtccgtatgcatttagaagttatgtttacacagctgggtgaggtggctcacgcctttaatcacagaactttgggatgccaaagcgggcggatcacctgaggtcaggagttcaagaccagcctggccaacatggcgaaaccctgtctctactaaaaatacaaaaataaacaggacacagtggcgtgcccctataattccagctactcaggaggctaaggcaagagaaccacttgaacccaggaggcagaagttgcagtaagtggagatcgtgccacactgcagtccagcctgggtgacacacaagactgtctcaaaaaaaaaggtatgtttacactatactgtagtttattatgtgtgtcattggagccttcagcaagttgtcatcgttttgcttatggagggtctcaccttgatgttgatggctgctgactaatcagggtggtggctgctgaaggttgatatgactgtggcaatttctgaaaaggcagtaattaagcttgctgcatcattagttttgtttgtttgttttttaagactgggtctcgctgtctcacccaggctgaagtgcagtggcacgatcacagctcactgcagccttgatctcccaggctcaaacagtcttctcacctcagcctctcaaatagctgagaccattggcatgcacgccacccacacccagctgtagactctttcatgaaagatttctgtgtagcatttgatgctgtttgttagcattttacccacagtagaacttcattcagaaatgcagtcattcccctcaaaccctgctactgctttatgaactatgtttatttcatattctaaatccttttttgtcattttaacagtgttcatagcatcttcaccgggggtagtttccatctcaggaaactactttctttgctcatccatacaaatcctcatctgttcatgttttaccatgagattgcagcaatgcagtcatatctttaggctccacgtctaattctagctgtgttactgtttccaccacatctgcagtgacttcctctgctgaagtctcaaaccccccaaagtcattccatgagggttggaatcaacttcttccaaactcctgttgatgttgatattttgacctcccatgaatcacagatgttcttgaagacatccaaaatggtgaatcctttctagaaggttttcagtttactttgcccatatccatcagaggaatcgctatctatggcagttacagccttgtgaaatgtatttaaataataagacttggcagtagaaatcacttcttgatccatggtctacggaatggatgttgtgttagcaggcatgaaaacaacagtcatctccttgtacatctccatcagagttcttgggtgacgaggtgctctgttaatgaccagtaacattttgaaaggaatccttttttctgagcaataggtctcgacaatggactaaaaatatttagcaaaccatcctgtcaacagatatgctgccatcctggctttgttgttacacttaaagagcaaaggcagagtaagggcctcaggattttcagaatgatacttgagcattggcttcagcttaaggtcaccagcttcattgccccattgcccctaagaagagagtcagcctgacttttgaagctttgaagccaggcattgacttctccctagctatcaaagtcctagatggcattatcttccaataaaaggctgttttgtatatactgaaaatctgttgtttagtatagccaccttcatcagtgatcttagctggatcttctggataacttgctgcagcttctccatcaccggttgcagctttaccttggacttttatattacagggtctgcttctttccttaaacctcacgaaccgacatctgttaccttcaaacttttcttctgcagctttctcacttgtctcagcttttgcagggtggaagacagttaggtccttgctctgaattaggctttggccttaagggaatgttgtggctagtttgatcttctatccagaccatttaaactttctccatatcagcaataaagctgtttcactctcttatattttgtgtgttccctggagtaacacttttaattttcttcaagaactttttcttttcatttacaacttggttaactggtgcaagaaacctcaccttcagcgtagccttagcctcactaagcttaatcatttctagcttttgatttaaagtgagagacatgcaactcttccttttacttgaacagttagagaccattgcaggattactaattggtctaatttcagtattgttgtatcttagggaacagctggtcagtgcagtgctcagaacacataacatttattaagtttaccatcttatgtggagatggttaatggctccccaaaacaattacagtagtaacatcaaagatcactgattaccatagcaaatataataatcaaatgtttgaattgtgagaattgtcaaaatgtgacagagagatacaaagtgaaactgtgctgctggaaaaaaatgtcactgacagatttgctcaaaacagggtagccacaaaccttcaagttgtaaagcattatcgtatacgtgaagctcagtgaggcaaagcacaatacagtgaggtatccctatacttaaaacctttactctacaaagaacttagcagcaatcttaatgttttgtttacatttagaatagtgttattcatactagcatagttaagacactttctctgagacacaacagccagttcaatagaaggtaatctcaaggtgaagcaaaagtagtttaggagaaatgtgctgtgtttgaatacatcttattgatcaagtccacccccaaaataaataaatgaatgcatacacacattagtaaaactttgaagtattatgttagtacaaaagataattagcaattacatttttattcggtttttttttttttgctttttggttttttgagacaaagtctcattctgtcgcccaggctggagtgcagtggcatgatcttggctcactgaaacctccacctccctggttgaagcaatcctcctgcatcagcctctaagtagctgggactacaggcacgtgtcaccacacctggctaatttttgtgtttttagtaaaggctgggtttcgccacgttggctaggctggtttcgaactcctgggctcaagtgatcctccctctgcggctcccaaagtgctgggattacatttgtgagccactgcgcccggccttcactttcaggtttgattttgtgcatccccagagatgctggccatattctttggcaggtgtgtttagttagtattgtctttggctaccttatttttcttcagtaataatgaagaaatggtggttcaaactgttgtagctcagaaaggtgcatttgacaagaagcagtcagagtcccattgctccccttcccccacctcataatatttctctggctttcttgctgtagctcccactccctctcctattcttgttcgttcatttgcaattttaaaatgtgcatttattaatctgtaaaagctgtgcctaggatttgagagcaggtagtcatgctattgatcaaaaaccatggcaaaaaatatttagtgaggaacacaggaaaagggagcagagactaaagaaaggactagtttgggagtttggctgggtgatagctaaggtctttctcaagctgaattgtaaaatagtagatctggaagggggcaaagaacactaactttatgcagccctctcctattgcatgtaaagaaaatgagggccaggtaaattgatttgtcttaaatgtacaagtcagtgataggtgccccacccacccgtttcaaattctttgctcataagattggatctgttctctgttttatcaaatctttctctcaagaaaatatgtataacataatgtcacatattagatactgtgtgtgaaagtgtctcacacattgtaagtaggaaaaaaattagttgactccattagctgactaattcttcactaggtaaagttcagtcagggttagcagcacattttgtattccttatataagaggcctctgaagacagaacagattcatctgtacctagcataatgcctccctagcctctggaatgtgcttaaaaatgattacatgatgaattatacatattaattatacttcagattctctttcaataagataagggcttgaagagtaattttctagtgttcattaatacgaatttgtgctgggacatctattcatggttaggtggttttgggactgtgactgggtttggaagtacatcacaacataagactaattgcccgagatacagatttcagctctgtttacatgttgactcgatttcaaaactacatcttaccatagaagtgaaaaaaaaaaaattcaagcatgttctattaccctaaataagagctgaaaagatgaatgttgaccaggttgcttatgaatatacattctctaatgtggcgctctttaaacttgggcatgtgaaaactgtccagtgggtacgggagaacacaaatagcttaaagggaatccatttccagaaactcatcttctgtatgtacttctccctaaaatggatctacctgtgaattctcttgtggtcaagccttcaggctatttctccttttgcatctctgcttaacaattgccctttgccacttaagaaaaaaaagtcataaccctcacctataaccttatttggtacatcgcaaggtgtaaggacctccactggtgcggagggggcaaaaaaagagtcaattccaaatcctagttttggagaagcttcctatagtgagagatagtgcagtttttcaatattattttaaggcatagagacgatagtagaagttgaagaccattgcaaagtattttgagtttttctaaccattttgatatttatctaataactggttttatcattaatttttaaccagtgtctttttcaaacatgctctttctctgataacactgccagagtggtgcatatttaattctatacttaacagtctgcttgatctaagtatctgcatgagagccagcatagcatttgaaagagagaattgtggtacggatggtgtcataattctttctgagtacaaattccactgcggtcactgtcagtttcactgaaagtggaagctgtgatatcctccatacttttcataatgattcaggaaccacagagaaaaaaattcattggagtttagagatgattgaactaaaatacacgaattccatcaactgtgcaaaatatgttggagagagaaagagagactcacggttacacaatgcatggtaatgtagaaaagcttcagagagccctgtgtgggctggcaatgacagcactaaagccttgaataaaattgcattttatcgtctctgagaagcaaccaaaagtgaggaacaacgacttaaaattaaatttagaccagaatatgtttacctctgtaatttaagcaattttctttgctttgttattcttaaaaatgatgatcttcaaattcaaagagtcattctgtcctggctagtgtcgagagaggtatgtgattgtgatctggctctggggttaagttacagaaattacagttagataaaagattggtaagcttgcaaagcagtgattttttaaccaaggcttccaatcagagttacatgtggagcatttagaaatattcatgcagtttcctcgtccaaggagctgatgtggtagatctaggacagggcacaataatcagtgtttttaaaaattcctcggttgattttcttgtgcactgtcacatctttagataagaccactgtggggaaagactgtttgtcctagggactgaccctggaactatttcctgaaatccacctgtgggtatatcatcattctttgctaggtatctgctattctctagtacgctagagtattagtttcctcgggctgctgaaacaaattaccacaaacttggtgtcttaaaaacagaaatgcattctcacaattgcagaggccagaggtctgaaatcaagaggtcaacagggctttttaccctctggagggttcaggggaaaagtctcttcctcgcctcttctaacctctggtggtcgccagcattctttgacttacgtgtgtattactctaatttccatattcctcttcatgttgccttcttttctttcttaaatctccgtctgccttctataaagacacttgtgattgcatttagagcccacccacgtacgttccccatctcaagttctttaacttaatcacatctttaaagtttttgccatataaggtaacattcacaagttctagagattgggacctggacattaggggtgccattcttcagccttccacagtgagttatcgcttcactgtatgtattcatatgggctgccctgtcccattaaggtccatgtggtaactttctccacttagctctaactaccagtccatagcaatgtttctccccaaaccctgccctcttgcagctaggccagataacccctcacatagctggagataagttgtttttctgagccatagactatgcctccagttttagccattctcatgacaaatgcctttggtcctaaatggactaagagtataggatcagtgcagccagcccatcatcctcaccaacaaaggcgcttcaagcatgtgtcctagcaacggtggctctttaaagctcatcttttaagaatagaacattaccagattatttgaatatattctaagagaggcacaagtcttattatcttttcaaatgggctctgactttggccaggcatatacgatgctataaggtttggtcttaggaggagacaatgtacttagttgatgtaaacatgaagtgttatttacttgagtcagtgtttgtgaaaaacaagttatggaatgtggagagaagttaattaacatgggatttcatttcctcatccgtataaggaaacctttgtttcatgatctctgagttcagttctgaaatcccattttgttggttcttcccttaccatcagaaaggagaaataggtgctagtgcagatgcattttagaggagatggcgagaggctcatgaatgaagaccctgctgaagtttgagttgatgaatattcaatggcattaatttgttctattgtttaattttctctagtagtgctgaattagtcacatacaaataggggaggctgcgaagttcaggaggattattagtggctaggtcagtgctgcccttcattaatacccacctccccacaaccccctagtccccttggcttcagagatgggccgagtcatagaactttctcctagccacgcagatctgtccatgggaaggataggtgaactgaacctctactgggaactttcatactggagctgggagaaataactagtttgttgttgttactattgagagagacaagctgtgaaaaggtgttgcttgttttggatgtgtttcttgtgtagtggagaaacaaggactgcagatggttggggtagaaagaggcgaattgagatgagagagaaattcctggatccctgaggctactagagcatactttttatgatctgactacattaattattaggcctccttacccttaaggtagtgtttaggtatttgacatttgaaagtaaaagaaatcttaactaatctgtaggattttcatacggagaaatcagagtaggattgatcaagagttatataggtgtaaccacagctacttagaaggctaaggcaagaggatcccttgagcccaggattttgaggctgcagtgagctatgactgcaccactgtactccagcccgggtgaccaagcaagaccctgtctcaaaaaaaaaaaaaaaagaattatatagtatctattaatattttcatgtacaacagcagaacaaagaaatcgaagatactaactagactggtggaggtgagagactatgacgtctaggctacacgggaaaggaagtaatgactgccaggttagagataaagaagaatcaagggaattcatttcttaactaggctgagtagataaaaagatgggaagttgtgttgagagtgtatttaagttttggatgcatttgtaaagcgtcttccttttattaagaaaaataataattgtgataaagcactacaaagaacaaggaaaattctttgcaattttgcaattgaaaagaatagggatgacacccactgtctggattcggcatgctacaaaaaaaattctattctatgttgtttacacagtgagaggacttgacctgcaatactgcaagtctgtggaattcggcaagatgatttataatagattatcttcatgagatatctggctgattgaatagcaagaatttttaaatttacaattctacttctctttgaacaaaatattcttgagggaaaaagtatttgaaaaaatttgtgctagaacagaaatgaatgtattagaaaaattttagctgtttagcggtcatttaaactttctacctttatgaacagattttttaaaaatctttgccacattttgaattactctgggtaatattgagtatgatagtagcatctaaagaacctttaatgatctgtctcttttcatttgtagtttctcagcccactgttacttgtgggttcaaaatggctcatgcaagtaatataattcatttaaaaggcgtttatccaacgaaagccctcctgagacttgagccagttttcaactctctctgcacttccataggtgttcagcctcctgatacattaactatatcatagattggatctcttcagtaatcctgagttcttcaaaacaaatatgcaatttatagcatagtctttgtgcctcagtatactccgtattttaattgtacgttctatcccttttgtgtttgagaatacctatcatgtcctgaaaaatataaaatgtgacctggtttttattagctactgtaatatttcaatagttgaattgactatgaagccacaattgagaactttcatgaagtttgtcaagatactggctaagaatacacgtattgagtcgtaaataatataaattctacaacttaaataaatttgtactgaatttggaagtattttgctgaaaagtgaatttactattggtgtgcattgtttgcttacacacatgtaaacacttgaatgagacaatgttaagggcgaaaggatagaaatacaaggcagttctgctctgctgtgctgcttggacaactttctgaacctgccttttcttgtttgaaagacaagaggttagatgacatgtgatcccccttttttctatctcagagtaaatgaagtcttggctaagccttcaagttctaattgatccaagtcattctttgaggaaaaatgttccaacatcatcataatattgttatgcataccgttcttttgttaaatataatttgctcttgtggttttgtaccttagaaatgcatttgtgtgttccttataacatcttacttaaaattcaaaggtaaagccagacactgtggcatatgcctgtagtcccagctgttcaggaagctgaggcaggagaatcacttgagccctggagtttgaggctgttgtgcactattatcatggtcatgaatagtcgctgcactgcagcctgggaaacacagcaagaccctgtgtcttaaaaaaatgtttctcggtagttggtatagtggaacaagctgactacaaggacctttgtaatgctagagctgggagaatcagggtagcagtcttgtgctgactttaccattattgttaccaagggtctaaagaagttttttatccaatctgccacaaccacacacacccaaaatgtaatacttaactgtaaggcagaattgggatgttacatttataataaaaactggattaagtcagtggtatcgaaactctaaaactatcctaagatgcttttccatgtctggcttcagtccccctaccaagtatcttactctttaatttgccatgaaaacaattctatttctttcattaacgaaaaaaaaaaagcagccagacacagtggctcatgcctctaatcccagcactttgggaggctgaggcaggtggatcacctgagatcaggagttcaagaccagtctggccaacatggtgaaaccccgtctctactaaaaatacaaaaattagccaggtgtggtggcacacgcctgtaatcccagctactcgggaggctgaagcaagagaatcacttgaacccaggaggcagaggttgcagtgagccaagattgtgccgttgcactccagcctgggcaatggagtgagactccgtctgaaaaaaagaagaaaagaaaaaagtatgagtactccactgtccaactgagtgaaactacaagaccatattttcaatatgagaaatagcatgcacagtgtaattttaatcacatcctaatattttactataatgaaatgtagtacagtactgtgccttattgataaaagacagttataactttgtgaaagtttctttgtttcatgaaacgttcgttgttcacccaatgctcatttgcctccccatgtattcttcacctttctaaaagcaaggtgactgacaaggggggcttcgtgcctatccttttatgaaggaattacttggtcatttgctgaattcaaaatgtggaacagaatggaaagaataatgtgatctcattttctctctttacaggctctgtacaactcaatcaagaatgagaagcttgaatgggcagtgtaagtgtgctggacgtcagccttttaataatgaactactcacttttttcctactgtctttatgccttggaagtgatcttagagaaggattaaatatgcattgccaattctcattttacaccaagtgtcttacctactttgtggctttatacaagtaaacccagatacaagtaaaacctatttcggttttatacaagtaaacccagagtatcctgtggttttttggtactcagtgtgttcctattctgcttttaaaatggttgctgtacctgtaggtaattaattgtcttttaatttttttttttttttttttgaggtggagtctggctttgtcgcccaggctggagtgcagtggcgcaatctcggctcactgcaagctccgcctcccgggttcacgccattctcctgcctcagcctcccgagtagctgggactacaggcgcccaccaccactcccagctaattttttttttttgcatttttagtagagacggggtttcacagtgttagccaggatggtctcgatctcctgacctcgtgatccacctgcctcggcctcccaaagttctgggattacaggagtgagcgaccacgcccggccttaaatttatcttttaaaaagtaacattctaaaagaaaaatctgctgatgaatagtgtgtattgcaaaatgtaatacaaatggttttggtatcatccacttattttaattatctccttcctatcatcatagatcatggctttccaggtttatttcctatgatactaatcatactaggacactgatagatactaagcacaaaacaacaacagcaaccaaaaaaaggttctctgaatggaataagcttgggagatgatggattgaataaagctattttatttaaacttcagaacttctaggagcttatccaatgccaatgtgtgttatcagtccccaagagaggaatagaatgtgtaatgtttcctgactctctttgacagtgacatatagtgtttcagggtacatactttgagaaatactattaaagatgagctacacctaggtctacgtagaacaataccactgttgttaaaatttccctaatcaatatagcagttcaaaattttaatttttataaaattattatggaagaatatgaaatttttaatcacattaccaggaaattaggtcaaaatgtgttctttgtaattagaacttcgtggattttattttttatttttactaagtattcataagtattgttttaccacgtgacctaacagagcattctacaatgaactcgggtttacagaatcataacttgggagataaaacttgttatgttatctgcacgttggaggaacatgggttaatagttgactgtgtattacatataatgtgcaggaatttatttttgaagtatcagcaccacttgaattgcgtctactcactgtagagtcatggtcctattgcaagttagggagtcaaaagttaagactttaatatttgcatatatatatatatggcttatgtgtctgtatgtatattcatgatgagactcatttaaaggcagcgtgccatttcaaggaaaactgatcattaagaattcatggtctgctatcaaaggtgatcattcttctttaggcttatttctcatgaacaaaagtgggtttcataggaaaattttgtgaaggatatagtcagaatcttgctgaaatgcaaaaaggacatcctgacatatgcagaatatgtagtctagagaaaataaataaaaatggcatcatcatattcactctgggcaagagaatacattgaagattcttttatgaagttattttaaaaaacaaatacatatactcttgaggacctgttttgtaaatctaggtttttttttttaatttgttacagcagattttatttattcatttataggtagtcggagtttgatgcaagaaagctatatcttgcgtgttacccaagggtggaggggcgggagtttacccagtaactggtttcttcttgtgaagttagcagagcatcttgttcagaagcctggatttcagagtcagataaattttggtgtgaattacagctttttcatgtagtagctggttcactgaccaagttaacctgtagtcctcagtttcctcttttgcaagactgagcaaatattgagtctcatgtaaccttcaggatgacactgaaatgtttgaaaacactgaacataaagcaagttgctcttcaattgatgcctgatgctgtagctttcaaagctccaatttctttttttttttgtctttttttctttttctctcttgttcatatgcatatacatagactacatttttatacattgtcaagaattagaagaagacactatagtggttatcgtataatttctatcttcacctataaaatgaaggaattggatgaaatgatcacaagtattttttctagttctaatattctgtaaatttctgagttttgccatatttcagtgtttcctcctgtggaagaagtactgctctatcaagcagatataaaacaaagggattatgggtcaactaagtcttggaatgaatgctagctcaaacaaaattaaacagatctctctgttatcatcctgttcaatcaacgtacatcttgaatttctgcaggagaaatttgaatttaaaaacctgatgtacatcttgaatttctgtaggaaataaatggccaataccccaatttattaaatcactgaatcttatttttgtcttaaagcaccttttaacatctactaaaactggtgctttttatttagaacacacttctgagaacactgacatctatcagtgtatgtgatcctttagcaaaggagctaagcagctgggcacggtcgctgacacctgtaatcccaacactttgggaggctgaggagcctggatcacttgaggtcaggagttcgagaccagcctggccaacatggtgaaacctcatctctactaaaaatacaaaaattagctgggcgtggtggcgtgcacttgtaatcccagctactcaggaggctgaggcgggagaattgcttgaacccaagaaacagaggttgcagtgagctgagattgtgccactataccccagcctgggtgacagagtgagacttggtctcaaaaaaaaaaaaaaaaaaaaaactaagctttttccttgataaaagtgtatgtacatggatataattatttataacactgtgctctcccgtttctcccatacctctctaactagactttctctgacccattttcctcatattatcccttagcgttagatggacactttgaattgtcttcttccaatgtagtctcctcctcagcaattgcaattcactcttaaaacttcttctgccatttctgtaaaaattcttcctatatatatatacagctctgacctctttcccaagtttcaattcagtgtttgcattttcctgcaggatgtttctgctggcacttagcgctcatcgtctgtctccaaacttgtcgtgtgtgctccatttctattaatgacaccagcgtttccggcttacctggattttagcctttacatcatctttgacaccctcccacaccaccacttcgaacccctgcagaaatggctccaaacagcatctttcctcttcactcctgccattcttttgtttttcaggcatttatagtgtttgcctcctcaacaaggccttctgtctccaatcttccctgtactttaacctctgtgaagttcctatgtgctgtaaaactttaattaggcccttcacgttctgccaataattgattttgttctccattcagtgttcgtgaagtcacctctgctaggaacctgtatcccataatcattttatgttcaaagcctatcatccttcacagtccagctcctattccatctgttttcttgaagttttttctgatcttgctaaccagaagtatgatctcagccttaagcttccattttactttatctgatgacaccagcagtttctacaccccattatggttatttgtagtaatgtgccattagattgtaagctctttaaggaaatgatacatgtctggatttgtccctttatctcctctgttgctgatcatagtgtttatatgtaatgaaggctccataaaaggctatagaaaggatgttaatggtaatgaaggaaccacatttcttaaaagataagcctacaatgtgtagtttagaaaatagttacaggaaaggtggtgatgctacaaagtttgtaggataatgcatggaagacttgcgcaggaggcatcttgatgtggatgttagaaccttagaggaaatcacgatagaattattgagtgttagaaccggagaatgttataactgttataaaccttataggtttttatatcattggttttctgactgggttcagtgtaaccttgggttacagggagatgccttggggccttacctgggagtgtgactgaaaattgttggggacccagttctgcttccttaagtattatgcctagttcagctgatcaaaacagctccacttttatctcttttgaatatatgtatagggttctatttcatatttttaaggtatatgttcttgaaaaattttttgaaaggtacttacgtagtccattgttgttactttatatatgaggaaaattaagtcaagaagtgttcatcaataggtccaagtccagtatggtgggaaggccaggattttccccagctgttatggcctcctatggcaccaccatgctgcctggcatctctgtagccaccccgtcttataaagtctttgaagagcagagagtgagtctgaatgtttctgtgctagcctttgatacagtgcacattaagagaatgttgtattaatttgctagtctcattaaatgctcatagaattactagagtttttccttaagttagtagcaaggatcatttatttattcatctattctgcaatctctatccagcttctcctgtgcctggcccagtgctgtgccctagatacaaatatgaataagacacagatccttgcctaatgagaacacaacatgagatttaggggagagggaggactgtacaaagataaaaatacaaaaactgtaatgaagagtgcagtgagtcaaattgacttgtggaaggtctctgctacgtcatataggaccatgaccatttgcctttccaagttcctttgctcaattgttcattattagtgaagcatctatttgttgacctacttgcatcatgcagcctgctgataatttggggagaacaaaactatataaggcattgaggcatttttcttggctttaaaaaatttccagtctaagtgataaacaaagtgagtaattactctttgtgattgggatggcgtaggatgaggtgagttgaggtggatatgggagtttatatcttatgttggaattgtttaaaatgtatctgcatgaggatcttcagaaaatacaacgattaacacaaataggaaaataaaataagttcagtattgtctattaggaaaattaatgttcctctctttcatcctttgactttcatgtttattgctgctttctacaacagtgtttacaaattgtaagaaatctccctgttttagtctgttcttgcactgctacaaagcaatacttaagactgggtaatttgtaaacaaaagaggtttaattggctcacagtcttcaggccgtacaggaagtatgatgctagcatctgctcagcttctggggaagcctcaggaaactttcagtcatgacaggaggcaaagagggagtcagcacttcacatggccagagcagggtggggtggaagtgccacacttttaaacaaccagatctcacaataacttactcactaccatgagaacagcaccaaagggggaaatcttcccccatgatccaatcacttaccgccagatcccacctccaacagtggggattacaattcaacattagatttgtgtgggagcacagatccaaaccatatcattccatccctggcgcctctaaaatctcatgtccttctcacattgcaaaatacagtcatgccttcccaacagtccctcaaagtcttaactcatttcagccttaactcactcttatctgagacaagcctagtcccttgtgcctatgagcctgtaaaattaaaaacaaattagttgctcccaagatacaatgggggtacaggcattggctaaatactcctattccaaaaggaagaaagcagccaaaagaaaggggctacaggcactgtgcaagtccgaaaccccggcaggacagtcattaaatcttaaagctccaataataacctgctttgactccatttcttatattcagggcacactggtgtgaggagtgggctcccaaggccttgggcagctctgcccctgtggcttttccagagttcagtccctgcggttgctctcatgggctggcgttgagtgcctatggcttttccaggtgcagggtgcaaactgctgggggctctaccattctggggtttggaggatggtagccctcttctcacagctccactaagcagtgacccattggggactctttgttggggcaccaaccccacatttctcttctgcactcccctagtaaaggttctccaagagggttccacccctgccgcagatgtctgcctggatatccaggcttttccatacattctctgacatctaggcaaaggctccgaagccttaactcttgcattctgcatacccataggcttaacgccatgtggaagccaccaaggcttatggcttacactctctggagtgacagcttgagctgtaccttggcccttttagccacagctgtagctagagtggctgggatgcagggagcagtatagggcagtgaaacttcccggggactggcctatgaaaccattcttctctcctaagcctccaggcctgtgataggaggggctgctgcaaaggtctctgaaatgcctttgaggcattttccccattttcttgctatcagcacttgcctgccttttagtaaagcaaatttcttcagcctgctgcaaattttcacatggccaggctgcaaattttccaaacttttagatataagttccagttttatgtcatttatttgctcgcacatataagcataggttgttagaagcagccaggttacttctttaatgctttgctgcttagaaatttcttctgccagataccctaaatcatcactctcaagttcaaaattccacagatccctagggcaggggcacagtgcctccaagttctttgcttccgcataacaaacataacctttgctttagttcccaataagttcctcattgccatctgatacctccacagcctggactttattgtccgtatcactatcagcattttggtcacaacaatttaagaagcctctaggaagtctcaaactttccctcatcttcctgtcatcttctgagccatccacactcttccaacctctgcccattacccagttcccaaagttgctgctacattttcaggtattttttatagcaattccccacttcttgggacccatttttctgaattcgtttattctggcactgccataaaggatacctgagactgggtaatttatataaaaagaagtttaattggctgatggttctgcaggctacacaggaagcgtggtgctggcatctgctcagcttctggggaggcctcgggaaactttaaatcacagcagaaagtgaagggggagctggcacttcacatggccggagcaagaggaagagagagagggggcaggtgccccacacctttaaacaaccagatctcatgatgacttaactcactcactcactatcatgagaacagtactaaagggggtaatgccattatgatcgagtcacctctcaccaggccccacattcaacatttgggattacaatccagcatgaaatttgagcggggacacagatccaaaccaaatcactcccttatcctagtttaaaaaaaaaaaaaaatcatgtattggctcattttaataaagtcagccaaaaaaaaaaaaaaaacagttttaaataatgaacttctggattccctctgcacttgtgcaccctccatgttttagttacagcagcattggccttgctttgtcatttagcacatttgttctttttaactctggataagcattttacaactttgcatcgtggaataatctttcctgcaatttcatattgccctacaactcattttataacaataacagtttaaaacatttgctgtatttgctaataagttaaactatttcccatctgccctcacatattaaattgttctggctaattaggtgaggtggtagcacattgatatctttctgtccttccagtcatgtgttatgatagccctgagctttagaaagtgtggttttaaataccaacagtttgtagtttggcttttcatttccttgttgcaaatttaagtcatgactggtcttttcaggaaatcagtgctgcctctttgttggctgatttgctgaaattaggaagtagagaaaattttgcaaagatttcctcccacttctttgccattatgtttaacactgcccatgaaggtgtgagtgtgtgcatgtacatctctgtgtgtattcttgggggatgatagaggcaatgggattactattacctgttttttatgtgggtaccttgattgttcattcaacccaatggcctaaatatgaaattggtaactagttccaaagtctctttgttttgtgaactcttaagaaaactctttttccgagtaaagaagccttctagggctcttttactttcattatttggttcccttatcatattttacttaactcagcattgattctcatttcattttaggtattaatacatattaattaaaatgtaatctcagttgtttctctgtgagagttggtaatctcataaggacgaatagttttcttttcacccaagagtttttctattagtttagactgatttagttgtaccaccttacactttttaatataatttgtcgcctttcatttaagtttttcattttttttgttgtagtgcttcattttgtttatttgccaacattagaatcagccatgaagaaaagttggaatcccttgtgtgtactttttagaattgaacttacatcctaatgaaaagagttcttcctaattttagttaaaatattttttaccttgacataaaattatttggttttctttcaaaaaggcaactcatggtaatttcctttttttgcaatgacttactacattaaataactgtatatccttaatccctagtgaatatagatatataaaattgttaatcagagtagtgtttcttaatagtagatgtagattaatgaaggaaaactttcttgctcgaaaaagttatttgggatgaagacatttatgagggaactttaaaatgaaagtaattttcattttaaacttcaatgtagccatctgtaggttggcaatcattactaacaagaaaactaaggcaagaagaagttgctattgtgcctcttgaaatactagaataacattctcagtgtcattgctgtctatgggactatactcacattcctaaccagcagaaactacatcatactggactcttggtaaaatattaagctggacaatggtatagataaaacatatattttaaatatataaccaaaaatttaatttgagtgtgtgcagagagaggtagggagcttggcatttagggtcataggtagagacaactcaccatggaaaaactgataaaattatttgcacgagatatttgactacaaagaaggaataatgcattcatttattgttgggagaaacagaaggaataaaactcagttctccacttgaggtgctcatacaattaaatgacttttctagatactcattacacctcattgaaattctagaatgagatttagtgttctcattgtcattgctctctgtttcactgtactcaaattcctaacatggcagatactgtgtcacgctggactcttggtaaaataataatgctaatgttagtactagcataacaaacttacaagacaatctatacgaagaataactaaggttaaatctatatatgtatagtggttatgtaaaggatattattggtttgattgttctatttatattcagcaaagacaccctgactgtaagaaaagaaacagaaatgccatagttatgaaaaattgaccattaacttgaaggaaatattgaactaaagagttgagaccacttaattttgttagctattgattattagagttttctacagtaaagtatttttaaattaaaaaattgttagctaaaaatgatattgaacatgaattaatcttctggattttggtatttaaaggaaaaagattttcagtggttagaattaaggaagactcttgctatggtgtcagcatgtccccagagttcatgtgctagaaacttaatccccaatgcagtgttaggaggtaacacctaattagagactgttaggtcataagggaaaagggctctgccctaattaatggattaatgttatcaagggagtgggttagttatcgtgagagtagttttgttttaaaagcaactgtgatccccaactcgctctcttgcgctttcttgaccttctgccttactaggagaagggcagcaaagcacaagagagcaggtgggggttagagaagaccccagcaaggaggccctcatcagatgcaggccccttacttgactttgaacttccagcctccaatactgtaagaaataaatctctgttcattttaaattatgcagtttgtggaattctttcacagcaacccaaaacagactacgacagaagattggtaccgagaattagggctgttgctataacaataagctgaaaatgtggaaggggccttggaattgggtaatccacagaagctgggacagttatgaagtgaatgctagaaaaagcctagactgctgcaaacggagcattgtgggcagttgggtgagggctcaggagaagacaagaaatttaaggaccatctgggacttcttagacattacttaagtgatcataattagaatgttagtagaaacatgcatagtaaagtccattttgatgaggtctcaggtagaaatgaagaacaaggtatttgaaactggagtaaagactgtccttgtaataaagtcacagagaacttggctgaattgtattcttgtccaagggctttagggaaggcagaatttatgagcaaggagctaagatatctggtgcaataaatttcaaagcaaaatgttgatggagctaagtagctacttttaaccacatacagtaagatatgagaggaatgacttaaagatagaacgataattaaaggagaagcagaagaaagattttgaaaatgttcagcctggccttacaaagaatgataaagcatgcttgggaaagcaaaccacagttgtggccaagcaaccatttgcaaagatattgttatggatacaagagatcaagacaatgggagaatgacccctgaaaacatttcagagatctttgaggctgcccattccatcacagtcccagaggtgtaggagggcagaatggtttcaagggatgggcccagggtgctctccaccagagccccctcagttctctgctccccacattctggcacagcattccttggctaccccagccgtggtgtaagccggcctagctacagcttagcccactgttctaggaaatacaagccataaaccttagcagcatccatgtggtgctaattctgcaggcacacagaatgtaagagctgtagaggcatggctttctttacctagatttcaaaagatgtgggatattccatgacagctgctgggtcgtctaagcccagtgaagtcataggattggggctgcctgaggccttgggggcccaaccccaattccagtgttttcaggatttgggacatcaaaggaaactattctccagctttaagtcttaatgttgttttccctatttggttttggagttgggttttgttcattcttttttcttgcctatttctcccttttggaatgggagcatctatgtctgtctcaccatagtatttgaagtagataacttgtttgatttcacaggcccacagctggtgggaaatttgcctaaggatgaatcatgcctcaaattgacctgtatctgatttaggtcagagtttggacttcggacttctgagttggtgctagaaagagttaaaactggggtcactgtgatgaaatgaatgtatttcagaggccacagacagaatactatggtttgaatatgtcccccaaccattaggcaaggcttcataagaggtgcttaggtcatgagggctatgagtggattaaggttgttactgcaggagtgggtttcttataaaaccaagttcacagccctcttcctctctcacactttcttgcccttgcaccttccacaatgggatgatgtagcaagggagtccctcatcagattcaggacccttgactttggacttcccagtctccagaactgtaagaaataagtcaccattcgtgataaactcctcagccagtggaattctgttttagcaacacaaaatggactaggacagctctctcatatggctctgtgaaatgtaattttatcaagaacctaaagcatatctcatacttaatctgagctcacacttaagatttaagtacttgttttctcagctgaactcaggtgtataggaaactggaaagatttgccacccagttcttagctttaaaaggccaaatttttttaaaaaatgacaatacattgtttgcttcatgtctaagtggcatttctcttgataatgagattgagatggatacttagaaattttaagggttttattgtgaaaagcttaaatatttctaaatatgatgaaagttatgtactttacaaatattgttatcttcatttcacattatcttcagaatattcagagcagacaggttggtgagcagatggaatgtgattatgttagtagcctacttgtcctaaagcatttttagaatcactgaggagcaaagaattatggaggctgggatgtaaagaaagcatttttcttagtatgctaaggatagagaatcttatatcctctatatcaattgctaagtgcttgatgtttgatgaggaatgatacaagatgatatataataaatatagtttctgaatgatttttaatgtgtatatgaggagcattttagacagtagttgtttcattgagcatttatgtactcgtacattataatttatacatatatgtatattttttaaaggtgagaaaatttagccagatcaagaatactcaaggaagttatttttagttgccccttaaaaattttccaatagatcttttgggaatacctaacatgtggcttgaccccagtgtattttcagaaacttttttaaccattggttaagtttgtcttggtttggaaagcatactacagtcattgtacatatggtcagatcctttatttagaaagccaagttactagcctacatctttctcatatctggcagcatttttcttggtattaaaaggctagtgatgaagcctaacatttttaataaagcatagtctcttttttacttttaggattcctgtgtcaaaataaggtatttttagagaatagaatgcaattcatattttcagcagaattttaaaatttaactacatgctttcttttttatttttggtaagtgacaaagatccattttagactcatcctgcctcgtggtataatgtgatgtggtataatagaaaccccatgataactcagcacattttttataagttcattcttcgctttattttcctgcaatcatctgatcacagtattgagatgtgagccaccttagtgttctgcccctgcattcaaccaccacctttattttttaaactgctttattgaggtgtaatttttatgccataaaattcacccacttaagtgtaccaattttatgctacaccaatgtttgtaactttgcacacttgtgtaacaaccaccgtagtttatcaccccatttccatcacccaacaaggatttcttgcattataatttagcatgtttgatacagactcttccctcctctctgatcctgtactgctttgtacacagctctgtggagacatatagtattttataaaaaatgttttagccaatattttgtgtatctgtttcccctactggatgatgaacccctcgaggggtcttaatcatcatgatatcaggactgcctagcacacactgcctggcaacttagagctccttcccatcactactcagctggccctgatgcccagggataccagttcccaagcattgcttcctggaggagagcagggacttggtaacatctagcttctaggctggttgtaaggtgaggaaattaaattacagggatcatggtaatgattgccagtacaaggtggactttgggacctgatttataacccctacccttctgtaatgttctggctagaggagtgtatacacagagcagagagctgagtgaaatgaagtcaagcctctgctgtgtaatgcagagtgcaaggcacctgcagaaagttatactggagaatgtgactgggacctgagtggccaccaagcctgctgagctccccagcctaaccatattacaggctgtgaaatcagaactaaaggagcagaggtgagctctgccccactgggtttgccacatagtaaggcaaaagggatagagcggtttacctgatgccaaagaagtagtgggggcaagtgtcgagtttctcttttgagacactcaaaggtaggtcagtggggctaattagttctgcttcctaaatagagaggaaagaacagggctttcttctgccatcttccctccagtcttactgatgtattagtccattctcatgctgctataaagaactgcccaagactgggtaatttataaaggaaagaggtttaattgactcacagttccgcagaggtgggaaggcctcaggaaacttacagttatggcagaaggggaaggaaacacgtccttcttcacatggtggcaggaaggagaagaatgagagccaagtgaaggtgaagggccttataaaaccatcagatctcacgagaacttaatatcacacgagtagcctgggggaaactgctcccatgattcagttacctcccactggtccctcccatgacacatggggattacaggaactacaattcaagatgaaatttgggtggggacacagccaaaccgtatcacttaacaatgtatgcagttttgttgttgtggagggtttgcatggtaaaacttggggtacctgctccatatcttaggggagaggctttttgcagtatttagcctacacttagcagcataggtttccatttagggtcaatgctgtggagacacatggaatatcctgatcttttgttgtggttttgtattggtctatatcaacggagttctacaatcatgaaatactagaactagaatggattcacgaccacagtctgcttccaagagctgttttttgaaagtgaatggggattccagagacctttctactcatcctgggctcccactccctggacaggctttgcatggcttgtatttactgacttagagcaagcttcaaattttacatatgaggaggctgagatctagagagatgctgcagcttattcaggatcacagtgaagtttatggaagagcaagtactgagacacagttgtcccagtttttcttctctagggcacactcccatctgcaaaagtgataaaattaatctgaagctgtggtgaggtagcatctaagtatatccatttcctttggctgccataacaaaatgccacaaatgggctttaaaaacccagatttattgtctcatggttcttgatcactgagatcaaggtgaaaatagggttgtttcctcctgaaggccatgaccgggagtctcctccatgcctctctcctagcctgtggtagcttcagggtcttccttctgtatgtgtgtgtctgtgtccagatttctttctttaataaggacatcaatattgttagattagggcccactctttaatcatcttatttccaaacaaggtcatattcctaaatgctggaagttagtactttaatttctcttgtggggactgaattaaacccataacactaagactagagcaataaaagggaaatggggcacaatggtggactaggaagctccaggcccttgttttcttagggaaacattccataagcaagtaagaccatctgaaagaacttcacatgtgctctgaaaaccaaagatgtacagcaaccaggcaaactctcaattaaaaaaaaaagccacatttaaaacagtagaaaacttcaaagcaatgttatttgcccttacccgactccctccacagcatggtatagcatagtccttaggaagcagcccaattacttactccctctcttgggatgcaaggaagagagtgggacttgataacaatattctggcctgtctgtaggctgcccatgtgactggtttctattttgcctaaagtagggatcgaagaggggatggtgtcatagtttggatttcagactggcacaagccacggaagggcagtggtcaatgccatggcacctgattctgtagtttcccccattatatattcttgaaaccttttccagaaatccagttgaccttagctacttgggatttttttctgggctttctgtttttataccagtatcatgctgttttgattacagtaactttatattttacagtcaaaaaactatgcctccagctttgattttttgctgaagattgctttggctgtttggagtagtttctagtttcctacaaattttagtattttttctatccctataaaaaatgacattggaatttggttactaggtatattttaacaatattaattcttccagttcattaacatgggatttttttctccattgatttgtgaatttttcaatgttttacggttttcagtacacagatcttcacctccttgcttaaatttattcctacttgtttttttttgtttgtttgtttttaatgcttttggaagtgggattgttttcttaattctttgagtagttagtgtacaaaaatgctactcattttttgtgtgttggttttttaatctaaaactttactgactttagcagttctaacagttgtcagggaggggtagtttttacggtttttctatatataagattatgtcagcatcagagacagtcacttccttttttttttttcttgcctaattgctcagcctaaaactcccaaaactgtgttgaacaaaagtggtgagagtgggcattcttgtcttgttcatggtcttagaggaaaaacattccacctttgactgttgagtatgatgttagctgtgggctgtaacagtactgaatcttttttttttttttttttttgagatggaatctcgctctgtcgcccaggctggagtgcagtggcgtgatcttagctcactgcaacctccacttgccaggttcaagcagttctctgcttcagcctcccaagtagctgggattacaggcacctgccactgcagtgggctaatatttgtatttttagtagagatggggttttaccattttggccagactggtcttgaactcctgaccttgtgatctacctgcctcggcctcccaatgtgctgggattacaggcatgagccaccatgctgggcccagtactgaatcttaatgatgataatagaataatcaatttgaaggacagaaatctttcttccagattgattctgatctatgagagactggcagtactgtatttttatatttttattatggtattggttgtagatacaaatagtttttcattgtaaaaataaaatatagaaactagaaacaactcagtatctttcggtagatgaatagataaacaaactggcacgaccataaaatgaaatggtactttacaatggtagggaacaaactatcgattcacattacaatatggatgaatcttaaatgcattttgccaaatgcaagaaaccattttatatgccattctggaaaaggcagaactatagggatggaagtcagttgccaggaatcgatgggagagaggagttggccaaataacagtgtgagggaatttggggggtgataagactgttccatttggcattgtagtgggtacatgactctatacattatctaaatccttaaatctgaacatcacaagaaatgcattttcaaaaatgcttattttttaagaaaatcagtcaggatatgataaacacaaagtagaattcagactataacgaaggaatgtgtttttcacctaaccattgtgatgagagtgagaaaaaaagagctcacccataactttggaaaacagtgtaagacaaaagaaatgtacacaaacactgtactctagtacataaatttgttcctcacatgggtgtaggctagcaattttggaactcttttatatgtttactgagattgaacaaatcaatatattgcagatcgtgaaagccagttttctcactattgaagatgtacagataagcaagtgggagaaggctggaatgtgctggcttaggtttggtggtgttaatataaattaattgggatggttggatggatacacaaatatagatgtgtgtatacacgtgagtgtacttatatatacagtcatacatcacttcataactgtaatatgttctgagaactgtgtcatcaggcgaattcatcactgtgtgaacatcatgtgtactatatggtatagcctattgctcctaggctataatcctgtatagctcgttactgtgccaaatactataggcagtagtaacacaatggtatttgtatatctaaacagaaaacaaacagtaatcaaaaaatgaacagcaacaaatatggcattaaagattttttgtaaatggtattcctgtttagggcactttaccatgaatggagtttgcagaactggaagttgctctgggtgggtcagtgactgagtgagtgttgaatggatttgaaagcctacgacattactacacagtactgtagactttctaaacactgtacacttaggctacaggaaatttctttttaaaaaccttttcttcaattataaattaacatcagcatactgtaacttttttacttcataaactcgttattttagctttttaactttttggtaataacagcttaaaacacattatacagctgtacaaaaacattatatccttattttataagtgttttcctatttttgaaattttgccttttttacttttaaaaacttttttgttaaaaaaattgttaaaaattagaacacatgggactttatagcctaagagtttaaataataaaaataattagaacacaaatacacacgctggcttagggccacacaagggtcaggatcatcaatatcactgtctttcgcctcatgtattgtcccactggaaggtcttcaggggcgtgcatgaagctgtcatctcctatgataacaaagccttttttattttattttactttaagttctgggatacatgtgcagaacctgcaggtttgttacataggtatacatgtgccacagtggtttgctgcacctatcaaaccattatctaggttttaagccccacgtgcattaggtgtttttcctaatgctctcctccctccccttgccctccaccccacccccaacaggccccagtgtatgatgttcccctccttgtgtccaaatgttctcattgttcaactttcacttatgagtgagaacatgtggtgtttggttttctattcgtgtgttagtttgctgagaatgatggtttccagcttcatccatgtccctgcaaaggacatgaattcattcttttttatgactccatagtattccatagtgtatatgtgccacattttctttatccagtctatcattggtgggcatttgggttggttccaagtctttggtgttgtaaatagtgcaaagccttcttttggaacacctactgaaagacctgcctgaggctgttttacagttaactttttttttaataaatagaagtaggatactctaacactgaaaagcatagtatggtaagtgttagacaatgggattttttttggctgcattataattttacaagacaatggttgtatattgtatgctgtccatcgttgaccacacattgttatatgatacataactgtatctccctagctttgtctattgggaggaccccaaagcaatgagcacacctagccccgagatttgatttctaaatactgttctccagtaagaagaaccaaggctccttggagaagtggttgatttcagggccaggacaaggaaaatttaagatgagcttggcgttctgtggtacctgaaagtaaagaagtcctttagaagatgaggcatgttcacaggacataggagcacaccttattataactcccaatggccaaagctgcaaaaatttaagcaacaaattaaataacaatagtatttgattataacctaaagaataaaacaaatatccatgtgtccatacttacagaagaatttcaattaatgaatgtagaataaatgagggaacctttaaaacaccgtaataataattgttacaagataaagttagtgggtaaaggagaatcacaatatttgcatagttacaagatatctccccaaaaacacttacaaagttaaatagtaactttactgtagaggaacctgtgggacactgccttaaccaagtgatcatggttaattctaacaagtaataaaacttgtatcccctggacctaaagcactgagaaagatgcatcacctatatggaatctttccccaaaaaatgcataacgtctatccagtcatgagaaaacatcagaaaaacctaaactgaggatattctacaagataactgaccaatactgttcaaagtgtcaaggtcataaaggacagggagagactgaggaactgttacagactggaagacgctaaagagacatgacaacagaatgcactgtgggatcatggataggatcctagaatagaaaaaaatggtaaactagtgaaatccaaatgaagccgagtttaattcattgtattaaacttacgttaattttttagttttgaaattttttacgatagttattaatatataagatgttaatattaggagaagctgggcataggggaatcctgtccttcacaaatctaaaattctttcaaaataaaagtaaaatatccatttcttctaagagtccagttttgttttcacttatctcacaattactgataaaataccaaaagagaaaaaaaaggctgtttttctctgattaccgtcattatcaaacacttctggttttgtgatatatttaaaatatattgtggttatttgcaaactgttaatctggctaatatccagcttctataaggaacctaaacaattcaacaagcaaaaaactaaataaccttactaaaaaagtgggcaaaggacatgagcagactgttctcaaaagaagatatacaaatggccaacaaacatgaaaaaatactcggcgtcactaatcatcagagaaatgcaaatcaaaaccacaatgagataccatctgacaccagtcagaatggctgttattaaaaaggcaaaaaaattaacagatgccagtggggctgcagagaaaagggaacacttatacatcattggtgggaatgtaagttagttcagctactgtggaaagcagtttttaagtactttgttagagtacataaaaaagaactaccattcaaatcagcaatcctgttactggttatatacctaaaggaaaacaaatcattccaccaaaaagacacatgcactcataggtttattgcagccctattcacagtagcaaaatcatggaattaacctagatgcccttcaatggtgaactggatagagaaaatatggtacatacacaccgtggaatactatgcaaccatagaaaaaggttgaaatcatgtcctttgcagcggcatggatgcagctgaaggccattattctaagcgaattaatacaggaacagaaaaccaaatactacacattttcacttaaaagtggaagctaaacattgggtacacatggacataaagatgggaacaatagatgttggggactatttttatggcggttgagaaagtagcagctgtcacatgccaaagcactgtgcctggcatccccattctaatccatagtagctttgcctggggttttaatattagggactagcctggttatttgggggatattgtttactattgtccattggactgactctaacacttttgctgttttctgtacacctagttctatgctagaccctgtagaaatacgtaagtcaaaatcataattcctgccaataaactcccacttgtttgaaagaagacaaacatgaaagcattgtaaacggtgaaaagaccaatgactttagggattttatgatcatatcttcattatctgttcatcactaaatctgtggccttgtacatttaaactcactgagtctatttccttatctgtaatagaggatattaatatcagtcttataagatattgccatgatcattaacacctggcacacagaatacatttaacaaatggtgtctgtcattatcatggtggtggttataaaaagtgatacaccattggaatacaatgtagttttttacaataacttacctttttctttgaatattatgataggtgcttgactcagtctttgtgctttctcccttttagagatgatgaagagaaaaaaaagtctccctcagaaagtactgaggagaaagctaacggaacacatccaaagaccatcagtcgtattggaagtactactaacccatttttggacattcctcatgatccaaatgctgctgtgtacaaaagtggattcttggctcggaaaattcatgcagatatggatggaaagaagagtaagtatcatgcgttgtcattttctatttcatttattttatctttatgctcaaaatttaaagggaatttatctgaaagtcaaggatgaaaaaattatgtttatctatagacacattcttgaaattggataaagcctctaaccctaaattaaaaatccaatgtggcacctgctcttctctaagcagaattatagaactttagaaagggagaactcctttcaatttattcattctctatccattcatttatttagtcatggcttcaacaaataatactgactacctgctgtgccagccaccagaaatacagggttgagcaggagggacaaggtttctgtcttcatgaagtttacatttctggtggttgagggaaaggttgaatttgcaacgcatagaaaaattaatggtgtaaggtcccagagacaaaggatggagggagggaattcatatccagtacatatgtggaatgactcgcctttgagaaggtggacaggtgagatgtaggagagcatagtataattagttttgggaaattgaaggagcctaattggatggcttctgatttttctgtgaagtgtgaggcatgattatcttgatcaatgatggtgtttggagtttgagaagaatagagcatgcttatatagttagaataatctttgcagagtgaaatagcaatttgatatacttgaacagagtaagataaggtgacatgtttgctcagaattatctttggggtgaagagatggatagtaccactgtttctatctgtagctggatcctttttcttaatgtgttagcatattctattagcttacatggagagaaacattgcagtggggtggctttgacatggacttagcaatgctgaacaaatttcttaatgttcccaagttctttaagagtgcatccaccatatcttctgtgcaccttatatactagattactagactacttaattttatcccacaacattgtatcagaactcactcatatagttgtgacagcaagtgaatccatcttagcaaaagggcacacctgaagatggattgtcaccaggacgtactctccatttctatctctgcatgattttttgtgtcagcattattctttggaatgaggtcctttatacatggttattagcagtgctatagatcacgtgtttaattttgacaccaaagaggattgttcttcttccctaacttctcatttagtctgttctaggacaggattctgacttgtatcactgagaggatggaatattgtgattgacagcccccacttgcttgcaatgacagtaagaatgagatactggtctcagagaatgggagttcttggcacacaaagcaatagatacccatttgtttctttccagtgtgcagacacacccttcttcatacattgaataatacttttgccaaacattgcagttttccttttacaaccacaaatataccatctctctgtaacatgcctgcccaactgcagcttctgtctccaaggctaagatttgttgatagtgttcattcccctcagtcaggtatggatggcactgaaatctataggctaagtgaaaaatacgaaaataccgttgtcccttaatatctgtaggggattgattccagggcctctgacaggtaccaaaatccaaggacactcaagtccctgatataaaatggcatagtatctgcatataactgatgcatatcctcccatatactttaaactgtctctggattacttataatatctaatactgtgtaaatagttgttatgttgtattctttggggaataatgacaaggaaaaaagtctgtacatattcaatgcagacagaattttagagggaatattttccatccaccgttggttgaatacacagttgcagaacccacagatatggagggttgactgtatctgacatacctcacataaagtactagagaaaaaaaaaagaataatttcaattcaagaaaagtcaaaaaggggaagtataacagctatcacttattcggagtatttactacttcctgctagacaggtatatagcacagttaacccatgtgagcatcttttcattgattcatttcctagcaatggattgacttaattggttagtttattccaaagtcccagattctactgataaaattttccttgtccactgttttcctggacccagtggcccaggaaacctcctctattggaggattctccgggtagaagctcttctccctcagcggcctaatacatatgaatatagatacagaacctgaggattgcttagcagttgagacatcacagacaccttgtaccaggctagaagtttttctgccattgtatctcctttaaagccttagttaactgtcttgagaatttctgattggtcaaggcagttttaagtgtcatggggcttttgtctttgtagcaagttaggaagttcgtcctgctttccaaaggaacctgcctctgcttgtttctatctctgttcctgcctcagaaccaaagggaaaatatatggatgggttaagacgtgcccatctccaggcttctttcctgtcagttgctttatcactggaggacttttaacctctgtttttccatggggctatcaggaggagcgtggaagtttcagctgcctttaattcctcaggctcttcctggatatccccatttcaatttcccaaggtttccaaatcacattaatgttagcagataattcagccttacaatccagaatgtgcatggtttctaataatttacaaaaactaaaattcaccaatttagagtatatagtttgagttttgaaaaatgtatagttatataatcatcaacacaattaaaataaataacatttccattacccagaaaagtttaactgtacttttggcagtaattgcttctcgtattactcccatcctatgacggttatgacagatgattatctgtctttgggccctatacttttgccttttctaaaattgcaataaatggaatcatgggactgctttgtgtttggcttcattcacttagtgttattctttgcagattcatgtatattgttaggtgttgtgtgaattaatagtttctctcttcttattgcttaataagtattccattatttggatatcccacagtttattgattcaccagctgagcattctggttgtttccagttttgaactgttataaataaagcccctatggacattcacatataagtttttgcacgtacatatgttttcatttcttttcagaagttacctaggagtaaaagagtaagattgcttcaccatatgctaaatatatctttaactttttaagaaatttctaaagtttctatatcattttgcatcccttatacctatatatattatgtcttcctgatgatttgacccctttgtcatgaaatgacgtccgacacccctggttatattccttattttggagtctactttgtctaatattaatacagccactttagtttccttcatagtttttgcatgctatacaaattttgtttctaactttttattgttaatttatggttgtgtctttaaaattgctttctattatatggaatattggtgggtctcgctttttattgtaaatcacagtatctgtcttttaattagagtgcctataccatttacatttatagtagttattagtatagttgactttaaatctgccgtcttactgttggtttcttatttattccgtctggtcttttcctttcttgtgtaggattattttttgtgtgtggttctgttttttgtcactattggcctgtttgctgtacttctttaattattttagtgtttgctgcaaggtttacagtgtacatctttaatttgtcacagttcaccttcaaattgtactgcttcatttatggtttgagacccttatagcaagttaattccccttatctcttcctagcctttgtgatgttgtcctatattttaattctatgttctaaaacttaaagtagttcattgttaatatttttgctttaagcagaaaccttttttttacttttacccccacataactgctgtcaggaatttttctcatgttttatcagtgtgaaaatatctttattttcaccttaattttaggaatgtatattcactgggtatagaatcctttggcaggttgtttttcctttcaatacttaaagatgatgtttcatttttccctgccctgcaggatttcagacaaaaaaagtctcctatcattcttatctttgttcctctgcacccaagatggctttttctgctactatgaatgctttcaagatttttctatctctggttttcatcaattttattatgtgatgccttagtgtgattttctttatgttttccttatttggtgtttattggggttcttggattcataggttcatgtttttttcagccattatttcttaaagcctccactcctgttatgggacttgtttgctatatgatactcagtgctatcccaagggtttcctgaagctctttccaatatttttaactctttgtcatttcagtactttatttgatagtttttattcttcatttacttcatttttcatttcataatcagcatgtttatctttgaagttcaacttgggtctattttatatcttccgtttctctccttatcaggttgatgtttttcttcatgtccttgaatatatttattctgtttataattgcttttttaaggttcttctctttgataaccttcctttctgtcgtttctggaactgttgcattattttttttctgctggctttagtcatagttggtttttttttcctttttctttgcattccttgtaatttttgagtgccagacattgtgaattttccatttttcaggtgctacttttagttgtattcatctaaaaaaaacactggattttctcctggtgtgcgggtaagtaacttgcagattaactgaattctttagacgcttgcctttaccctttgttctggtggatccagagcagtctttattctgggacttatttaaatatttccattaataaggcattcttgttcttcttcagcctctttccaatatggcatgtattacacagtctatccactctagctgatgaaaacataaattcttcttagccctgtgtgagcccttgaaattgtccatcccactactttatttttcccatgccttgaattatttcctttcactagtgctaagatcgatgctacagccaagagcagagtatcctctgcaggtcttcagaaccatctgtttttgtaactctcccctctgttttacgcagctctacaaattctagccctctcagcatcactaaactcctttcttatctccgcatcactaaactcctttcttacctcctcaactcagcatgactcacaggctctgtttaggtaccctcttccactgttggaaccgagactctttctctaagcagtaagccagtcttaactcatttgtttctttctcttcagaattataatccaatgttttctgttttgaaatgtctaaaaagttttgttttatatacttacatagactttttaagttattatagtagggcagtttctatagcagttactgtttcttgggcataagcagaactaagctgattcatgatcccttttgttaagaaacgtctttccagttgcttcccgctttaagacctaatatttactgaactatgaaattaataaggaattctaagcattcaagtaaaagcaaacagtttagttatatatttggagatgtagaaaagctttcgtttccttcccgtctaatcctgtctcccccaccaacctcatttgttggattttcaatcatgtctggttgaacaggtttatctaactatttggctgctgctccttcttggaaatctaccagaatgccttaattgtttctgaatgtttttgccttcttcttttgagagatggtcactataaacaaattagagaaatgttttatagtaaggacttacacaacctgctataaaacacatcactttttatttacactacacagaaaaaaatgaaaacaacagtggagctttcctggaataggagctccaaataattctgagaatcctgaatgctgttttttggacacaaaaagtagatacttattttctaaatacttactttgattaagcatggtcactataggtagacctatattacatttgtatgtaaatttaaacctggccaggtgctctgatgacaaatattacaaaaagtgttttataagtgaaaatttgaatcaaagctgcatggaaaggttattttgttttaaatgctgatacacttgtctcaaatggaccatttatttcactcaagatttggtgtcttttttttttaattaactttaaacattcagtttgtcagactgcatccatatttttaaaccttggaggttttcttcattttttgccttttaaagttatgctcagttcagaaattctgcctccaggagacaaattgttgtacctatcttagaagtatgtatttttacaaagacctattaaatctgacattaagggaaagctttgaaaagtcaaatttggaaaacaaaacgcatctcctgggttttgtcagatacaataaaaaacaaaattcagtataagctcttagttttctcaatatgatgtaacatacttgtggaaatcaagaaagaaactggaaacaacatacccaaaatataaatgatctacacaataacaatagtgataattaaatgattgctaaatattagagctttatcctaagcatttcatgcattaatacatttaatcttggtcctataaagcagatattattattgtcctcattttatacatgaagacactgatcctaagcatcttaaccaaggatgtagtatagaatagcagtgtatctggtggaacaaaaatctgattataccaaactaatagtagcatattgttaaaagcaattccgatgagaaaatatgcttatgaaatgtttaaattctgcattttttgtgtagttgggacagtctgtcactgtgtagcatgtatttagataactggaggtctcaagctagggacagtgaagcctgaacatttcttttacttggccaacacagtgctgtttaaacactgaattgcctggatgtaggcattttctggttgaccatagttttcacagctccctgtagccttataccaaacttcctcatacattaagggggagaagtacagtagggccatgttgacattttccaagataataagacatacagataggatgatgggttggaaaagagaacccagaagcagcagtctccagtgtttataaaaatttgatggatgatatagaaagtaagtcagataattagaagcaaaaattcttccgtaatttatgttgagaagtgtgtgtgtgtgtgtgtgtgtgtgtgtgtgtattccccacctcagttctaacacaaaaaccagtttcacgtagattaaagataaaaatttgagaaacaaggttctaagatttttagaagaacatgtgggacagtaacttcatgacttttgggtagaaagtgaattcttaagatttataaaagcagctgggtacagtggctcacacctgtaatcccaatactttgggaatccaagacaggaggatcacttgagcccaggaattcaagaccagcctgggcaacatagcaagacatcatctctacatataaacaggcatacgtatatacatacatatttacaaaaacagtaaaaaaaaattgatatgtataattacactaaaagtaaagactttatattaaaattgtacttaaaaatgaaagataattcacagattaagatacttgtagcatattaccaataaaggattaggatccatggtaatatttataaagaaattttttttttcattattttttcttttattcttttttttttaatactttaagttttagggtacatgtgcacaatgtgcaggttagttacatatgtatacatgtgccatgctggtgtgctgcacccattaactcgtcatttagcattaggtatatctcctaatgctatccctcccccctccccccaccccacaacagtccccagagtgtgatgttccccttcctgtgtccatgtgttctcattgttcaattcccgagaaattttaaattacttataaaaaatacaactcagtagaaaaatgggcaaaaacttgaagaggccatgctcagaaaatgaaactgagatgatcaatacatatatgaagacatattcaaccttattgatattcaaggatattcattaaacatatagtgaaatgtcatttcacatgttaccttgacaaaaattaaaagaataccaagtgttggtaaggatttggagcaatgggccctcttctaccctgcaaaagtattagtggtatcatttgtacttcagaaagcagttggcaataataaagttggaaatgtttattcttatatctcagttaattagtcataagggtgtatacacctataaaaactcttagtgttacagaagtcatgtttatagcaacattataatagctcaaaatttaaaaacttaaatgtccattaataagagattgaatggattttgtatatccatataattgaaaaggaaggagctagagttccacgtatcaacatggaggaatctcaccagtggtaatgttgaatgaaaaaaagcggcttgcagaagaatctgcacgtaagataacatttgaaagcatgcaaaacaatactatttttagtaagaatacattcatatattgaaattattaaacatagaatggttgttacttctggaaaggagaataacaggcagtcactgacaagtacccagtggtttcactatattgataatatatattttttacatttggcggtagtacatgtatacctactttattactcttgataaccttttgaagtcttatatgttttacaattttttttttttttttctgagatggagtctcgctcagtaacccaggctggagtacagtggtacatgcaattgtagctcactgcagcctcagacttctgggctcaggtagtcttcccacctcagccacccagatagctgggactacaggcatataccaccatgcccagctaattttttttttttcctttttcttttttttttttttttttttttggggagacgggggctgactatattgcccagactggtcttgaactcttggcctcaagcagtcctcctgccttggcttcccagagcgctgggattacaggcataagccactgctcctggcctataaataaaatttttaaaactcaatagaacatctgattgcatggaaaatttagaaacatataaggatgtttttcttaaaatctgcacaggaaaattacaattagaaaactcagtaaacaaaaatccgtagcgacagaaaacggtgaccagacacagtggctcacgcctgtaatcccagcattttggaaggccaaggcaggaggaccgtttgaatctaggagttcaagaccagcctggaccatatggttatagctgtctctacaaaaagattttttgaatgaaaattgaaaagaaaaaatgactttgtgatcgccatcattatagcataattaataatttaaaatcttaccatagtaatagaattttggttactcacatttagatatgtgaaagatttaattgtggtacacattaaaatataaatattgtgcaacttgaacctgtaagagtacagatgatagaaggtgggaggtaaaactggatagaactaagagggagcagggagagagatccgttaagctcctcttacagagaggaagtcagaagatgctgcctgtactggagaaagaagaaataatgtcagtcattatttgtcaaattaatacataagaaagtggcaactatgtgaggtgaaaagtatgtcagttagcttccttgtggtaattatttcaccattcatatgtaaaaacatcaaattgtacacttatgtacaatttttattggtcaataacaccttactaaagctggggaaaaaatttttcactaaaataataataatgttatgctccataaaactacagaggtaatcaatacagatacaaataaaagctatgtaagtatattgggaagatggaatggcatagttaagtttgttaaattctcatctagcacagcacaaaactgagagtgtgtttacagcctattatgacacagtggtagaagcacattgtttagggatataatgtcacttaacgactcggagaagtaatttgtttcaaaaggtttttttgtaaaatgggaacagaggaggtgggaagaaatgaatcaaaggaggctaattgtgtggacatatcactttaataattttaaaatattttaatcacattcttttatagattctttagtcattgtacagtcctgagattagttctgaatttgaaatattaaaatattcatcgctttttaaggaggtgagaactatgtgtggttcagcttttcaatctcattgtaaatactgtggatacaaggagtggtgtggagcaccttgacaaggttggagaggttcactcactttagagggatttacacacctgcctgtcatcaaaagtttagaaaatttagtcccacatgtcaaatttaagaaagtagaatttattctgagtcatccatactgaaaatagtttataatggtaatgcaggcagaattctttgctatcgtgtaacattgggaacagcgacactataattaagagataataaaagtggaattttttttcccaaaagacagttgtgtcctcctgttagagcaagactctttaagtacaggcaaagccaagcaattattttaaaactaggctaaggttttcccttcccttggcacttggctgttctctggcagcagggtgtgtaacggagcagtttaagatgttaatacaaggccaaacaacagcactgtgagggcagccatgtgaacgcgcaggagcaccttgtcacgtgactctctagttttaatggaatattggctgttttagataggaaataccccattcacaattcaaaatttagactaaaagattaagttctaggtttttacattccgtaatgatggctcatgtctttaaaatccatgctttctggcaataaagtcggttgaaagaggtcctccgccatcattctcatcaggagcaatagtcttttttctgagacggtgtctcactctgttgcccaggctggagtgcagtggcacgatgtcagctcactgcaacctctgtctccctggttcaagcaattctcctactgtggcctcctgagtaacagggactacaggtgtgtgccaccatgccgggctaatttttgtgtttttagtagagaagcggttttgctgtgttggccaggctggtctcaaattcctgacctcaggtaatctgcccttctcagcctcccgaagtgctgggattgcaggcgtgagccaccgtgcctggctggaagcaatactcttgactaggaacaatggaatataaactgccaatcttatagcaccaaaaaatctgtgttcagaatctctgaagtatttttctgaaagaggaatgttcagttttcactgtgcatgtgatttttagaggttattctattttcactgctgactcgttctgtttatgatttcggtttaattaacatttaggagaaagaagaaaataattcttccatccctgttgtggtaatttaatgcagtgtgtcaaattctttaataatctgatgaaaatttgaaattaaaaataccgtactagtttcctaaaggaattaatcatggggataagaatgtatatgcaaaagatgttatcactaatgttaatggaaatatcaaactctgcaaaatgttttctctttttttcttttgttgagacaggtccttgctcactcacccaggccatagtgcagtggtgtgatctgggctcactgcaacctctgcctcccaggctcaagcagtcccccctacctcagcctattgaatagctgggaccacaggaatgtgctgtcacaccccactaattttttattttttatagagatagggttgcaccatgttgcccaggctggcctcaaactactgggctcaagtgatccaccaggcttggcctcccaaagtgctgggattacaggtgtaagccaccatgcctggccctccaaactccataaaatatcttaaagaggtttattctgagccaatgtgagtgaccacagcctggggaaaaaaaaaaaaaaaaaacacaaacccaagaacccttcagtaagtagtcccgagacagtcaggttacagtttggttttatacattttatggagatgagttacaggcaaagacataaatcagtacatgaaaggtatccattggttcagccccaaaaggtgagcatcttgaaatgggggcttacaagtcataggtgggttttagggatggttgagttattggttgagagagttaagctgttgtctgaggacttgaagagtagacaggaatgcttgagttaaggaggctctgggagccacggcccttatcacgtagaagcagcctcatgggtggcagccctcagagaaacagactataaatgtctcttttcagacttttgaggtgttgggctcttagctaatctctcctacatctgggaaaggcctagaaagggaaggcctggctgcatcaatggcgattctccaaagatgttaatttcccccacaaaggacggctttggagggtcatttcaaaatagttcaaagaaatttattttggggtaaaatattgtgattgctttcagggtctgctgtcatgtgatgctataccagagtcaggttggggagtaagccacgttataccaggttaataaaaatccatttagtgaaattttatggttagggtgtgacttcacctttgcctcacatggccacacggccttaggtcttttttttttttttgagatgaggtttcactcttgttgcccaggctggagtgcagtggcgtgatctcagctcactacaacctctgcctcccgggttcaaaccgttctcctgcctcagcctcccaagtagctgggattacaggcacgcaccaccacacccggctaattttgtatttttagtagaggtgggtcagaccttgttggtcaggctggtctcaaactccttatctcagatgatgcacttgcctcggcctcccaaaatgctgggattacaggcatgagccagcataccccagtggccttaggtcttgtttataatctggtatcttattgccacacagagtctgttttgatcagtcttttgatctgcattttaaccgtaatgctggtcagtcgggcctgaacttgaaaaggaagtggatataaggaggtgcatctgaacttccatcccatcgtggcaggcattcagttttttaggtttcttttggtcaagagggggtccatgcagttggttggagggcttaggattttttatttgtttacactagatagacctaagaatttgagctttgaagcaagatagatcattgatttattttttaaaaaacactttgagctcaagcagtatgccagtaatactcttggtgaggaggagtagagatagaggatatgccttgttactcggctgagaactgaattacaaaaggaagttccgtgatatctttggacacaaaggtcatggataagcgtattccaccacagcctgagcaacatattaagaccccatctctacaaaataaaagaataaaaagttagccaaacatggtagcatacgcccctagacccagctagtcagggggctaaggtgggaggattgcttgagcccaggatgttaagtctgcagtgagccatgattacaccactgcactccgtcttacaaaaatagaaaagaaaagaatatcccattagaaaaaaaaaatgcaaaaaccttaaggtgagagcaatcaaatacggctaatacctgttatggtgtgtagtacactgcctggtacatagaaggaatccagttgttattttagttacaaaataacatcattttagaaacagtttaatggccaataaaatgtttaataagtaaaatatgatagatacagcaatagaatttcatcatttgccatcatttttaaaaatgatattgttgacaaaaaaaagccaaagtctgtaaaatatttgaagaggcttattctgagccagatacaagtgaccatggcccatgacgtagcctcaggatgacctgagaacatgtgcccaaggtggttgggttataacctgtctgtatacatttttgggagaccaaagttataggcaaagacataaatcaacacatataaggcatgcattgattgatttagcccagaagggcaggacacctggaagcaggggcttccaggtcatagacggattgaaagatttcctgattgtcaattgcttgaaagacttaagctttatctgaagagttatagtcagcataaataaatatttgagttaagttgagggggtggtggggtggaagccaaggttcttgttatatagatgaagtctctaaataatagacttcagagggaatagatgtcaaatgtctcttactggaccttaaaagatactagactctccagaaaagatttagcaagggagggagattctctatagaatgcagatttcccccactagagacggctttgcagatcatttcaaaatatgtcaaagaaaatgcattttggggtacaatactttgatttcccttaggacctgctatccatcatgtgatgctatattagagtcaggttgaaattggtatcttagtgctactaagagtctgttttgtcagtgtcgggatctccattttagtgttagtgctggtcagttgtgcctaaactccaaagggaggagggcataatgaggcatgtccaacaccccctttctgtcatgtcctaaactggtttttcaagttcctttggaatccccttcaccaagagtagggttcattcaggcagttgggagcttagaattttattatgggcttacaatgtatgatatataaatataagagttttgtttgtttgtttttgagatggagtttcgctcttgtcacccaggctggagtgcaatggtgcaatctcggctcactgctacctgcgcctcccaagttcaagcgattcaccttcctcagcctcccgagtagctgggattataggcacccaccatcacgaccagctaattttggaatttttagtagagatggggtttcaccatgttggtcaggttggtctcgaaccccttacctcaggtgattcacccacctcagcctcccaaaatggtgggattacaggtatgagcgaccatgcccggccagtagaaaagtttaaaattaacaaatataatatctcagtttgttttgcatgtgtgtacatagtaaaatgattagaaggttctatactgtaggggtcatccaggaaaaaaacttccccatcaccctctgaaggttcactgaaaaatcaactcaccaaagccaggtgaatgagagaaaaggtgtacaaatttattaacatgcacacaggggaaaatcatagattgattacacgaccctcaatggagtagagaaacttttaccttataattgaagttacagaaagaatgggggcttggatcaaaacaggttatgaaaagagaggaagatggccgggcgcggtggctcacgcctgtaatcccagcactttgggaggccgaggcgggcggatcacgaggtcacgagatcgagaccatcccggctaaaacggtgaaaccccgtctctactaaaaatacaaaaaatgagccgggcgtggtggcgggcgcctgtagtcccagctacttgggaggctgaggcaggagaatggcgtgaacccgggaggcggagcttgcagtgagccgagatcccgccactgcactccagcctgggcgacagagcgagactccgtctcaaaaaaaaaaaaagaaaagaaaagagaggaagatgaggcctggctagcaaaggtgttcctgttaagtaaatgaaatctcacaagtaggtggtaaaacctaggcatgatgagagcgagaatagatggtgaatgtttctttcagacccttaaagatgtcagacactgagttaatctttcctagatccagacgagggaaggcctcggagaatgcctggccaccatcaatacagattctctccacagatgcaaatctcccccacaaaagatagctttgcagagctacttctgtttgcagggcctctgaaaggccatctcaaaaatatgtcaaagaaatgtattgtagggtcgggtattttggttttcctcagtgaagagcacttgaacgcactggacatctgataaatggaagaaacgtggtctgagttgggaaaagctaagaggccatcgtggagcagcatcacctcaggtgcagtctgtagcagaccgttttctggctcctgcgcgtgagtggtaagccagagccctcgccctgtaatgagggccaggaacacctatcagtaggcaaagcttgaagtcacttttggagctcctaggttggggaaaagcaagtgaggctgttatattccttggagaacagattctgtctggaggctgctcatcagccactttgagttatttttattgaccttcagctgtttttgcccggaggcattttaaagatgcccgtgggccttgggctgttttacaattacaatagcttatttgaattgctagttgtagaaatgcgtgcacagcagggtcttcgctctgtccttccctggcttctggggtgcttcagaggttgaggaaacctgatttgctgtcacttgacaagcccacttgtctgattcagcagttacctgcccttctcagatagactgcgatgatttaaccttacatttattttaacaccctgctcttaaaaggtatgtaaaaaggtctagaaactgctctagatattatgaaaaaaatcatagtatgcttgattttcttgatcaatgttcacacctttcacataaacgaacttatcaaatgttatatataaagtttcagtgctgcaaaagaaaatatcactcaaatataaaattttctttttaattctcagcaagacacgttacttctatatagaagggtgcgcccttacagatggaacaatggtgagcgcatacttggacaagggaggggaaggggttcttatccctgatgcccgtggcccttgctgctgtgtcattcccttattggctagggttagaccgcacaggctaaactaattccgattgactaatttaaagagagtcactgggtgagtgctttggcaggagtcagggcagagcaggttgggggtaattggaatgagttagggtggagcaggtgattggaatgtagggtgcagcaggtgatcagaatgagtcagggtggagtaggtaattggaatgagtcagggtggagtaggtaatcgaaaaaggttgctttacgaggaagttaagtttaaaagtagacggcaaagaattgaacatattgacatattctttgaaaagaaatttagaattcatatctaacattgaatttcaggaaatttttgttatgcctaactttttgaagtgattattaaaaacagcaagttctccagcatattccttcagtcagatatactttatagaattatgaggcctgtgcagtggttcacacctgtaatttcaacacttagggaggctgaggcaggaggatcgcttaagcccagcagttcgagaccagccggggcaacattgcaagaccccgtgtctatgaaaacaaaacaaaaaaaaaattagccaggcatgatggtgcacacctgtagtcccagcttctcaggaagctgaggtgggaggattgcttgagcctggcaattggaggctgcagtgagctgtaatcaccctgtctcaaaagaaaaaaatatgtatatgaaatgtcatttgtttgatagaagtttgaagtcacttgtcacaaatgttcattctttaattaacccatgaaaacccacagtaatgtattaagccttatttgttccttttaagcctgggtgtttactgataccttattcccatattcaatgtcttattggaataatcgaccacagttttattctacctcctcttttctctttaagcatcctgcgttttacctaaaagattaagcactaaaaaaaaaaaaattcccggtaatatttgttgaatgatgccatctacatgctagtttaggacatctgatttttttgggggggggatgggggagaaggggttaatctgctctgtggttgcagcaacaaaccaacgtacttgccttcaaggttttattctaatgctggagaagcttaataaaaactttgtgataagttacacagctgttaactgacccaaagaaaagtaaagtcaaggttaggaaatactgaaggaagcatacacgtcctatgttgcagagagtgattagaggaaaccccaggatgaggcatgtcaactaagaagagatgacaaaccagaccgcaatgcagtaagacaagacatttattgggcccttaggaattataattcaggagacacagatttggctgtaagccaaattgtgttccaaaccaagtgagggtttttcaaaggaaactaaaggattacacaagttgttttgaaggaattatcatgggtggaggcggccggcttagcacaagtccatagttcatttattgttgctgtttaggagttgcagcgctggtgaaattcagctgtttttcaggatatcatggttgtggtggttaggtgcacttcaaagattcaaggcaaggtactgggttgttttgcaaggttgccagtggtgcaggcagccctgagaatggattctgctttagagccctgaactgtagtgatgccgttttctatgtttcacagataacatttgagcagagacctaactgaagtgaaggggccaagtcatggtatctgggagaggaacattctagccatagagaatgtgaggtatcattcattaagattcaaaaaataattctgtgactctagcgttgcaggaaaaaaaacggggttcttgtcacacgaccaggaaagattaggctcgcagacacgtagaagggtgacaagtggaatttattaggcagaaatgaaaaaggaaatacgcatcagcaaagtgagataagagtcctgctaacaggctctccatctcagggattaaatcccaccttaccacacagaaacgagagagaccaggctcctcccccctgcaaacagtgcaaacttcccaaggccccaccccctcctcccaatgtgcagatgggcgttattcagaaagaatcatttggggaaaagggtgggcttcatccggaccggcagtctggtttttcatccctcatgctgttttaggcttgaaggcggcatttcgtcaggtgttgggggcaggaggggtccttggctgcctcctgtctctatcactggtgtttatatttttcctgaaaaaaatgatgtagtgagagtcattttgggatttgttgcttcccacacacgtttccggtaacccttagctaatgatgcatgctcttgtgttctgacctgttttccaacctcagcccaagccatgtaaattcttcctgcacgtctagtaatggctgccagtgaaaccgtctcctggccaagtggggaaagatacttgtttttaagttagatctgagcgactctgtggctcatcttttgggtagaaagttctccaacagcttttgtctcttctattgtctacttttattgtttgcattcatgtttgatatctccaatgtcaatacaggacttgggacaaaatgaaaacaataaatatattaatcggagtaaatgtgtcacacttagctctcttcccagttaagggtggtatgtgctaagtgtttctgttaaaaatgcatcagtaggccgtgtgcggtggctcatgcctgtaatcccagcactttgggaggccgaggcaggcggatcacgaggtcaggagatcaagaccatcctggccaacatagtgaaacccatctctactaaaatacaacaacattatccaggcgggtggcgggcgcctgtagtcccagctattggggaagctgaggcaggggaatggcttgaacccaggaggtggaggttgcagtgagccgagatcacgccgctgctctccagtctggcaacagagcaagactccgtctcaaaagaaaaaaaaaaatgcatcagtaacgttaaagcggtgttctcaaacattgacttacaaaaaaaattccgaatacatgaatgaaatgtcaacctgaagtaactgaaagcatcagaatccaattttagagtttattcaagcaagaatctgggaaacatggactccagagaaatgaggccagtgctctgaagtaaaaacttaaggtcttgcttatatatgggcagaaacaaagaaatttagtaggattgtaacttttttttatgtaaggctgctttgtgggttataataatttagttatttttcttttccgtacagcttgtttttcttctttacagcttgttatcatttacttcacaatttaaaagagttcatttaacattccaccttagacaatgtgatagtcatcatcaagtctttgtgtgagaaaggtaagagggaaattaatctgtaatgaagatcaacagttaagcaagaaggggtcttccctgctgccttttagtcatttgcaacattttacaaaacagtgtagataaggaaaaaggctaatctataatcagacaaacaatcagagaagcaaagcttacagcttcctaggttacagctgcctgttaatgtgatccatccaggtcccttaatcacattcccttaaggctctaataaagttccagcaacttagatttaaattgcttattttcacagcttattttcacagaagtgagaaaaaaagtctttctttgtgttttagcatgaaaatttgatgcattttctttagcagacagtatctttaattaaaaaaaaaatccaaaggattgcatatattaactcatctaagtctcagaaaaactgttttatacaggaagaaagtaaagcataggactggctaagtgacttgtccaaggtcactcaggtgaagccagtatctcaaaccaggttctctggttctaaaatgtgtcctcttaaaaaataaaaaattatgtgttttaactgttgttcttaggctgtcttgctaaaggatgatgatcatttgcaatgttttgagacttccaaaattgggatccacattttgattccatgtcttcctgctaacatactgtacaaaaggtgaaggttaaaagaaaaacctttttttttttttttttccaaaatcctacattaaattacaccctcatttaaagtgttctctaacctctaaatcctattcataagcagaattaatgacctcctccttgttttacctcctggaatccccactgtgattgtcttaggttagtgccatgctaccatttagtttatacagtttatcatgttaaattaactttcattgtttatgttactgcctgtatatgtaaattatttaggggtagggtatgtgtcctaataatcttatgtacccagattaactcaacaacattataaagtaattatggcacatcgtagtagattcattgtatagatttttaaccagagatgtttagattacttgtccaaaagcggagaaatagtgggcatcatggtgtgaataaaatctaagtgcctagctcccagtttatgatactttctggcatttcagaacattttagggtaaaagtcttgagacctcttataggaatagagccacatccagaatgaacagcaccccactagggaacactttgaatagaatattcttccaattctctctttgttttcatttcttattctctatcaaaatatgcattggttgctattatataagaaaaggaaataattttctgggaaaagcaataggtataggttctgttaaaagaaaagcttcagcccaattaaatttaaaggagtttaattgagcaatgaatgattctgaaatcaggcagcccccagaatcacagcagattcagagagattccaaggatgcctcgtggtcagaacaaatttatagacaaacaaagggaagtgacatacagaaatcagcagtgaggtacagaaacaactgggttggttacagctcagcacgtaccttatttgaatacagttcgaacactcagcagtgtatgagtggttgaagtacaaccactgggattggccaagactcaggtattgttacaggtgcatactcctaagttaggttttcaatcttgtctacctattaagttaggttgcagttcatccacaaggactcaaataaagaagtatagagtcctaaggccatatttagtttgctttaacagttcctacaaggctgccctacttttttcctttataaaatagagttgacaaagcatccttttataaaagagaaagactataaggattaagtgattttttttgtaatgtgtaaattgccttaagtgtttcaaagataagtgattaggaatatatagtagtaatagtactgttttagtgctaccacgctgctataaaccagggataattaatactgtcacttgctgaatactggaatactgtgtgactcatagcccagtggtaaattttcctttgctcagcttggacttgattgcttcaagcagtaatctaaaagtgcctgagctgctctattaattaagatgtaatagaatatcttgtgatgcctgaggatattttgtaaaagaaagttagaggttaatatacaggattacccttaacttcacttaatcatctgtgagtctgtcatctatgaacttatttaaattctttgcacatcaattgcagaaagcagactcctccctgcgtgagttgtatcttcaactgtgtcattgattagaacttcagaactcccttcttatcaaggtagcctgtttcttcatgctttaggctacatactttaaggattttgttttaaagatactttaagttgtttagttctatcactgagaaaatagaacagtcttaaaaatgccttgtgctttttacagctagtatagatgatgtctcacttatattagtacagaacttctgctaagtatatctttgttttcaagttcattaaagtgctgggtttattttggaatgccatcattgggattgctttatattgtgaatatctttctccgttaacctcaggaaattcaagatattttgcattagaactacctcatccccacatacctgtttcttggcctggcaggatttgcattgtcggccttcacgccaagactcttggtgaggccctgaaaaataaattacttctcattaatgtgtatatggctaattctctctctctactctgaggggaataaaatggtttttttgtcattttacatggaacaatgggagaatattttcaagacaacagacaggaagtaaagattaatatgttaaatgaaaacaataggcaatgctcatactatgtctttctatccatattatgactttctatccatattatgactttctgatagtaaacatgaggaaaaggaaaaaaaagatgatcagggcacccagagagatgagtggtcaaaaaacaggacaagattttgatgtaggaacaaatgctctgccatttgaatgaaatagaaaattggaacagtaaaatcttaaacacaatccatttccagttcagttgagaagaaaagttggagagtatagcatgcaaatataaacttctgcatgaagcttataccttttggtggattaaaaaaaaacttttctggcataaatccattattactcgttaatgaatattttattgtttagaaatattttatatcttcctctttatgaaagaggggtgatactgtcttttcattccccgttaagcatttcacttttacaaaaatcagtggtaataactaaagccaaaatattattcactgtactttatatttccaaatatgtttcttcaaattagtaataaagagaaaataataactggtttgtaatatttaagattcagtgatggctccaatatcacccatctttggaggaactgccaatttttctattgcagaaatgtggtcttcatgtgtatgtgagtttgactcagaataacgatcacagcagcttgttggtttcattcacttcttaatttcacccatactggtcaggaagcagcccccaagccagagctgatactcagagactgtgtactggtacagaccatttactgtggatgtcccttcaatctgactggaacagtgcttttcccaacagctcaaggtagctcctgaatcaactcttaaataattttttttttgagacaggatctcactttgtcacccaggatagaatccagtggcacgatcatggctcactgcagcctcaacctcctggactgaaacagtcctcctacttcagcctcccaagtagctgggaatataggcatgcatcagcatgcctggtgatatggtttggctgtgtccccacccaaatctcatcctgaattgtagttcccacctggtgggaggtaatttaattgttgggggccattactctcatgctgttctcatgataatgagtgagttctcctgagatctgatggctttataaggggcttttcccctttttgctcggcacttctccttgctgctgctatgtgaagaaggacataatcatttccccttctgccgtgattgtacatttcctgaggcatccccagccatgctgaactgtgagtcagttaaacctcttccctttataaattacccagtcataggtacatctttattagcaatgtgagaatgtactaatacacctgacttcctttttttttttgttttgttttttttttttgtagcagtggagtcttgttatatgctgggattacaggcgtgagccaccgtgcccagcctcagctcttaagtaattttaatatcactcctagatcccagatttatccaagacattgcctcccgaatctagtttagctggcctttctctgtatggaaaccagagtgaaaacgcccagtgctatggagaaacaagtgctgccggttcataggaggtgagaggaaggtggtcataggttccacatctgtgagatggaggttataaccgtggatccctcatagacttacgggcttttgtttatacaggtcaaatcttggaacagtgcctaaaacagtatgtgttcagcaatcatttgctgtgctattactacttctgtaattattagtaatattagataactattctgcagaaatgtggagctgggagcacctgagggggcaggcacagagactgtgcctctgttctgagatctgtagtcatgagcagggatgcctttgaaggtcctatagttgagtgagattagagaaagtacctggttatatttccctcttatctcatcatctctcttcctgccttcagtgcccacctcacaggagtagcagaccgaccactgcaaagaattgtcacctggatattttctatttcttaatgtatctttagaaaatatttacttaattgtcctgtacagtagctttgaaatccttagatgggtagcttccttgggggcatactctacctttcagaattgtaaatatagttaataatgggggcataaaatataaaacagagacaataatacctacctgaaaagattgtttggaacacatagaacgtataggtataacgttagcccaacactcagagtgctgcagtgtaggtgcttagttaatgttaatgcctttccctttccttccattttatcttaatgtatcgtatgcctctattcatgttctggcctttttctcttatctcacctactgtaataatttccttactggttccccttgttccagtttctctccttgttctcactctgcaatatctcctgcatcctgctccaaatgaattcttcctagataacaaagtttgtgcataaattcttcccttcttataaaaagaaggaaagaaaaatgcaatagagaatctattttttgcaatgtgatggcctacagattctgaaactctcccataataaaacatctaaaactgatagatgaaatatttttagataacttttatctgaatggataagcctgtaacaatgaaagggaaatcctgttaggccaggaataaagcatgagtacaaatgtggggaggtggccaaccctggggatgctaagccttcaggacatttttggatctaggtggcctaccagtactgaagataaaattacacagcatttagcacacaagtacagagagatggagaatatgaaagagtgaataagtcacaagtggaatgaagtgagaagttagaatggagtgtcaggttacaatcatgaagatgatagaggagagacattattcaaagttataatgtctacaggtttttcaaaataatacacaggaagctcaaagaacagcagtctgtgtaaattaaagaaacctgtgcttagacatagcatttagactcagggtagaaatctgtagtagtccattctcacactcatctgaagaaatacccgagactggataatttataaagtagtttaattggctcacagatccacaggctatacaggaaacatgatgctggcatctgctcagtgtctgggaaggcctcaggaaacttagaattatggtggaaggtaaagggggagcaccacttcacatggccacaggagaaagagaaggggggtgctccacacttttaaacaaccagatctcatgagcactcattcactatcatgagaacagcaccaaggaggtagtgctaaaccattgatgaatcatgatccaattacctcccaccaggccccacctccaacactgggaattacaatttagcatgagatttgggtggggacacagatctaaaccatatcattccgccccaggcccctcccaaatatcatgtccttctcacatggcaaaatacaatcatgccttcccaacgttccccaaagtcttaactcattccaccattaactcagaaatccaaagtctgaagtgtcatctgagacaaagctagttccttctacctatgaacctgtaaaatcaaaaacaagttagttactcccaagatacaatggggatacagggattgggaaaatattcccattccaaaaggaatatatggaccaaaaaaaaggggctacaggctccatagaagtctgaaacccagaaggccagtcattaaattttaaagatccaaaaaattgttatttggctccatgtctaacatccagggcacactggtatgaggggtaggctcccacagcattggacagctctgtctctgtggctttgcagggttcagcccctgcagctgcgctcatgggatggcattgactgccttcggtttttccaggcatatatggtgcaagctgtcagtggctctaccattctgaggtctggaggacaatggcccttttctcacagctccactaggtagcaccccagttggaactctgtgtgagggctttaaccctgcattagccctccacactgccctagtagggaattctccatgagggctccaccactgcagcaggcttctgcctgtacatccagacttttcatatatcctgtgaaatctaggtggagactcccaggcctcagttcttgtcctctttgtagccacaggcttaaaaccacatggaagccactaaagtttgtggccaacatgctctgtagcagcagcccaagctgtacccaggcccctttgagccatggctgaacctggagaagctgggatgcaaggagcagtgtcccgaggcttcacagggcagcagtgccctggctctggcccatgaaaccattcttccctcctaggcctcgagaggggctgctgtgaaggtctctgaaataccttcaaggccgtgtccccattgtcttggctaatagcacttggcttctttttaatttatgcaaatttctgcagtctgtttgaattcctcttctgaaaataggccttttttttttctatcacgtggccaggctgcaaatttttcaaacatttatgctcggcttctcttttaaatttaacttccagttttaggtcatttctttgctcacacatatgagcataggatgttagaaacagccagaccacatcttgagcacttttcctgcttagaaatttcttctgccagataccctaaatcatcactctcaagttcaaagttacacagatccctagggcaaaggcacagtgcaagccatgttctttggtaaggcataacaaaagtgacttgtactccagttcccagtaagttcctcatttccatctgtgtccttgttagccttgcctttgctgtccatatcactgccagcattttggtcataaccattcatccagtctctgggaatttccaaactttcagtcatcttcctgtattattctgagccctccaccctcttccaacctctgatttttatccagttcaaaagtagctttcacattttcaggtatctttataagcaatgccccacttgacagtaccaattttctgtattggtccattttcatactgctataaagaaaacctgagactgggtaatttataagaaaagaggtttaattggctcacgggtctgcaggctgtacaggaagcatgatgttggcatctgttcagcttctgggaaggcctcaggaaacttacagtcatagctgaaagtgaagggggaacagggcttcaaatggccagagaaggagcaagcaaactgggcgaggtgctacacacttttaaacaaccagatctcacgagcattcacttactcagtgtcacgagaagcggatggtgctaaaccattcatgagaaaccacccacatgacccaatcacctcccaccaggctacacctccaacactggggattgtagctgaacatgagatttgggtgggcacacagatctaaacactatcaacattgcaacaatggtgttagccaaaagatagtgaaataatgtcttcataagaaaaagcagttatcaacttggaatttttaatgaaataaggacatttattatacaaacaaaaatagaagattggccaccaaaagaccctcctcactaaaggaacttctaaaggatagacttcaagaagtaattgaaaatggcctccaaaaagcaatctgaggtacagaaagaagtgatcaataaagataaaagtaaacattaaactgacagtagcatgttatagaaaaacaatgatgcctgtttcaatagcattaaaaaaaagaaaagccaaagtaaggttagaggcagattgttggaatcaaaaccctaaaagcttcttgtattttcaagaaggaaagcaattgattgtctttggaccttaagtatgcacagtaaaaactgcagtgaaaagatgggctcacatgtaaaatggtgtcttttaatcaaactcagtaaacactttctcacggaagatacctggatattaaaggatgtcagcctattgattccccacagcccttgtagttaaagcctgtcagttgctgcattaggtttcctgtcagtaatcttttcactcttcctctcatcaagttcattatgtgaagttacaactctttacggacctctgtgtgtttaataaaacacacgtgctgtgaaatcactttaactccttctacagtcctcatgatgaggaccagtgcttgtcattcattagcatccagctcattgtgttttgcttgaagagcctcaccaagggtccagtggcaacagcggcactgtatgtgtggttgtcaaatcagagcagttgcacctgctctagagagccttcccagcccactttagtgcacagtagtcccttcttcccctgaattctgcttgattgcacccatctgtctcacgtaagatggaagtatcaatagtaccttactcttagcattacggtgtgagttaaatggattaataagtgtcagagcacttagagcagtgcttttatagcacaccaactaaataccgttgaataattgctccctagttatctttttgggaggattataggttgtttcatccatgtgttagattactaaattgtaactggccaaagataaggttaagttttatacttctgtgggaaatagaaaagtagactgcagtaagtgagtacaataagtaagtcagttactaagtaactgacttagtgggcattagtcactcatgggtgacttttaaaatcacatttcgcttggagagctctttggaatctctttgtagtaggcttagtgtagtaatgagaaagagctgtttaaaattttgtaaacatgtacttggattaattgatctactgcgaaagtagaaacgtagatgtgtagatttttgaactaaagggatcgcaagatgccaataaattagttttagggctcggggaaagcctttgtacttcaggacctatggctcttctgttaaaaacaaaaatattttctccaggttccattccagcattagccaatgctttgccttcagttctaggaattacccacattttaaaatgaagcaaaagtacagcagtagagtgacttgttaggggctggtgggtgggaggatagttttcagaccaggtgagattgtgaaggggctggaaaccagctggtctgctttcaagtcaggtgcctcctgcacactgtgccacctgaggccctgctctgcagcagccctctcagccctggtctcttctgtgtgcgcagtgctcatgttggcagtatcagaatttcacatctattgaacaatgtagtgaatatttattttatatgtgatgtatggttatctgtttatcttagttgcttttttgctttataacggaaataatggtatgcttttttttggttatatgtatttttagtatacctttaagcctcacctagtggaggcagaagggatgatatttattatctcccttggaaacctgcagggtggatattttgaatcctttcttgccaggtggatatctcagcatggtgttggcaggattgcctgtgttctgtaagtggctattcacctagttccaagtctaagaattcttgagtattcagtcaaaagagatttaaaggatttggttgacaataatgtactttctaatgtaatcaggtatccaggttaaagacagaccacagacagccacatgtttgatacaagagcatgagtaaatggctctccctgtctatttcagcagacatgtttagaaaaatgatattcaagcaataacattttccagttatagattttaattgtattaagataataaatcctaaactgttttgctaatctattgctttttgctttagaacaatttgtaagagtttatacaagtcagtagagaattcatatccagaaaaatataaacagaagaaatctaaggacttctgaaataattaattattttggataatttgtatgattgtgtttaatgtctgtcttgcagtatactcgatttggtgaattctaaagatgaaggatacctcctgtcaagtcatacatagtctagtgaaagagacatttagacgaaaatagtacattacagcaagatcctcagtagagatatgcacaggttgcaataggagtaataacatttaaacttgcactctggttgaggggggtatgggagaaatgccaaaagtggtcctttcatattctgagactacttcgtgatttctagagtctctgaagaagctataaaggctctggtacatgagctctttaagctttctcttggattgctatgtatttccagtatgcttcctgtgcttacccagtctgttgtcagccatgctacctggtttttcagccttctactcttcctagttgtgggaccattagcaagttattgccttgtgtttcagttttgtaagaagagagaaatagcaccaacctggtaggagcattgtaaatattaagatcgtatatggaaaacattttagaatgccgcctggtacaccataaggctcagaaaattttagttcttattgttattactttcggtagctaggtagaatattgaaacactgtcaccatgttgatcatttagattctctttctaaaatgctgatgtcaaataaaattttacattttttccccctttctagctccaagaggaaaacgaggatggaaaaccttttatgctgtactgaagggaacagttctttacttgcaaaaggtaaaagtaaagcagataaaaaatccacaaaactcgatgaaataattacatgaggtccagtatatgtatgtacggtagtctcccttatctgtggtttcactttctgcagtttgtttgctgatgttaaaaaattttcagcggagaattccagaaataaacgattttaagttttaagttgcatgctgttctcagtagcgtaatgaaatctttctcaatcctgctgcatcctgaccagctgtgaatcatccctttgtccagcatagccatcctatatatgcccatcctttaatcacttaatagacatctctgtgatgacatcagctgtccagctatcgcagtgtttgtgttcaagtgacccttattttacttactagccccagagaacagtgatggtggcatattgttatcattgttctattttattattagttattatggttaatctcttactgtgactaatttataaattaaattttatgttaggtatgtatgtataggagaaaacatagtataccgtcatccctccatgcacacaacagattggctccaggacgccccttaaataccaaagtccccacatactcaagtcctgcagtcagccctgttgaatccacatataagaaaagttggcttctgcatactcgggtttcacgccccacaagtgccatattattagtcctcatttgatggaaaacagtctgcatattagtggatctgtacagttcaagcccattctctttaagggtcatctatatatagggtctcgtactattcaaaatttcaggcgtccactgggggtcttagaatacatcccacatggatagataaggggagcctactgtagcacatattctttattcatcgttcagtggacacttaggtcgtttccaccttttgtgagtaatgccgcaatgaacatggggtgcaaatatctcttcaagatcctaatttcatttcttgtggataaatacccagaagtgggactgtggggtcatatggttctgttttcagttttttgaagaaactccatatggttttccaaagcaatgtaccattttatacctgaacaacagtacataagggttccagcttccccccatatatgtgttgaatttgtctgagctctgtgttccattctgttggtctatgcatgtgtctgtctttatgccagaaccatattgatttgatgttgtagcttggtaatatgttttgaaatcaggaatgtgaggcctacagctttgttcttctttttcagtatgatttatggcttattcagagattcagagtcttttatgattacatataaattttggaatttttttttctttttctgtaaaaaattccactgggatattcacagggattttattgaatatgtaggtcgctgtgggcagtatggacattttaataatgttaaatctttgaatcctgaatccctgaagatggaatgtcttttcatttatttgtgtcttctttaatttctttcagcagtgttttatagttttcagtgtatatgtcttttgccttcttgatcatgtttattcttaagtattttttaatagtttttgatgctgttgtaaatggtattattcatttccttttcagattgttcattgttagcatatagaaatggaactgatggttgattttgtatcctgcaactttgctgaatttatttattctaataggtttttggggaatctttgggttttctacatataagatcatttgaaactgtatctgttttgagggtttttcaaatcatgaaaggatattaatatcatcgctttcctgcatcattgagatgtttgtgtaatttttatcatttgatctgttaatgcgttttatcactttgactgattttcatatgttgaaccacctttacatcccaaggataaatctcacttggtcattgtatatgatccttttttttttttttttttttttttttttattatactctaagttttagggtacatgtgcacattgtgcaggttagttacatatgtatacatgtgccatgctggtgcgctgcacccaataatgtgtcatctagcattaggtatatctcccaatgctatccctcccccctcccccgaccccaccacagtccccagagtgtgatattccccttcctgtgtccatgtgatctcattgttcaattcccacctatgagtgagaatatgcggtgtttggttttttgttcttgcgatagtttactgagaatgatggtttccaatttcatccatgtccctacaaaggatatgaactcatcattttttatggctgcatagtattccatggtgtatatgtgccacattttcttaatccagtctatcattgttggacatttgggttggttccaagtctttgctattgtgaatagtgccgcaataaacatacgtgtgcatgtgtctttatagcagcatgatttatactcatttgggtatatacccagtaatgggatggctgggtcaaatggtatttctagttctagatccctgaggaatcgccacactgacttccacaatggttgaactagtttacagtcccaccaacagtgtaaaagtgttcctatttctccgcatcctctccagcacctgttgtttcctgactttttaatgattgccattctaactggtgtgagatgatatctcatagtggttttgatttgcatttctctgatggccagtgatgatgagcatttcttcatgtgttttttggctgcataaatgtcttcttttgagaagtgtctgttcatgtccttcgcccactttttgatggggttgtttgtttttttcttgtaaatttgtttgagttcattgtagattctggatattagccctttgtcagatgagtaggttgcaaaaattttctcccatgttgtaggttgcctgttcactctgatggtagtttcttttgctgtgcagaagctctttagtttaattagatcccatttgtcaattttgtcttttgttgccattgcttttggtgttttggacatgaagtccttgcccacgcctatgtcctgaatggtaatgcctaggttttcttctagggtttttatggttttaggtttaacgtttaaatctttaatccatcttgaattgatttttgtataaggtgtaaggaagggatccagtttcagctttctacatatggctagccagttttcccagcaccatttattaaacagggaatcctttccccattgtttgtttttctcaggtttgtcaaagatcagatagttgtagatccttttaatgtactgttgaattcagtttgccagcattatgtttagagtttttgcatttatgctcataatggatgttggcaagtagttttcttgcagtactgttttctggttttgatatcagggtcatgctggcctcataaaatgagtttggaagtgttccctcctcttcaattttttggaacagtttgagaatgattggcattagttgtttaactgttaggtagaattcactggtgaagccatctgctcctaaactttcctttgttgggagggttttcattacagattcaatccccttattattacagatccattcagattttctacctctccgtaattcatcttggtagattgtaggtttctagtaatttatccctttcttctaggtttcccaatttgttggtgtataattgttcataacagtttcttagaatccttttagtttatgtggcatcaattgcaatacctcctgtttcatttctgattttatttatttgagtgttctctgtttttttcttagtccagctaaaggattgtcaattttgttgatcttttgaaaagaaatttttagttttattttttcatttctctatttcttttatttctgctctaatctttgattagattttcatttctctatttcatttatttctgctctaatctttactgtgtctttcctgtgctgactttgattttcatttctctatttcgtttatttctgctctaatctttattgtttctttcctgtgctaactttgcattactttatctggtgtaaaaacaggttgtttatttaaatctttcttcttttctaatgttaagtgtttattaccataaacttgcctattggtactgcttttgtttccttccacaagttttggcatattgtttgtccatttttgttggtctcaaattattgtccaatttcctttttgatttttttttgacccattgattgttcaggatcatgttgcttaatttccacatatttgtgaactctccattttccttctgcttttaatttctacttccctttctttgtgattggacaatatatttggtattatttcagtcttcttaaatttggtaagatttgttttgtaacttagaattttatctatcccagagaatgttccatgtgcacttgagaagaatatatattctcatgctgttgagtggaatgttctgtatatgtttgctaggatatttggtgtattgcatttttgaagttctctgtttctttattagtcttctgtctagaagttctgtacattatagagagtggggagtggaaatctcctactattgttaatttctaccttcagtcctgtcaatgtttactctatatatttacgtgccttgatgatagatgcatatgtactaataatggttacaactgtgtggtgaattgactcattattatatgtcattctttctctcttgacagttttttacttattttgtataatataagtatggctacccctctgctctttttgttaccaattgcatgcaatattttttccattatttcatgttcaggtgtgtgtgtctttaaatctaaagtgagtctcttgtagacagcttatacttgggtttttttttctctctctctctgcatctgtccctccctccgtctgtctctgtctctctgtctctctctctctcaatacattcaaccacactcccagctgtgattgggagtttaatccattcatatttaaagtaattatcgatagagaaacactcttgctattttgctatttattttctgtcttgtcacttttttacttcactcttattagtattcctttttttttttttttgtaataacatttctttattctcattttcttttgggtatcttttagggttttttttgtttgtttgtttgtttgcttaccatggggcttacataaaacagttataatgatctattttaagctgataatgatttcaggtcatatgccaaaactatacttttactccgtcacaaattatatccttttgtattctgttcccactaatgtatatttataggtaaagtattttaatactttttttaaaatttctataccagagttaaaagtcatttacacaccactattacaacattaaagcattgtatatttttcctacatatgctcagcactgcatatcagtgattgctgcatttgaattcaaccaacctgagattgaaatattcagaaaaaaaaagttccacaaagtttcaaaaaacaaaacttgaattttctacatgctgagtactatgttgaatctatgccaatgaagtgatgtgtaggccttttattaggtatcatgagtaatctagagatgatgtaaaacgtgtacagaaggatatacatatgatatatgcaaatactgtgtcatgttatgtaagtgacttgagcatccatggattttggtgtccatcaggggtcctagaacaaatctcccacggataccaagtcctgtctctgtttacttttgctattgagctttatactttcttgtttctgtttagcattctttcatttcaagttgaactccctttagcctttcttgtaaggcaagtccagcagtgatgaactctctcaactttcgtttacctaagaaaatattatctttctttcttttgtatatatataatataatatataaataatataatatattatatataatgtatattatttatatattatataatatattatatataatgtattatattatttatatattatataatatatagaatatatattatatattataatatatattatatataataatatatattattatatataatatatattatataatatatataataatatatattatataatatatataataatatatattatataatatatataataatatatattatataatatgtatataataatatatattatataatatgtatataataatatatattatataatatatatataatatatattattatactttaagttctagggtacatatgcacaacgtgcaggtttgttatatatgtatacatgtgccatgttggtgtgctgcacccattaactcgtcatttgcattaggtatgtctcttaatgctatccctcccccctccccccgccccacaacaggccccggtgtgtgatgttccccttcctgtgtccaagtgttctcattgttcaattcccacctatgactgagagcatgcggtgtttggttttttgtccttgtgatagtttgctgagaatgatggtttccagcttcatccatgtccctacaaaggacatgaactcatccttttttagggctgcatagtgttccatggtgtatatgtgccacattttcttaatccagtctatcactgatggacatttgggttcgttccaagtctttgctattgtgagtagtgctgcaataaacgtacgtgagcatgtgtctttatagcagcatgatttataatcctttgggtatatacccagtaatgggatggctgggtcaaatggtatttctagttctagatccctgaggaatcaccacactgtcttccacaatggttgaactagtttacagtcccaccaacagtgtaaaagtgttcctatttctccacatcctctccagcacctgttgtttcctgactttttaacgatcgccgttctaactggtgtgagatgatatctcattgtggttttgatttgcatttctgtgatggccagtgatgatgagcattttttcatgtgtctgttggctgcataaatgtcttcttttgagaagtgtctgttcatatccttcacccactctttgatggggttgtttgtttatttcttgtaaatttgtttgagttcattgtagactctggatattagccctttgtcagatgagtagattggaaaaattttctcccattctgtaggttgcgtgttcactctgatggtagtttcttttgctgtgcagaagctctttagtttaattagatcccatttgtcaattttggcttttattgccattgcttttggtgttttagacatgaagtccttgcccgtgcctatgtcctgaatggtattgcctaggttttcttctagggttgttacggttttaggtctaacatgtaagtctttaatccatcttgaattaatttttgtataaggtgtaaggaagggatccagtttcagctttctacatatggctagccagttttcccagcaccatttgttaaatagggaatcctttccccatttcttgttcttgtcaggtttgtcaaagatcagatagttgtagatgggtggtgttatttctgagggctctgttctgttccattggtctatatatctttcatttttaaagggtagttttgctggatgtaatatgcttgtgtggcaagtgtttttgtttgtttgtttgtttgtttgtttttttgagcaccttgaacatatcatcacagtcacttctggccctggatcatttatgctgagaaatacacagaccaatcacttttcttttgctactttcaaagtcctctgtttttctttgactttttataatttggtcattggtcccagtgtaatttatttccattaatcctggttgtcattaggcttctcgaatctggatgtctgtttccttcctcagatttcagaagtgttcggtaaataagctttgtgccctctttcttctttctgctctttcttggatttccataatgtgttggtctgcataatgatgtgtataaggctctcttaactctttttcattcttatttatctttgttctctgagtggataatttcaaatggcccgttttcaagtttgctcattctttcttctttgttttctgctcttgagcctctcatctgaatttttcatttcagttactatattcttcagcttgaaaatatctatttagttcccttaaatattttctctttgttgatattctcattttgtttattcatctttttttagcttgttgagcatctttacagtgtttatgcaggtaattcttatacctttgtttctttacggtcaatttctggaaattcattttgttccattgaaccatgttttcctgtttgttctgtctcttgtagctgtattgggatctgcacatttgaagaatcagccacctcttccagtatagagactggcttgctacagcagaagcccctcaccagtcatctttgcaacagattttagggaactctgaatcctttttcaggagcccataatccttgcaccctttgatgtctgtctgcaacactgcaagttatctgattttagagcaggaagctacccagctgtcccctgttctaagcagccaccaagtgtatgccatcagttccctgaatcaggagagtcagataccactccctcagatagccctccaaaaagccagaatgctggatgcatactctgctcctctctctctccctcccaagggagaaatcaagtacactaagtgtgccagccacagcaagccacctgtctctctactctgttctaagtgtccttcaggcttccaagctatgctagttctgttagtgctgtgagtgaggtgagaaagaaattagtcccttggggccaagaagagctgaaatgagggccacacactctacctttcttcagccctcccaaagtagaagcttcaggttgaccaccttttctcccaattgcatcaagctgtgctgactgcagcgaaccacccaccactttcctttgttcttagcagtgcccaggtatccacactattgcagttccctcagtattccaattgaaccaagattaagccattacccaggcagccctctgaaaagccagaatagcaaagacctctttcctttcccccatcagagatgtcaggggccagggcattctcttctggtgctgaggcatgctagcttcagggaggggttgatgtgggtaagatgaaatcactcttcttacctgtttcagcgtgggtttcttggctttgtgctctcctggggtactacaacctcttcactggattttggtattgtcttagtaggtattttggtccataaatcattgattactcaatatttttattggggagatgggagctgggactacctattctgctgtcttgctaacagcactcccaggaagagactgtttaaatctatgtggaatcatagtataacacagttttggcgtcttattcttttcactctgtatgttatcataaacagtttcttattaaaagttttttagaaacatttttggttttcatcaatctggtatttggtgactgtgaaatgatatgtaattatggttttgtttcttctgtccctagatcatttataaacatattcatttttaaatgcatgtagtattttttgttaaatagatttatcataatttaacttttcccccactttcagacatactcttttttagtttttcatttataaaataacactgcacacacacacatgcacatatctcttttattttcttaagattcctaggggtgtcatggggcacatggtaggaactgtttacagttctgaaaacatatttctaaattacctccagaaagattatacctaatgtcattccttacagaagtttgtgacaacatgtctgttttcagtgtattattgacatatgggtattcagaggaaaggatctgaaaggattcattttgaacttcttgtttttggtgtttgtccacgaacacatgtccttccactctttacacactgctgtagttgcctttccacacctgtgtttctctggcaaagaggcctcccgtttgatttactatccgcagtactgaatcagatggcgacccctcatggtatgcacgcttgcaccactgagatgatcaactgctttggaatggagactgggaaggaatacatttgatttattgttattttaaatttttcaaaatattataataatgccatatatgagattgaaagaattattcttttttaaaactagccttcctttgtccacccagatctttatttaaaggactttatatttcaactatactgtatcttttttgcttttttattgttgttgttgttgttttctttgcttgtttttgtttttttacaaaagtttatttttaaatgttcaacagattccaagacagcacttcattttagctgtaggtggcaaaatatgttatggcagggaatacagatgtttaagtaagaacggaaggcaaggatcaccatcacctcagacgcaaagaacaacttacttgtggacagatttcttaaatcaaccttttgggcaggggacccttgcccacagcctttgctttcagctccagagtttctttgtcttttctttttgtttctgcttagaagccctcgcctcctcgcccatctccttggctcatttcagggctgcttcttgccactttgatggctggatctggtgcctgccaccccttctccagaccctgccactggaaacccatatctttcattaacattttacatattaccagagcagctttgtaaacaacatttttataattattttttgttttattttttatctgaactgttttcaagtgtccaaattaggaaggaccatatctaacacaaacccttttgtcatcttccttttggaatacatcaggtaaggaatattggagcatggaatgcttcaccttagaccatgatctctttttgggaaaataggctttgtagaaagagatatggagttagctgaaacccaaagatcacaaagtaaatgatttgccgcatccttctaaaattctcacattactttgagggtcatgacaagggagaaatggaggcagttgttgatacttggagattatccatgctcttaggtggctggctatctcatactgtctttattttcctatggagtctataagcttgttttcctgtggagtcctataagcttctagtttataagtcagctactctggcctctgccagatcagcatgtgtgtacatgctgggcccacactggtccttttagctacctttgtctctgcaaggaagaaccctttgaaattaaatttcacatatcacagccatttccccagcataaattccactctcttgggtcacttctttattttgtctaaaatctgtgttaaggggcatagctgcctttggcaaaaccgtttctctgaatacctagccaccggatttccacccactccatctcagggtgggcctgggaagagaacactattctcacattcaacatttgagaggagtgatgccaagaaagatgctgtttcaaaggtaccagcttttcctacatcactgtcctctccctcagataaatgtattgggagtttgagtcatcaagatggagaatgggttagtattgacaagggaacaactttgtaaactttgaagcttcagcatcagcttggattagagctccaagaaggttgcttctccggatttatgatagctctggagtgtggcaaatgtgcatttgggcaaagttgggtgaaattgcttttataaagagaaaagcctggcagtaaggaaattatacatttatgaagagtgaatagtagaatcatgggttattgttcgggttgctatttcagttaaatcataagaatgctagcatagctgtaaactatctacttacaatgagaataagcctgcaaaagggtggccatgtttaataaccagtctccactctcttcttaatgctcttttttaaaaaatcagaactaatatatgttcctggaaaccttgcacagatcctagagactaattcctcaatcaatggaagcttaaacttcatagttctgtgtcttgtatggctatatctacctgattgtgtggtttctacctggttctgtagtttcttcttaatctgtaaaactaaaaactaaaaaggtaggtagactgtacaagaaggaagaccttatgggcatctacatctggaaatgccactccctcttaggttaataggatactgcctgctgctgagcagacttttgcatcatagcgttctttggggtatcgagccatccagcagaaacaggagtagtagatagttaaacttcttccccttggccaggttgtagcatgtgttaagggctaatcctggtgatgtgtgcatcctacagggagttactaatgtcccactgctggttaatccgtccccctggttggaagcctaatctaccagcatgtgatagcagatgctacacaaaaagtaaattatatgattacaaggtggtttggggtttatacagtttgggttttatatcctcccaaagctatttatcacatcaggtactgtgcaaaattctaagcttccaaagacaactaagatacaatccctgcctacacagagctcacaaaataggaggaaaacagataaattgagcattcactaagcaatgagatgaattaatagaggcgtggaaaaatcttactgaagaaggccccctaagcatacttgcaaaggtcagaagatgcctccctgaggaattaacatgacttgaactgatgcctgaaagataagcaggagtttgccaggcaggcaggcgagaaaaagcattttagcaagagaagggtgaaaatagcagatatgagagaatatggcatattcaaagagtggcaaactactttttacatttgcattataggctggagggggagtagcaagcagtagaaagatgatgaaaaaaattatgtttcaaatgatgaaggtatcacgaaaattaaagagatggtatcacaatgtcataaagtgtcccatttacgaaagaactgttttcttccctcaaggaatttcaagctctttgagtgagaggtcattgccgctgccacctatactcaggtactcaaaggacttaggtggcatagtgtcccccatgctaagcagccctcctcacaggacctgtgtggggcatgtgacctgggagtgccatgttgttctccgctctgtgctcttaggatgccagtatttacactcctaggattccagtatagcagaaatgtctctccttcttcttcccttcttcagccaatcccccactatttgggtgaggagaggagaaaaaagccctggcccaaagttagtgtcattcagtttgacaaaagctcactcatttggcctcctgtgtaacaggggctttgccagagatggggatgcaaagatcccaggatccggcgtctatccttaagggcctcactagcacactcaggctctacatccattctctctttctccacacctttctaccccatatacatttctcagcatcaaggaatcctgtccaagggcttccagttaacttccctcctgagtgccctccattttcccccttgcggctgccaacgtctcggccttggggataaatgaggggggtagtactgcctgagacagaaggaaacagggccactgcttccctgattaaatgaatcaaattggtcttcgaaagaattcataatggctggcaattccagccattccggaagtccataatggctggctttgaagaccaccttcccttcattgtaaacacatatataccacacacatacacaaaccaccccctgccccacccactggaataacaatctgtttagggtctcatttcattattagttgctcatcagttactttaagcctttcatcaagacttctcaactacgtaatagcgtataatgatttttacccatatagaacaattcaagaataattcaattcgcatttcttcattacaaatggagagtaatagtaaaggctttccccctccgaaaaacaaataaacaaaaaagtcacaatagtcatcagaaggaaaactaggcacagctgaaattacacaggagcgagtgccaagtcctcacagtctccattcgctcaacctctttcactactcccatcccagccaaagtggcttgttgcaaaggtttttggccactcctacaggaagttgaagcattaataaataatatctcatgcctcttaaggttgtggccgccctgtgtttatgctcccatatgttgcatgcctcctgaacacatgggcacagtgtcggcagcctcttaggtattaaagtaagagctttgttaggctggggatcgctctccccagcttcctcagatccccctaggaaaatatatctcttggaagagcattaaaaggctcttccaaaagaagagtcacaccttgaagagttacgaagagtcatactccagtaagtagacatgccttgtcaaactccaagtctgtcacttaactaattgctgatttggagcagttaattatcctctgcgaacctcaactcatttctgtgtaaaatgaggggaaatgatgttgcatggttgatataaagaaatgattaaatacatgaaaacacctgttgcacagtaggttaatagtaaatattggttcccttcctgacgactcttataagaaatgagagtattttttcttttagtcctttcttgattattagtcatctcataaggaataaagtgtctggtgtggttgggcacagtggctcacacctgtaatcccagcactttgggaggctgaggtgggtagattgcttaagcccaagggttcaagaccagcctgggcaacatgtcaaaaccccatctctacaaaaaatacaaaaattagccagacatagtggtacttgcctgtggtcctagctactcaggacgctgaggcaggaggattgattgagcccaggaggcagaggttatagtgagtcaagattgggtcattgcactctagcctgcgtgacagtgagagcctgtctcaaaaataaaataaaaataaagtgactggctttattcagaccttattttcctcccttttcacaatcttcctacagcagtctgtgtatgaaatgattaagagttaggccttctcaaccatccaaataaaggcccttactttccctggtacctttattgaaaaataagtaatttcttctacctttgtttccacttcagataggagacaaatgcctccataaatcctcctagcactagtgccaggcaaggcagagggcttcgtgttctggagctagcgatgtggcataaacacaggtcaaaaataccatatcaccccattcctcattcccatagacattaattatatatatgacatgacttctacatacttgtcttctagttagagaaattttaccaaagatcagacacatgcctccgctccctctccctctcaccacctcaaccctggatatttagatagtccctttatgaaaaaataagccataggctctacatacccgttccatgtagcaaaaacatgaaacaaataagcacaaggagccccccacctttttgaagagacatttaagagcagtattcccgtattaaagaaagcccacatagccctgcagagcatttctgtatatttcatatctaaaagaataaccactcccagatcagagcattatacatcacaaatgtaggaaacggcttggcagattgcctgagccagcttgcttcattggccatttagccagaaatgagactggtttgttagtataataggttgtaggttacttcttccatctgagcttcacaatctcatagaaggatactgttcccattttttaaattgaaaagctggcgttctaaagttgattaacctactcagtattgtaaagatggtactagccaagctaatatttttcccattagtgtcttcttaagtaaatatgaacactctagtgtgagagccttgtaattactggaagtttaaaatgctgttgtggggagaggtctctaactgttatgacttcacccagcttcaactaacttggccactgcacagcaactgtgcattaactttccttcagcctctgacttgaataaagaatgatggctttgccctttctctgattgcacttgcctggctccagccactctttcactgggatatgagactttccactctttcactggaaaatgtctcgtatcttctattagttgagtacataaactttgagattttctaacatagacctttttcaggtctattgttcccagaaaccatgaagtatgtggaactgttggcatcctattttatatctctcagattgacacttaaaatatggcttaagtatccagtatcagctgaactttggctagtaaactacctttctgatacagagggccataaatttacctaggaagcaagtcaataatgagtgcatatataagattaggactttgcccgtcttctagaatgttgtatactagagatatgattgtgagcaagatacggtgcccaaaggagctttcttcttcattctgaagaaattaacaaacaaaaggccaattcagtgcaatttgagaaatgctacaaagagaggagggtgctatggaaacacatatggaagggcacttaacctgagcaagagaagggaagctcatgaaagagttcatgaagaaagtgatatctaaccccacacttaaaaacacaaatggaagctagtcatataagggaactcagagacaaacgtgtatggatacttagatgtgatacagcgtgtttggggaactgcaggttcagtggtgtttgaggcagaagagcctagagaaccatgttaaagagttgagactttatcttagagcagttggagctatcacatgttttaaatggggagtgacctgattattttacttatttttttgaaactaggtctcactctgttacccaaactggagtgcaatggcggtgtctcagctcactgcagccttgaccccaaccaggatcaagcagtcctccaacttcagccccctgagtagctgggaccaccaccacacctgactaatttttctattatttgtagaaacgggatctcacttcgttacccaggctggtcttgaattcctcaacttaagcgatcctcctgccttgacctcccaaagtgcagggattataggtgtgagccaccatgcacagcatttatatttgtattttaaaaagatcaatctgggtcagatgcggtggctcacgcctgtaatcccaacactttgggaggctgaggcgggtggatcatgaggtcaggagttcaagaccagcctgaccaacatggtgaaaccccatctctactaaaaatgcaaaaattagccaggcgtggtggcacgtgcctgtaaaatcctagctactcaggagtctgaggcaggagaattgcttgaacccaggaggtggaggttgcagtgagccgagatcttgccactgcactccagcctgggtgacagagcgagactctgtctcaaaaaaaaaaaaaaaaaaaaaaaaaaagatcagtgtggctgcaggttggagaatgacttggaaacaggttctatcaaagacacagagaccagattaacttgaacaagggcaggggtaagatggagggggaaacatagctctacttggagagtttagtttgaggtgttgaattcagagtgtgtggaataataaatggatgtgtccagtaagcaattatgcatactttgatctggagccaatgaaggggccagaaatgcagatctgaacagtcattaacaaaaaattggtaatttaagccatgcaagtagatgatgtcactccaagagtgaggagaagatggaggacagagccagtggaccatatactcatatgtgccctaggaggaagagaaaggaggaggagcctgtgcaatgtggccagacagctaggaagaaaactaagccagagagaaaactggtaccagagatgttaagagatgtttgaaatgtgtcctgtcatgaaaaggtaagatagggaattggagagtgccacgtcaattcagcaagtaggaaattatcgataaagcagtttcagtgcagtggtgagcgtggaaggcagattggagagttgaggatgcagaggcagagaggacatagacaactactctcgagaagctcacccagaagtttccagtttgatccactccactcctctttttctcatattccccttcctgtgacttttgaaaataataagtccccggtgtctgtctcatttccattgaatcttgtttctttcctgttgttgattgaactctaaagtaaagtaagtccttatctttgttcctttcccccagacagtttcttacattatccagagctcttgttttgcttctctgagttacacacaatctgcctcatcaccatttgcctcattttcctttctggccacttccttaatgttacttagtcacatatgcctttcactttcaagcaaagagtaaatccacggagtatcacgatagtaatgtcagatccctttacaaaatgtcatgttgggagctatgtgagaaataaacatagcgtctggtccctgaaaacacttgtcctgacagtgtggatgagaagaccagtattatgcaatgaatggctagtggactcttaaaatcacctggtgaaaaagcaccagttaacatgatgtaaaccaagtgtataggtgaaggttggagaaaacacagggtgaatggaataaattcgggtgaacacttctttctacttgctataactctctgagatagagcttgtgatatacaacaccagcataggggctgatttaaatatttgcacatttcaaaactgttccagagtccaggtatcagtcatgatctggcataataggacttttatggtacagtgtttctgtctgttttatagctaagtaagagcacactcctatctgtgttttttctagtacttgcagtgcccctgagcccaagagtacctaaaaaatgtgtgccctattggtagttaattattactatgggaatgtgaagcgttcatggaagaaaagacaaatattattttaatataatactaatagttcatatgtgctttaaaaattagaaagtgctatgaattgaatgtgcattttaattgacattaaaatgattccattcctgttggttctgatgatccatcatggttgacatttgggtagtaacttcatatccacttcgttacagagtgagtcatccgctagccaagtgctttgacaagcctttgctatcacaaagcttcagagtttctctctcagtttctgtcatgggctttgtgtctgtccctgccagtctctgcttctctcttgaaagtatttttgtaaggcttgtgatgttattcttgttccagttctggttgttacaaaactgaactgccctagagatgattgatggaatggttaagagcgacgggtgtaggtggctcgttagtgcatggcagtgaattacttagagttcacctcttgattattgtagtctgcagatcaggctctcaagaatctctatgtgattttatctttagggtctagaaagcagctgttcaaacctgaatttatttacctttaccctgtctttagaagtgaaaaatcagttcgttatctaaaacgtacatttactatcacagatcaggaactgtgtccttggtgcagaatcatctttattctctggcttactcggaagagagattttgttccacctgcctataaggggtttttgtttgtttgtgttttgttttgggggcttgtttttttgtttgttttttgacacagattctcactgtttcacccaggctggaacacagtggtgcgatcacagttcactgcagctttgacctcctaggctcaaccaataggttttgtaaaagtttaattggaattaaactttttggtttttacaaaaccagtaggttttgtaaaagtttactgggtcgcatcaggggagggcttggttcaggcacagaaggaagccactgaggattcaaggcctcccagactgtgatgacagcaatcagtctggagctgatgtgcccaagactgtggcacccggagcaggtccatctctggcctggtctcctgtcactcatcctgctttcttgtgagctcatggcgtttttatttccttttgtgaaactgctggttctgtgctcttttacatgttgaaatagttattaggacgaagctgaatgagttttagaaagacgcctaatcagacatacttagcattttttaaaaaagatattcatcaaattataaaaaacatttttaatgccagtttcaaaaccatgaattaatagacaatttaggacccagcttgctttaattactaacatttttattaatttccacatagctccaagtaacaatgtggtctcactttccctttttatattctctcagtggaaatcaagaccatttcaactgtgtttaaaattgttttaagtacatgtagctattttacctatttaatgaggcatgaagtaaatagtacattgaaaactggagtctttaatatgctttttaaattgataagaattttaattacaatttggtcattttccaaattgtagtttatattacctgaaagtacaatttttcagacttgatgccaattttttgtacatatgtagatgatgtttatgttagtgtgttaagattcaacttcacaagaggtttaattaacaagtttctcagggaaaaaaagctttttatttcatgcttttaatggatttaaaataaatagcattgtgaaatcacattcttggtgtttattgggatggtggagtgctctaatgaatcctgttacataaaacgatgtagattgcagggaacacgagagagtaacatgtttttagtcatcattttcacccctcatttatttgagaaaatggatagtaattagatgtcgtggagcattttcttttcttacagaaaatttcttgattggatttatcttgctcactgtttcacatttagtttgcacagcaaatagtccttggtttgaaatggtttgattacgatgatttatccgttatttcttcctgcccaattctaccatttaaacactatcctctcctttagtgaaaaataaagatgtcagaatgaacttagtaggataaagtcatttttttaatccaattgtcaaccctaatgtttccactctactcttggttttgccctttgtgtgtgtgtgtgtgtgtgtgtgtgtgtgtgtgtgtggacttggagctttattttctagtaggaattcagaatgctgaaaatattttaaggtttgcattttgcctttttaagaaaaaatggtaaaattgtattatcaactagaaaagcggaagcttcctagacttaaaatttttcaacttcagtttagccctaattaaatagatcctgtcttccactgatgccgtatatagtgttctccttccagtataaggtaatctggcagtttaccttagagtttaggaaactaccttggaatagagtcctcttttaaaataatggtgcagttcttccaaggtgacaattactgttagctttttcctgggtctgtaataaatgtagcattaaatttttttttttttgcatttttaagagtagcataagaatgtcatcctttgagcttgattttaaatgaagatatcagcagataatatactcgaagaatatttatagtggctccaaatgagacagtctaagtcattcaatagtaatagctaccaattggttttgtgtttcctattcacctgtagcagtttgttagacattgtgatatatatctggagttcaaaccatcccaacggttacatagaagggcatgaagaagaagagatagcaaaataatgatcagagaggtaggagagaaaccaggagggtattgtaacaaaaagctgaggaagaatttcacaaatcatggagatgtaaaagaattgtaggttggcactggatgcagccgtagctggagaccttaaatctgtcttagctacagtctgcacaactatgtttattagttttgtcagcaattatcaacccaagtgaatggttacataagggagaataagggtgggactttttagtttcagactaaatggatggctaagaaaagtaaggcatagcctagcaaaaaatcctgaatcctaagattaaaggaaaacccatatgtgattcctaagagaaaaaaacaagaaaaagagaaaataattagattggcattggacttgtattaaactggaagctagaagatggtagaatagcatctccagacaataagtaaaaccaatgaagaagactgcagccatatgttctatatccagttctatacctatcaaagaaatgaaagatacttgaggataagaataaaacagtataccacctacctaaagaaaatacttgagagaagagaaaatagcaaaggtatgagaggagagaggtcaagatggaaaaaagaaagaagcaggtgagcgaggaaacatagatgcagttaaatctatgaggggagactcagaatgtataatctaaattcaaaataaggcttcttgaaacagaaaatgcataacacaagataattttagtaagattgcagaacaaaacatttttcaaagtcttatcttgttgatgtgggtgaggaatagataaacagagcattttcgtaaaagaaagactcttttaaatttccatcttatatgactaagcattaaacggataaagaagaacattttaagtaataagtggcacatagttataaggaagatgatagttataaacctaaatgcaccagacaacatagcaactaaaatatgtataaaacttatcagaaatgcaacaagaacttgaagtggaaaaggttaatatacgtgtctgaaggggataaactagtagaaaaaatgatgtaagggcagaggaaccgagtcaataaacttgaatataaagacacattcattcctcaaagaataaattttttgtatgtttatggaacattaacgaaaatcaaacatgtgattggccacaagaaaaaccttaccaaatttggggaaaatagattttctagaccatattctctggtcataagccaataaaattatgaatatctaataatatataactaaaactttaccttaaatttgagaagcacattatttgatattactaagattaaagaagagataaaaaattaaaactacaaactatctagaaagcaatgaaaaaatactcttctttcccaaactctgctacacagtgtaacccatactcagaggaaaaattgtaaccttaaattctttcttaaccaaagaagaaatatggaaaacaaaagaactaggtaatcatcttaagaaattcaaacaacaacaaaatattaattcaaagaaaatagggaagaggaattaagataaaagcttaaatcatggacctagaatataaaaaaaaaaaaagtacacacaaatttctaggctaacctttgtgcaaactcaatcattaggtgtgttaggggatcagtatgtatggaaatggaggtggcatataaattccctcaagtgattttggccctcatcatttctcctcattccagttatttacctacctcatgtttttgtctggaatctaagttacactgcgtggagagccacatgtgccgggttctgttatagcgtaattataaggccagaggggttttgtagtcatgctacctctagttgaaattcctactctgatgaaaatttccctggaaggagatttgtgaatatttggaatgctaaattactgagaaaaatctcatttaaaaaatgacaaggcagatcttaaaacataactagattatagttttatgaattagtgggaattagtaacaggtacatataaataccttgtatttgttttttaaattctcctttattcatcataccactcgagaagactgtcattgtcaatagcacttcttatcctgggaggcttaataaagtaagacttgttgcaatcccaaagtaacaattttgtcgtttaatattataaatgtggataatctttatattaccactggtatttacatcatattgtagagggaaaacctttgcctcacagcattgtcacatgaaggattatttttgactcaatttgaattgatggcaatagtacatttgaactgcttggtttttggaggggataaatgaaagggaggggaagtatggaggactggcattgtttttgtgaaaatttgtaaaagcagactgataagaaaacagacaatatctttctttaggcttttactactaattagaaggtgatgtggtgtgtgtgttcgggggtacacgtgtgtgttttacagaatgcatgtttatcttgtttttgataaaatatgggaaggaggaagggaggccttaaactctagaaaatatctaacagttggtagcatatgcatttacctatttttcagtttttgataacaagctaagctttcacctgattattgattttcctcttttctttcagcagaagagctggagtaattattttattttactattcatttttcttttgataatattagtctaaacagaaagtaacaggaacatgtaatatcttcagagcaaagaacacaatggcattgtttttatcctcggtataattctgttgacagttacctgtaaggttgtgcttttaaccatttaatcctgaaaccaaatcacactattggtccaagtctcatttctgttcattataaaatgtgtacgatagatatttatttctgcctttggccttacttagctatttacctcaattattgtatatcagttttttaaaaaaactgatttttaaaaaaatgccttgggtagatgtattttctcattctcagcaaatttttcaaacaacataatgttctgtaacatttataaggttgtttttactcaccgtttgtttcatttttttcattcacttacttggatttcctaaaaactatttttttagtttttgcttttaaaaaattaagttgaaatctgatcgtgatttttgcctttattttctttgtgtccatctataggatgaatacaagccagaaaaggccttgtctgaagaggacttgaaaaacgctgtgagtgtgcaccacgcattggcatccaaggccacggactatgagaagaaaccaaacgtgtttaaacttaaaactgccgactggagggtcttgctttttcaaactcagtatgttttgttggtttttatttgattttgtgttttagttcacttagcactactttattgcaaggaacaaaatcaagctctgcaggggaaattttttgagttggaatcaaagtcatcaactgcttacattagagaaataactgcctaagaagattagagtaaaaaaaaatagaaacccaggatttacatttttacctgttacaaagtagccctttgacttttagtcagccacttaccatctctagaattcagtatcctcatcaataaaatatgagggttttagtagacaagttttatcgcaaaatgagtaaaacagacctagataacactgtttctctagctctttctcctagcacatagtttaacctctgaacctcagctcgtcactagtgtgggggataacgtttatcttacagagttctagtgagaagtcagtgagataagtgtgtataatacctcacacagtgcctggcacataggaactgttcaataaatgtaaatgtttatttttttgtttcccttctgagctctagtagtccatgattatactagaaggaaaagatgtcattctactgtgagcaaggaaatgggatgaattgccagttttagggggaggttataaggaaacaagttgcccggggtttttgagtgtaggaatgggatggttaacatcacacagggacccatagctggatgtataattacagctattgggcataaagaaactttcaaattattctgttccctgattttttcaatcaaaaataccagatgtaataactaaggagatctaattactttggacagaattgatgcaaaaaacagtccattgaaataataatggagccagagagatcagcctagagagggtgccgtgaggagctgacatttagagtggtctcaggtttgtttgtgtggtttctctcagagtaattgatgaaggaaatgactttggctgactttttttttactttttgtttattgattatgtgtatggtagataatctgtcctgattcatgatcatttctaccattcatttatgagtttgcaaatatttattaagtgctgtgaatcttgggctttctggatataatgacacataaattaaaaatatgatcacatcagatgattttcacctcctctcaggtgggttttctaaatagtcttattgaggtatgctttacgtaccataaaatatcaccagtttgaaatgtacatttcagtgatttttttagcatatttacagaatggctcagccatcaccacaatctagttttgaatcatttccatcactccaaagagatccccgtgcgcattttgtagtcactgccattctcacctccagccccaggcacccactgatctactttctgcctctgcagtattgccctttctggacacttcatataaacagactaatatatgatgtggtcttttgtgtctggcttcttttatttaacataaagctttggaagtttatctgtattgtagtgtgtgtcagtactttattgctaaatactgttcagttgtgtgcatttactgcattttgtttatccatttactggacaatttggattgtttcccttttttgactcaggaatgatgatgctataaacactaacatacaaatctttgtgtatctgtatgttttcttttgagatggagtctcactttgccaccctagcctggagtgcggtggcgtgatctctgctcactgcaacctccgcctcccaggtacaagtgattctcctgcctcagcctcccaagtagctgggactacaagtgtgcaccaccatgcccagctaatttctgtatttttagtacagatggggtttcaccatgttggccaggctggtcttgaactcctgacctcacgtgatctgcccacctcggcttcccaaagtgctgggattacaggcatgagccaccacgtctggcatatctatatgtttttatttctcttggatagttacttaggagtagaattgctgggacgtatgatacatgcacagttaactttcgaagaacctgtcagctgttttccaaagtagataaatccttttaccttccctctaccaatgcattcctcagttagattttaaaattaaacagtacaattagaagagatgagtaaattttataatttatttttggcctagcctcgtatcaaacagaaagtaggggtttaatcaatatttattgtcaagtgtttctcttttttcccttctgtttcctagggagagaatcacagtctggcactgtgatgatcatagcttctttggtgatcgtcgaatgacaatgttcatctctaatgaagttttgtcagggattagttgtaccaggaggagtaaatgattttcacatgccattgcaaatcagtaacgtgaaataggcaaagtgtgatgctacttagacatggcaatatcctgatataaacatatctatttctcataggagcccagaggaaatgcaagggtggataaacaaaatcaattgtgtggcagctgtattttctgcaccaccatttccagcagcaatcggctctcagaagaagtttagccgcccacttctgcctgccactacaacaaaactgtctcaggtaatcatcttgatagtgctttgaccttgggaaaaagtactttgtaaaataatgtgataaatatttgtctttggatagtagtccatgttttgggggcaggtgtgagaccttgccctgtgagagcgtatcatataaatgaggcagatatgcagtacactgggttttacacttcatgtaggaagctgacataattgagtctcagttagtaggacacgtactttgattcagtttctaaggtttatattagttcattatgagcaatacttgatgttttgtttgttttaactgccagctcataatctggcttggtaacaagcttttcttgcattcatttattagctcatttttattgagcatttaccatattccaggatgtgtttagtgctagaaatacaaaaatattttcaggaatccacggttcatattacaatgggaaatggcctgccctacccctcagagcagagctgaatggaacatttggattttccaagctaatgaagataaagtataccagaactctgctccaagtgtatttacataagcctccttctgtggtcagattaatcttactaaaagccatattttatcatgtcctttttcacttaaaactcttctaaggacactacctaccagctaggtttgctcattttaaacctgtctgtagtacccccttgccattgactagttaaagattttggaagctactttgatgtctttgtgaatttcttattacatagagacagttttatcttactatgatcgaccaagtgttggtattaactagctccctatacatctttgatatcataagatgtgtcccatggcaagagagggagcaattatcaatgatagattaatttaataaatatgtattgtgtgcctgttgtacatcagagactatttttggccctggagatagaaaggcagatgaaggccagatcctctgctgaaggtgtggcaaatataaataaggaagtcattgtaaaatgatttgatagaagtacaggaaggataagtccagagagctgtggaggttcaaggaagggacattatctagcctggccttggaggtgaaggaggaaatgtggtacctaatgtgcagcttaaaggatgagaggcagttaggtgaggtgtgggacgagataggaaaaagagccatcagaggaacgaaggcctagagaagagagcgctggatgcaggaaccacacacaagttattaactgtgacatgagcacagtgttgagaaaaagcaagaaatgtacctctgcagaggtcagcaaaggccaaatcatgaaaggccttgtttgtcgtgtgtaggattttggatgctgctgtggttcccagcatccttaaaataatagctttaagactgggcacagtggctcatgcctgtaatcccagcacttttggaagccgaggtgggcagatcacctgaggtcaggagtttgagaccagcctggccagcatggtaaaaccctgtctctagtaaaaaatacaaaaattagccaggcgcagtggtggatgactgtaatcccagctacttgggaggtggacacaggagaactggttgaacccaggaggctgaggttgcagtgagccgagatcatgccactgcattccagcctgggcgacagagcaaaactccatctcaataataataataataataataataataataatagttttaagcaggacagtaatgtgatcacatttttgctttaaaaattattctcattacaatatgagaaattgttagaagaagatactacttgcatttctctgatggccagtgatgatgagcattttttcatgtgttttttggctgcataaatgtcttcttttgagaagtgtctgttcatgtccttcgcccactttttgatggggttgtttgtttttttcttgtaaatttgtttgaattcattgtagattctggatattagccctttgtcagatgagtagtaggttgcgaaaattttctcccattttataggttgcctgttcactctgatggtagtttcttttgctgtgcagaagctctttagtttaattagatcccatttgtcaattttgtgttttgttgccattgcttttggtgttttagacatgaagtccttgcccatgcctatgtcctgaatggtaatgcctaggttttcttctagggtttctatggttttaggtctaacgtttaagtctttaatccatcttgaattgatttttgtataaggtgtaaggaagggatccagtttcagctttctacatatggctagccagttttcccagcaccatttattaaatagggaatccccattgcttgtttttgtcatgtttgtcaaagatcagatggttgtagataagcggcattatttctgagggctctgttctgttccattgatctatatctctgttttggtaccagtaccacggtgttttggttgctatagccttgtagtatagtttgaagtcaggtagtgtgatgcctccagcttcgttcttttggcttaggattgacttggcgatgcgggctcttttttggttccatatgaactttaaagtagttttttccaattctgtgaagaaagtcattggtagcttgatggggatggcattgaatctgtaaattaccttgggcagtatggccattttcacgatattgattcttcctaccacatattctcactcataggtgggaactgaacaatgagatcacatggacacaggaaggggaatgtcacactctggggactgttgtggggtcgggggagtggggagggatagcatcgggagatatacctaatgctagatgacgagttagtgggtgcagcgcaccagcatggcacatgtatacgtatgtaagtaacctgcacaatgtgcacatgtacccgaaaacttaaatggaatgttcttccatttgtttgtatcctcttttatttccttgagcagtggttggtagttctcctggaagaggtccttcacatcccttgtaagttggattcctaggtattttattctctttgaagcaattgtgaatgggagttcactcatgatttggctctctgtttgtctgttgttggtgtataagaatgcttgtgatttttctacattgagataccatctcacaccagttagaatggcaatcattaaaaagtcaggaaacaacaggtgctggagaggatgtggagaaataggaacacttttacactgttggtgggactgtaaactagttcaaccattgtggaagtcagtgtggcgattcctcagggatctagaactagaaataccatttgacccagccatcccattactgggtatatacccaaaggactataaatcatgctgctataaagacacatgcacacgtatgtttattgcggcattattcacaatagcaaagacttggaaccaacccaaatgtccaacaacgatagactggattaagaaaatgtggcacatatacaccatggaatactacgcagccataaaaaatgatgagttcatgtcctttgtagggacatggatgaaattggaaatcatcattctcagtaagctatcgcaagaacaaaaaaccaaacaccacatattctcactcataggtgggaactgaacagtgagatcacatggacacaggaaggggaatatcaccctctggggactgttgtggggtcgggggagtggggagggatagcatcgggagatatacctaatgctagatgacgagttagtgggtgcagcgcaccagcatggcacatgtatacgtatgtaactaacctgcacattgtgcacatgtacccgaaaacttaaagtataataaaaaaaaaaaagaagaagaaggtactactagaagcagaaaggcccattttaaaggaattttcagtaatccagaggagagataaccaaggtagctgcagaagaaatggatcgtagtgaaagtgcttgagagaccttgaaagtgtagaatggacacttctggtggctcatggaagtagaggaaacaggctgtcattgtggcttggacagctggggactgtggtgtctgacctgcttctggagtctcacctcactgtctcttgatttccccccttgcttcttagactcctttcttggatcattttcttctttctgtctccaattcctgcagtggccagagctcagaagcagactaaggcacttgataagcaattttccaaaaagttacttagatttaatacaaacagggagaatgttgtgccaagaaaggggggaaaaggttccatgaagatttagatttaaaaatgtgatatttagtggctgggaggtcactgggtatcttagcccattttgtgtttctataaagaatactagagcctgggtcatttagaaagaagagaggtttatttggctcacggttctgcaggctatacacgaagcatggcatcagcatctgcttctggtaagaatctcaggaagcatcaaatgatgatagaaggggaaagggaaacagatgtgtcacatggcaagagagagaggaagggaaagtgccaggctctttttaacaacccactttcacttgaactaataaagcaagaactacctcattatcataagcgtggcatcaagccattcatgagggatctacccccataacgcaaacacctcttaccaggtcccacctccaacattggggatcacattacaacatgagattcggaggggacaagcatccaaactatatcattggataaccttagcaagaacattttggtggagtcatgggaagacaaaccacattggccttctttgatgggggaatgaatggaaggtaataaggaagtggaggaggaaaatgtgctcaagtgttgccatagttataaaaacagaaagactagtagtaagaaggaagaatctgtggtttcaggaaagattcttctgtttttaattcataattatcattaacatatattgaatgcttacttgtaagcattactattactgtacagttcttgcaggacacaatggcattgaatttttaagggtaataagtacactacaactttaaaagaaaaggaatgctcttactgatgaccagaaggtatgttggcagacatctccatctatccaactaaaatatgaactcttaaagcaaatgcatttctctgctttaaatatgcatacttaacataagcagcataccacataaagagcatgtcgcataaaaggtaaatcacattacacgatataaggggagggaaaaaatcaagtaactggaagcaaaaaaaaaaaccttccaaaattgagttttgctctattaattttacggtggactttcccattgttctttttcagtagtttgggtctttctcacattcagttctataaaagatccaggggagaaggtgagttgaactaaagagggctgataataagcatgtcattcatggaaggtgaatgtaacttagagcaacatatgagtgtttccttgattttccctcactaaaatctacagttctgtttactttatactttaaaaaatgtactgctttcctatttagggactgtatactagtaagtgatatgtacgtgaaaatgaatgtgttcatctgtttgcgtgttttccccagaacaggcaagcacacacatttatcatggtaggcactcttatttctaacagatgacttacactggaaccaaaaatagaatgcataatttttaaaaatgttttccttcattttggacataaatccacagagatgcaaaaacatgcatatgtagtataatcacaattagggattgaagattttaaataagaaggtaataaccaaaaagaaatatcctgcagtatcatgtaagacaaggtaaccgtatcatttcaggaatttaatttatttggaaagaaatgagatgatctccgccaccccactgaattgcatcacccagcatttgctttgtgggcctcagctttccatctagaaaaatgagatggttctagaatgtttttaaggaattttttttttttttttttttttgagacagagtctggctctgttgcccaggctggagtgcagtggcttgatctcggctcactgcaatccccacctcccgggttcatgccattctcctgcctcagcctctcgagtagctgggattacaggcgcccgccaccatacccagctaatttttcgtatttttagtagagataaggtttcaccgtgttagcaatgatggtctcgaactcctggcctcaagcagtctgcccacctcggcctcccaaagtgctggaattacaggcgtgagccaccctgcccagcaaggatttttctatccaaagctctgtattatttctttgccgagtcataaggtttgtttctaaagataagatttttagctttgagaaacacatatgtaaaattaagcatgtatttggagtagcacctgaggctcttggggatatctatactggggtcatagtgtgcctccagcaaatcctggaagatgtctggctgcccctaggattcctccagtacctcaaagactagctctcatcctttaacccaggcatattcgagcgcagcagcattaacattttggtgtggataattctttgtcgtgagggcctctgtgaattgtaggatgtttagcgatatccccagcttctacccactagatgccaatagggaccccccagttctaacaaccaaaaatgtctccagacattgccaaatatcttctggggtcaaaatccaacccactcctattgagaaccactgctttagccagtggatgtgaagccgtgagaccagctatctttttttccccatactcccacaacctggctctgactcccctaaatgccacaattttttggataattttactttacaaaatacaggtataaaaatgtgagtgccttgctggaaacattgataaagaaagataaacagtgtggggaaaaattagacgttcaattaaaagattgtttggtgctttttcaagacacagtgtttgtcaccctgtcatttgtgggctttgctttaatttattcttgtcttttatgcaaaacacattagccttaatcattaaaattgattattgccagtgcagcgtggtactttctgaacaactctgctgtgtaggaggagtcgccttctttgtttttcatgacagtgctgccagagcacatttttcttctattgggggtggaaagacttgtttgaaaatacaagttttgcttctccttctggtgtagctctccaaacacagaaatgcatggccggccctgttcacagtctgctcacaacctccctttctgcccaccagagaagtcttttcaaacttcagtgtgcacaacagctatgtcgggacttgcagaaaatgcacatttcccagccccaccaggtcgttcaggtccaggctgggctcagggacacatgtgtgtttcttttccactccaggccggcaggtggctccagatcccacttaaaccctacactgtaggaacctgtgcctaccctaggtctttccttgcttctttagagaatggtgccccaggacatcttcatttcctgatatctaggtcttttttcttagaattccaaccattgtcttataaaagtttgaatccatgggtactaaatacttttttggtcagacttaagatggatactgatcagaagcaaagcagtcctatgcttgattctcacgctgaagtaacccccacccctccttttgtcctgtggtatgaccacaaggcagtggtgctcagagccaggtgagtggagctgaccttacgggcagtgggatttcaggggaggaggtcattcttgtagttgcttccttcactgcgcccccacccacccatttccacagtttctgtcataaagtcctgtcacttctaccctctaaatatcttttttttttttttttgagacaaggtctcactctatcacccaggctggagtgcagtggtgccatcttggctcactgcaacctccacctcccaggttcaagtgattgtcctgcctcagcctcccaagtagctgggattacaggtgtgcaccaccatgcccagctaatgtgtttatttttagtagagacggggtttcaccatgttggccaggctggtcttgacctcctgacctcaggtgatccgcccgcatcggcctcccaaagtgttgggattacaggcgtgagccaccgtgcctggccaatgtctttcatattctacacctactgcttcagatttttgtcatattctacctagatcactggtctactcacttttttgactattcaccttatcccaatactaaatatttcagcagatatcttttaatatatgatgcttttttaaagaaaataaactacattttccactgtcaatcccagtaataaatattagtaaaccttaacattttgtagtgcttagattaaaaaaaaaaaagaagaagaaaactttaaattttttcccagtgcctaaggagctattaaaatttttgaaaactcataaacgagttcagcactgttagacatgcaggggtgtttttatggtatgtgaattgtatctcaatactgattttaaaactctttgcagtgggtcatcttgcctgggctacacacaccccactttggaataatctgacccagatgatttctgtaaccacttgtgatctctcttccagtaatcttatgtccttctgatccaccctttacagttctgactaaaatatgattctaattatgtcacttacccttaactgattcattttttcacattcaaactctttgatgtggccttaattgttacccatacttttcctgaatggatagatttttaaaaattcatttcttcgaggtctgtatttaatatatattaagtacccaataaaacaagtaattaaatcatgtggaagctattttgcttatactcattaaatactgtgtttaaggtctaaagctgtcttaaacatgaaattatgaaacaatcttttggattgagcctccctcaaactgactcaaagacaggtgttctgtattctaaattctgtaccacttcgttttgaacagtttccagtgtttagcaatttgacttctaagttgcactgcggatccctagatacatgattaccctgaaaatcatctgtctcctttaagacagcacaaaggaaacagtctaagccctcccctctgtatcttcacttaaaaaaaaaaatctatttgttcagctactgtttaccgaagatcctgtatagcaggtactatgttaggttttgtgggcattataaaaacaggtgagacaattgccttggccctcaacttctgagagcttaaggtatttgttcatgttaggcaggtaatgtctataaaccaaaagctgccacatactatctctctgctcaacactttactggatactggaggatttaagggaaggaaaaaagtgaccttttttgcctttttaagagcttgtaatcggtaaaggagataaaactcacacaaaggtcagggtatattttgtgctaagcatatgacgtagacatttaagtgctgccgtaatgcagaagaggaagaagtggtgtgatctagagtaacataggtttggttttgttttgtttttgttttttctttttctttttctttttctttttctttttctttttctttatctagacagagtctcactctgtcgcccaggctggagtgcagtggcatgatctcggctccctgcaacctccgcctcccaggttcaagcaattcccctgcctcggcctccagtgcaattggaattaaaggcgcatgccaccacacccggctaatttttgtatttttagtagaaacggggtttcaccatgttggccaggctggtctcgaactcttgaccttcagtgatccgcccatctcagcctcttaaagtgctaggattacaggtgtgagtcaccaggcccagcctgtaacagaggttttgagtggaatttggagcaaggtgagtaaccctgagtccagcctgcacgtttgagagctatagcagaggagacccggcagcagtggagtttaccaagagctctgaaagctgagttcaggattgatctgtcaagtaagacaatgtgctgaagctatgttgttgacagccctttggatttcagaaggctgttccaaggtgacttcatgatagaagttgggagaatgtggcttctgccactctgtccttttgtctgaactggagcaattacttgaactctctggatctccatcttctctaagacaaagagggtagaaaggacagtggccaggttctcttccaccttagaacatctaggattctgtatcccacagcttggaggaaaagactggtggcagccactgtggctgttccctcttcttattcccagcacccagcacagtgcctgctgtatgggcgctcggtgaggttcgcggatggataaatgtgttctctgtttcccgattctctctgccttctctctcattcttcctcctttccctcttggagccatctgcatttctattttattgtttcctttaagttttcacagcttctctctcatccttctctccatgataagtactatgtaaatcttatacttggtataaaaagataaaaagctaatttctggcccttggtcctgggctttgcaccgggggagaaggactgtaactccaagtcagcccttgactcacactgcaagatcttcaacagccaagttgcctgttcccattgcctgatcagttaagcaatactgtcttcatagagatgacattagagcttaatattttaaaggaaattctgaaattgttctcaaaacctaagtactatataaataggaaaaaaattaaatatttttttaacaattttaattgaccatataataattatatgtatttccaggtataattgtgatgttttgctatatcaattttttatggttagaacacttaaattctattctttgagcaagtttgaaatacacagtgcattattatgaactctagccatcatgatacacaacagaatttattcctcttgtctgatatttttcatcctttgaccagcatgtccccagtcccttgcccccagcctctggtaaccaccattctccttatttctatgagttcaattgttttagattccatatatgagatcatccaatatctgtctttctgtgccggtcttacttcagttagcaaaatgtcctccaggtttgtccatgttgtcgcaaatgacagaatttcctcttttttaagggtgaataaataatactccattgtgtatatataccacattttccttatccatttttcaaaggacacttagatctcttctagatcttagctattgtgaataatgctgcagccaagagctgttccctcttcttgaagaagatacggcatggtctcaccatgagaatgccacatctttttgagatactgatttcatttctttggctacatactcagaagtgggattgctagattatttggtaattccatttttagttttttgaggagccttcttacagttttccagattttcctgacagcatttgtgaggataaatgttgtatcctcacatgacagaagacgggggcaaaaaagggtctaacctatatcactccagcacttctataagacacttaccgcttcatgagggactcaatcactttccaaaaggcaccatctcttaatactacacaatgaggattaagtttcgatatgaagtttgaaggggatacaatgaaaccatagcaaagtcctttgcccattttttaattgctttgttttcttgctattgtattgttttgagttccttatatactttggggattaacccctaatataagtaaatgaaatcctaagtgacttcgaaaacttgccttttagataaaatgttgttgtatatattatgaaaggtcttactgatttaaatctattgacatataaccacaacaacttttcttgtatctagtattttcaatttcattttttaaaaattatcacttcctaacttaaaacaattttatgagtttgtggtattttctatctccatgccttttctttgtcaaatgtaatatttttctgccatctctgaaatctattttgctagtattgtcttctaaaaacagtatgtatgcatccctaaagaactgtaaaagcaaagacaaaaggtgggggaataaaaaagcaaattcctactttgtctttcttcatcgtgtctattacaaatgtagttgtcctgagtctgagaatgtgacatctccatggctgcagcctctctcccgttgttttttaccattgttttttgttgttgttgctgttgttgtttttttgtttgtgtgtgtgtgtgtgtgtgtgtgtgtgtgtgtgtaaaatgtgtatctttcttatcatgggattctagcactggaataatttgcatggtcaagctgtgtccgtaagagccacttggcatttctatttcactgttcaaaatggacagatttaaggagatgtgattttaaaatgctttattttgagcttactttattgactcctgccttatgaagccagtgaaatagtagtgaagcatttctcattgaacatcagcacttcctcggttagttcctttgtaaaaatatagcctaaatgactagccctttatgctgctgtagaaacagatttacgtaccatagcttggtaacagtgaacaaacccgagcaagccctggtattgggaggaaagtgaaaaacataagatgttgcacatattgtcattctagcctgtattcctcattaaaataagtagaaattgggatttgttcaacagaaaaagagacatttgaatattcaagattggaaagcctaaatctaaagcttttagaagaagcaaacatctgaaagcatatttgcatagatccaaagtaaaaaaaaatagaagtttgtaaattcttttaccaaattacctaaaatcctattttttcttaaataaactggattctatcattggattctaattattggattctaattatttcctaaccacaaatagaaagagtttgatttcttaacatatatattataaataactatactgatacaaatctattttttaaaaggcaaacaacccaatagaaaaatgggtccagtaatccacagaagaggaaacccagtaaacctatgaacaaaatctcatcctcattcatattcagggaaatataaattcaaatcacagtggcttatcatttcttacctatgaaattagcaacaatttacaagtataataacatcacattttgacaagaatgtaaaacaaagagaactttcagacctgctgtggaaatgtaaacagataaaaacactttagaaaacagtcatcttaaagatgcgcatattctaaaacccagaaatgccaacactttgtgacacactatagaaaaactcttgctcagattccctaggagacatgtgtaagaatgtctgttgcaacatcatttataacagggaaaaaaaatcccacaacaggaaacctgaaaacaagctaaatatccttaaacaaaattgtaatgtgtcctgcagtggggtactatgcaatgtttaaaagacaggaactagagcatacatgtagataaatcttaaaaacatgttgagtgaaaaaaaaattacaaaagaaagcctttaattagtttttatatcaagtataaaacctagagaatacacttctggttttgttttgttttgtttttttgagatggagtcttgctctgtcacccagactggagtgcagtggcgcaacctcgactcactgcagcctccatctcccaggttcaagtgattctcctgcctcagcctcctgagtcactgggattacaggcacgtgctaccacgcctggctaatttttgtatttttagtagagacagggtttcaccatgttagtcaggctggtctcaaactcctgaccttgtgatccacctgcctcagcctcccaaagtgctgggattacaggcgtgaggcaccccacacccggctacacttctgtatttttatggttacatatctttatatatgaataacactgaaaaggaatgagatgagcacgtacatgtgtagggagtttccatttatttatattttatttcttaaattcctatgttagattcatgggtgtttttcatatatcattcaatatgactttttatatatttaaaactttttttagaaaagaaggaaaatacatcatgcttttattttttgaagtggtccagtcactaaatatcatttgtcaagaagtctattaggtaatttacatattgcaataaatacacaaaggaaaacaactttgaaagaaataaaaactattgatatagtttgtcttagctcaggctgccataacaaaacactatagattgggtggcttccatagcagacatctattttctcacagttctggagatgggaaatccaagatcaaggtgccagcagagttggtgtctggtgagggctctcccctagggctgtggatggccaccatggccttccattggtgcttgcacacagtgtctcctcttataagggcactaatcctattggatatatgccccactcttatgacctcatttaaccattattacttctttagggaccccattttcgagtatagctacactgaaggttaattttgagtggacacattcaatccataacatagttgatagtctccttgcctgaaagtaatagatgagtaagaacttgtaaataaaagctacctgaagcatttttgactttcagcattatcagtatacaaataataggtttggagatgtagacgcctttctaaaatctcaaaataggtttcttttctccttcgtccttttctgggacttcttggagtgtttcattttgttttgttatagttggcatttagaaatgaatcttgtcatttttagatcactccacgtgttcatgctacctttcttgttcatttttccattcgtgtcctctgctttttacttgtcattgttttcttctgttttgatggtttttgacttggattttgtttttgttgtttggcttttaagatgtacattattacaaaagtccgtaagatattatatgtgacgctcataatttctggacacgttttcttctaatttacaacaatattatatatttgtaatttactgtccatagttattcattttctgtttatgtaaaaaattattcccctcattctacaagatttttgtgttctacaattatgttggtgttatataaaatacatttatcacctaatttagtcagatctgtttcatttgcctttacccatttatcttattgtacctgtgaaatttggataatttgcatgtgaaactagaacagtaaggagtcatacattttcaagaatgcaagagaattccaagaatgtttttaaaatgctggcagaaggttcagtaacatatctttttgggtagcctattgctaaggtgatataaatggtacccttagaatggaaatcctttgatgtaggatcaaccatattgcattggtacacggtacctataataatgctactaaggcaataattgctaaataggtagatacattttaattgacgggttgctttgggccaatcaagttgaaggaactaagaactctgctgctttggtaagagaaaagcgagatagctgcatgttttagaatatcatctggtaagcttcagagaagaaatttttcttcgtagctctgcttctttcaaaaaggaaaaaaaatatgcacatagacaattacaattcattcattgtgatggatggaaaagctggcagcattgctgagtgggcatgaaatgggaaagccaaggtgtgcagcttccatgctagctgcttaactgttcagctggtgacatgcctgtcagggcatctcttaaggcctggtcccaactcaggggcatttacacctgataaagagctcggaagccatttggttttatgacaagggacctagttaaagaggttggccttgattgccatcccgggaaggaatatatgaaatatgtggacaggggcgtgagaaagctggaaggatgtggcagcagaggcacattgggctgttttagtgaattaaagtcattcagcacaggggattttttaaagtatgctgtgctttgttattgacttgttttttttttgaacgctaaatggcatcatgatttcctgcaggaggagcaactgaagtcacatgaaagtaagctgaagcagatcaccaccgagctggccgagcaccgctcatatccccccgacaagaaggtcaaagccaaggacgtcgatgagtacaaactgaaagaccactatctggagtttgaggtgtgttgcacccaaatgttagtaaatgctgatttctgagttttcttatgatctgtccatgaggcggtatctttctttgcagtgtcactgagagaggcgtgtcttgcccctggctctaatttgggagctcctggcaaggtcatggtggcccctcttgtttgtgattctgtttaagtgccaagcaaacatcaaagagtaacctgccagtttatacacttaaaagtaaatagcctgcctggttggaatagtgtgcgcccgctgtgaggggaagaaaaagaacagtagagggacacaccagggtggacagctgctttctgtatccctgtgtctcttccggcagaattggagtcaaaaaaagcacaagggaggaaatgagccacatagttgatgtgaggcatcagcttttccctgcacattcttgctgttcggcaacactatgcgtttttcttcttgtcacccactgcccttcagaagggggttgataaattaagttgtggcacatccatctatacagtgagtgtgcttattaaaaagaatggtgaggatccatatgctatggcatggaaaagtgtaaaatttaaacccaagttgaaaacagtatatttccaaatatttccatggctcagttttcttccaaattaatgtcagggttagagtcccttagcctctgccttcagacatttaaagtgtctttttatttttaaagtaggtagcatgcaatacaaaataaaaagaattaattatcgactaatttgacctgttgttttttgtttttgtttttttttctggtgggtgtgctgaatctgcctttagctgttctttttcattgtagctctggccccttttacttctcattgttcctctcctttgttttcatcttatctgatttcctcctcaggcttgaaatttaaaatcttctaagtgtccacatcctagcgatcagtgtctgtggcgtctcacacctgtcccttccttgtattgctttataactacttcctctgctgagccctggctttctcctctcactccgctctccttccgttcatcctaaatcctttggccggttgtttttctgaggttcaacccagatgacggcattcctctgcttgacagctgcctacagcttccccgattcccctcccccagttacctcctgaagaaagtctcatttctttcactggagaggatttggcgtctccacgtttccacaacgtccgtctttcccacactggcctccctacggtagtcacatttctgcctactctccccaaacacacgtttatacctttgttcacttactttcctctgcctaagatgctcttcccatcatcttcatttctgacagtcctgttcgtcttttgaggtacagcccaaattcctcctatgaaaaacctgatccagatatactagctgggattcatctgtttcagtacttggcacaatttttttaagctgaagttattttcatctgtctttgttacctgtagcggattccgtaatacctccccctacccaaaactatgagcctaagttcatttccaggccttgctatgtgtgcttgctgaattggatacaatttcatagaagccttaaaaagtctctgagttataatatttctgttatcaaatgtagcatttgattaaaaaaatgacacttccactacagttccatgtactagttttcttcatggtcaagcaaatccttgctctgggcggagaactctactaagagaactatttattttggtaaaggtaaacgtttcttagcaaaaaccgtagaagccttaccagcaaaatgcttgaaaaaataaaataaaaaataaaaataaaccaacaacaaaaaactaggcagctcatctttccccaggcttgttcattcttgggaaatgggagttctcaaaaagcaatcattattcttcacacttctgaagtggctttaagccataggcctgttttgtttcacacaagctaattaaatttcccagcacctcagtccctgcttccagcactcagcacctcgctggagcccttgatgccgaaggtggaagagcctgtccccaggaggtggggggtggctgcaaggccatggaaagcttgccattgctaggagccctccctacttttgagtcgacagcgctacctcttttctgaaaatgtaacccaccaagagccagcattttcaatccctgacatgaagttagaccaagttttgcagggattaagtcttgctttcatcaaatcgtcacctcagcgagcttgcagactgcgttccaggactcattaaaatcagacccatatgctaatatgtcaagcaggttgacttgtctgtcaagctccttcacctgtgtctatcagaaaggcgcgaggatagctgacttggtacagctaatatttatgtcatgaaagagggaaaatttcagctgtcatctaaaaggggttttgtataagtagtgctttttaagaagtgaacaattgtttttcagtaatttaaattaacattgaagtcatatatcatattgagtccactttgctattgttgcagccaccggaatttttctctcgtgagtgcttgcagagagtctttgcacagcatcctttgcttcataagcagcattccctgagcaggccgcttcatagcagatataagagttattgaccatttttcccagtttctggaacactgactaattgacgcacgtttgttgacaacatgcgtgaaattttattattgtatataaaagataacatcagaggaagtaattctctgagaaaccttagtattcattgttttaacaggaccagaagctcccatgaaaacaaacctggtgactgttctcacccaggtgagagcagacagcagtgtctgcagttcagtgggagcccacagatgggcagtgacaggaagaggagctttaatcaccagggaagatcataggcatgaatgggtgctctcacctcctcttatggtgggtcctcctcaacagggcctcccttggtttcaaagcaattcttaccattttcacaagtccttggtaaggaaaaatacttttattttggcagaatattaagctgttagtaataacaccaggagtgttactaattgtatgcattccagttgtttaaatcccaggttgctttgagtacaaacagtgcttcatggtgagccaaatttacctctctttctatgccttagaaactgtccaaactctgactgacagtaaataatcagaaattctggtaaatacagggtttaaaaaaaaatttacagagagcaaggaaacttccatcttagcctgttagaaaagaggttcacttttacttaaagcagcaaactttactcagaatgggctctcttcattgacttaactctaagcgaagggatgttactgaattggtaacctccaagctgtggtttggaatctaatcttacttctaaaagaggctttaagcatgacaagtctacattgagaaactcaccatcatttcccaatttcaagaaataaatatcagaaatagccacatttccttataaattaacttttttctattttattcagttcccattttacttaaaaatatttaattgatccctgtgcttctagtatattgggaaacagatcaagttctggggcagatcgatgttttgtgtcaatgtaaaagtttacaaggctccaaacaaagcacagttggttgagctgttctggaaaacacctgggccccttaagacacagcaccattagagaaattcccttgacagcaatgcagttggccctaatgttttggttttatgtttcttcagctttaaaaacaacagcaactggaaggagatgacgctttttatttcaagatatttttcctgcaacatttaagatgttacagatgcaacgtttaagatgattacagatgttaacatactccttaaattaagctggacctgagtagggagagggaaaagatacaccagcccaagcctattaaatccatgactgggctacaagagatttactacaggggaattgctgaaggtcaggttaatagctggctttcaggtcattgtaaagcctgttagaaaaccagccgacgcaatgccaatgaattgtatgttgccagcccacctaatgtcaacgtgttttctttggccaacataatactgtatttgttttcattgtaatttaaatgcgtttaggaaagacaggtcttgtccttctcaccattgcctgttattaatatatcacatctgataactttctacagtaagtgtcattgctctggtccctgaaggcttttgagtttgcaaaccctgtactagaggctgcagccagttttatatgtattaagtattagttagatctttgaacatgggcttggaattaatagtcccttcatgcttggaaggaagatacttctcggtatatgtgttttcaggttccaatccagcaggaaaaaagagaatgtccacttccctcatgactgaaaccaaagacttagaataaaggtcacttgacttaatgggcttgaattcagctgaatacccactcctgaattgcgacccagagtagcatatgcttatggcttaaggcagttagagcccacaccaaccacatggctaggaaattcaattttagaaacaacaaatgtccactataacaaaacttataaatttcttgggacagaatattttcttaaaaatctaggacattcttgaagcatgatgcacctttttctgaatttctaattcttggtgacatttaaaacagcatgattccttccaaaattgatatatgtgcaaaaaaagaatacattctattcaaagtcattagggaagcccataaccattcatatctggaagcacagataatataaatttcagatagtaaacctttcattttactgttgagtatcttgttgcatagtcagtagcgttgggtagtttgatatatttcctttggagaacactttctggttgtgatcctagccttattcctcagatggtttatttttatttgtcaacattggggaagcaattttcatagtaggggccattatctaggtcacttttgctttcacaggagcagtgcagaggcatatctcaatacagtgccaactgtcacaaggcaaacccaccctctgaaacaaaattttctagcaattaagctgcaagtggtctggatcataaaagtgcaaagatagccattatttcccttggtcttcctagcgaaagcaagggagaaattctgttaaactagttaaagaagattagtagcaaaagtctcaatcttagtaagtcagtctagcgtggaatcaaatgctatctcctttacagaagacatgacagaggtgattatacatctggatctggaactgagatagtgtaggttaatagaattattgaggaaattgaagacttttctttttttcgtgggatactaagtacagatggttcccgacttaagatggtttgacttacaatttttcaacttgatgatagtgcaaaagtggtatgctttcagtacagtttttagtatattacgtgaggtattcaatattttattataaaacaggctttggggttagataattttgcccacctaagttaatattaaatgttctgagcacatttaaggtaggctgggctaagttaatgatgttcagtaggttaggtggtgtaaatatatttttgacttacgatattttcaacttagaatgggtttatctgggatataaccctattgcaagtcaaagagattctgtattacaattatgagtcaaaagctagagatgtaagatcaacagtttataccctgagtccagttaataatacagacatgatccttgccttgtcatttggaattgcattttgtattacataatgaaagaggactaagagctctgaattttaatctttaaatgataacagctgcttttgaagagaagcggagcctagcaacaggattctttgagccacatttttagtagatgattgcaaagaattagggccattcctgagaaggaagaataagcagccaatcatgtgatttgaaatgactccctgtccttaaatccctccttcatcaatcatttactgaaatgcctgctctgataagggtcactctattgggtaaaggtattatcttcaggaaaaggacaagaaagctgagagacaaaaatcataaaattagaaaaaggactagattgggaatccattttagtcttgtaattggtgtatttggcatgaccttatcctttctgaacctcagtttcctcgtcatagaaatgagatgggattgggtgaattagctgataagatcccttccaactctgtatttttaggagaatgacacattaacagcaatttgttttagattatgtcaccttcacaaagatttctatgagtgttaaacataaaacaaaaatatttcagttcaggaatgtcaggtgatatagatcagtgccttccattagaaataaatgtaaaccacctaggtgtgaatttaaattttctagcagctacatttaaaaattgaaagaaacaggtaaatagggtgacatcagcaagatggcagaatgggagctttctgttgtcgtctccctgcagaagcattgatttagacgtataccacagacaagagtacatttgtgggaatccatgagtccagtggagaagttttagcacaccattagattataaaatctgagaatagggccaggcgtggtggctcatgcctggtaatcccagcactttgggaggccgaggtgagtggatcacctgaggtcgggagttcaagaccagcctggccaacatggtgaaacccgtctcaattaaaaatacaaagaaaccccatctctgttaaaaatacaaaattagccaggtgttgtggcacatgcctgtaatcccagctacttgggaggctgaggcaggagaatcacttgaacccgggaggcagaggttgcagtgagccgagatcatgccattgcactctagcctgggcaataagagtgaaactctgtctcaaaaaaaaaaaaaaaaaaaaactgagaatagacagaataatgagtataagaagaacagtttcactttatctatgtcacccctacctcaaggcagaaaggtcactgccaagagagccccctgcaaccatgacctgtgatttcttccactggggaaagtgggagtgtaatgagtgagtgtctggctccctgagacgtgtaggatgctgcctaagaggctaaactgtttgacatcccactcagaatattaaggcaaccagcacagctgagtggttgagaaagattgaaagcagggaagagaggccatggaggcttctaactactctgtagacctccatcagaaagttctccccaagctgcatgggatgcctcacctacagatcctttcccccaggtggtccacaggcactccaaatgctccatgcacctcacactcccatccccaccccaagccagctcccaatgcatgcactgcagatagcaagtgcaaactacctgtcatacagtcactgagctcaattcggtgggattcagagagggcacacaaatttgagcattagaggacactggccaagggcacgcaaatgggaggctctcagcactcagccttgcaggatcaagagaacacgtacagtgtaagaattacccactaattgaaatgagaagtatagagtagatatgtccatagaaaaggtctgagagagcctcaaaatccctagcttggctgtttggagaaagtattcctcacccaaagacagtaaagactgaagataactgcttcttctaatgcaaaaacagcagtgcaagacgttaagtaacacaatcctgtaaaaatcaaaaaataataataataatattctagtaaccaatttcaaagaaatggacatctatgagttgcctgaaaaagaattcagaataattattttaagaaaactcagtaggccacagaatacaaagataagaatacaagagttcattgattcctcaatgaaatcagggaaacaatacaagaacaaaagttcaattaagagaaattatttaacaacccaaacaaattctggagctgaagcatatactgaatgacattttaaaaatgcaatagaaagtgtcaacagcagactttcttatgcagaagaaagaagctgagaacttgaaaacatgtcagttaaaaatacctaatcagatgggggaaaaaaggaaaaagaatgaaaaggaagggagaaagaaatctacaggattcatggaacaccatcaacagagccaattgctgcatcatagactgtaataagggcaagagagggaacatggcagaaagcttatttaaagaatacttatttaaagactgaatacttcccaaatctagagaaagatatgaatatccaggtacatgaatctcaaagacctccaatcaggttccacccaaagaggaattcaccaagacatattataatcaaactgtcaaaaattaaacatagagaatcttgaaagcaggaaagaaagggagttgagaagtgatgtctgcaagatggcttacacatacctgccacttatgcccctcacaaaaaacaactgaaactcaattagagtgtcagagggaaagcattaaagtgtagcaagagagtagtgagattccctgtagtgttcagaagcccaggaaggcagcatagtgagggtgatggggcaccctgcctctgccagctcatgttccctgctgagattagcttggagtcaagagggactacccccttgaggggaaaaggtaagcaaaagatccccaccagcttccattgccactgaagagacctgcagttcttactacaagagtataccacagccgcagcaagccctgagcctagtttggggagctgcctgtagttcacacagctacattgcttcagattaggagcacaagttgtgcatccctcactttaccctctttatgtaagctaccatgatatggcaccaccttgaaaccagatccactgctagagtgtgtcctgctctgagggttggtagcctctgtgtgccaccaatcttgggtctccaccgtcattccaccaggcttacatgggtgggtgcccagtgctagggcccaggaacaactgtggactcagatcctgcacacgagacaaattaatcccaggctggctgaattaatgcaagctcctgcccctgtctagagaaacagcccagatgacccaccaaaggcatacctgctcttgagccagcagaaccaccatgttctctcacctccagctggaggtacaagccagcaaatatgtccctggcattcttatccccgaaccatggagcagttatagcctgtgcaacttatatgtggaatctaaaaaactcaaacacaaagaagcagagggtagaatggtggtcatcaggggttgaggtgggggttggagggaaataagtagatgttgatcaaaaggtacaaatgtacagtcataagatgcataagttctggagacctaatgtacaacatggtgattgtatttaataataatgtattatgtacttcaaatttcctgaggataatagatcttaaatattctcaacataatgaataaatagatgaaacaggtgaaattaattgtagtgagattttaaaatttttacattatatgtccaaaatattttacattcttttttccatattaaatcatcaaaacctagtgtttgttttacacctgcagcatagctcaatccagtctagccccatttggcatgtctcatagtcacacataacttatggctcactgactccttgggttggaaggcgctttaccaagacaagctcaaaattggacatggactggtaagatgactacttatgatacttcccatttaaaggatcacttaaactggaaattcagaaagtttaaaattacttcaaggctgggcacggtggctcacgcctgtaatcccagcactttgggaggctgagacaggtgggtcatctcaggtcaagagttcgagaccagcatggcgaacatggcaaaataccttctctactaaaaatacaaaatattaggcgggcatggtggcgggcacctgtaatcccatctacttgctgaggcaggagaattgcgtgaacctgggaggtggaggttgcagtgagccaagatcgcaccattgcactatagcctgggcgacagagtgagactccatctcaaaaataaatgaataaatagactacttcaggtccaaaaggaataaataaatgtaggtgatgaaatgtcttaggagatcactggggaaggtagtttagatcatagttccttcagctgctcctcaaatcacactttaaggatttcctggaagaactgaccctgtcccattaagactggcattagcccttttggagctgtgagtgtgacacacaagctgacatggagaactctgggaatgtgcttctgagggatacccggtatgacttcggggaattccagtacaatcagaaggaaaagcaaagtgtaaaccaaaagattaaccacgtgccctatattaaaatgttgccataacaagctaccttttttgttttagaagatgtaaattacatagggaaaaacttaatgagtgacaaacttttatccttaggcaaaatttagtctcttacccagatagcagtacctctttagcccagattacttatcttgggtaagtggaagcttaaccttctatccttgtgtttcagaggctaatttttttttttccattttgttgaacaacaaactcggtaatcccattaatcaaatcagggtgtgttttcttttttaattttatactcagctatagtcaaaaccatcacaaggccaagctgggtgggacctttggaaacagccagagccagaggccttgtgggtggcagatcttcgtaaggttgctctgtttgtggtttggaaccggacaatttatttcttgagttttccacctagaaaataaaatgtgtggtattttctaagtaagctttgtagacttacagaatgttcattttagtttcaaaaaagagatgaaaagctgaatacttatacagactgagtttaaagaattttgagagctagagaaacagtgtaaagaatgagagaaatcatagtattttaaaatgagttttcaacaggaattgcatactcttcttaacaactcatatctccttcttcttctccacaaagacaacagtgttgttattcaaaggtaaaagcacctgctttctactcctggtcttggcaactggttggaccctgaggaaaggaatagcagggcctggaggtggggagcgtctactgatggtcactcagctctccttcctctctgaagggcctgtccaggaaactccgtaggggcactgaagagtaagatagagctgagtccacagtcaagagcagattcctatgagagcttcctggggcgaggtgtgggaacagaatgcagacaaatgaagttctcagaacactttctacagacccaggcctcctggactgtgctagtgttgagctctgattgtaccattatattaaaaagtaagctttttaatgtttaatttttaaaaaaatgaaagtcacagagttcatttagagagcaatagggcagaaagggagaatgaatcaaaagaacggaattcacactttctttggatttcccagaaagccacgaacacgaactatataaataaaaatgtgtggttatttgctatatttaggcagtaggttactactgtactctgaagcctgacatgggagtagcatagggaaaagaaaaaaaaaaaaacctgaacattttctttttaaaaatgttatttccagcatagctttcatacaggaactctgttttgaatgcagatgctttcttaagtcagtaggtagtggtgggtgggccacctggtcaaggagagtctctgcaactcaattctgccatcatctcgtagtacgcagaagggagatgagcagtccttacttgaataagcagttccttcagaagctccttgttttgtttggtttttttttttttttttttttttttttggtttgtttctttgttttccattgtagagatctaggagcaaagtgtattgctgtgtacatgagattattgcttttctgctcattttgtcttaagatggccttttgccctgtctgcatgagaaaacgaaatgtaaggaggatatgtattcaggatttggttgctagagcagtgaggtctgaatgcaaataggagcagtcagttaaaattgcagcccagctgtattttcattcaggttgttactatcgtattcatgtatcagaggtcaaaaggagatattattctataaaatggtatgcagggctctagagagaaactgttcagtgagatccatgtaaatatatgtgtggatatgattaaactacttttcaaagaatatcaatagttgtaatttttttcaaaacacaattaacattcaacccaagtagcagtttacatggtcttagacacgataatttttatttatccctcgtagacattgatgctagtgaaaagggattttttccctacatatttgggaagttttgtttttgttgttgtttttttttttgtttttgagagagagtctcgctctgtcgcccaggctggagtgcagtggcgtgatctaagctcactacaagctccgcctcctgggttcaggccattctcctgcctcagcctcccgagtagctgggactacaggcgcctgccaccacgcctggctaatttttttgtatttttgttagtagagacggggtttcaccgtgttagccaagatggtctcgatctcttgacctcgtgatccgcctgcctcggcctcccaaagtgctgggattacaggtgtgagtcaccgcgcctggccatatttgggaagtatttttacagataatcgaagatcagcttaataaagaaatacagcaaaaaaatgtaataaggaggggttacacactgaagaaagaattttacttgagtagacaaaggcgccattaaacacttgagttgcctttggctcttggtggtcacaaaaggctttatcaaaacagcaaattttagttaattaagagagagagctcactgaatgggccaggtccaagaaaacggtatgtagattcttgtcagcagagatctgccattgcagttgtatttggtaaaattccatcccaagttatttttctgatagtggaattatattatgcttacactgctggaactctatttaccctgttggagcattcctaaggaaggaagctgagtgtggggctctgaaattatttagaattgacctgagaatgaatctgcagagacaaagataaaatctttaataacataaccaaaggtagcaaaactgaccctgaggcacgcatttttctggaactgtctttgtccttgtaaatgaaagacacatacctgaaagggctacattatgaagactaaacaacaatttcagagaatgaattaaggccagtcttattagttagaggcattgtcaacaacaggctacttgactgcaagactcttctttttaccgccaccatgctttccatgggctcattattaaacatcccatctcatttttaatgtgccctatctggaactatgttaatttttgtgtagtgattactttgtggcctgaaattatattagttaaaacatattgttgctgtttcagattcccttttctaccatctggctataaaaaattatcaaagcgaagatataatacttgaatattgttattatttgtttagtaccaacagcagattccgtcctgaattcatgttgatgaggctaatatcctctgacccagagaacttagaatcttaggttagtatggaattatgtatccaaaggtaaatgagctcctgatactttacatgtcaatttcatgtgagaatgatcaggcaagtagattccagatataaataatccttgacaaatccttatctttttaatgtatgcttttagaagacaaatgtagagcattctcttcatgttgtaatgaattgtaatgagacctagtaattatccaaatgaggactcactggagtccacctacagtggtccagtttctcactttattttgaagctcacagtgggcaataaagtctatttttcatgtactactacgtaagagattctcagggccgaatgaggtggctcgcccctgtaatcccagcactttgagaggccgaggcaggaggatcacctgaggtcaggagtttgagaccagcctgaccaacatggagaaaccccgttctccagtaaaaatacaaaatcagccaggcgtggtggcgcgcatacctgtaatcccagctacttgggaggctgaggcaggagaatggcttgaacctgggaggcagaggttgcagtgagccgagatcgccccattgcactccagcctgggtgacaacagcgaaactccatctcaaaaaaaaaaaaaaagattctcagaaaatgggtctatgttttatgaacctcaaaagtgtaatataacctacgtttctctctaaagagagagaaaaagccccagtcctaagcaaggcaggctatacctcagtgcactgttgaggatctgacacgtgtggcatcttgacaacagaggtcaagagaatatgcagtggaagtggacaagcctttgtcatgtggtggcttatgagcttcaatactgacagggtcagaccttagcatttttgtgaaaaacatcattggaacggtgggatactgaagataaaggtgtgttcccagaggatcctgaattaggaacacatcaggcatctgccatcaacgtgggtatccgtgttatttttctttttctggatttgccatattacgagttcaaaatatattttctaccgtgtatggaaaaatgtgttcctcctctttctgttcatgcactcagtggcgcttattccttgtccactgtgtgttcttggccctggggatatattagtaaacaaacgcaaagtccttaccctcatgtgatggtatctagtattggggggcaaaggaggaaatcaaaaggtttttttttttttttcaagtaaaatataaggctgacagatggggagaagtgctaaggaaaacataaagcagtaagagtaggtgttccagttttagattttgatggccagggaaggcctcagtgtcaaagtgatgttaaagtgcacacctgaaagaggtgagggaggggagggaggaagtcctgtgggcttttggaagaagagctttttggacagagaatagcaagttccacaggtcctcgaataggagtgtgtgccatggaggcagattcaagcccagggacagaactgagagactgggccacgggaaaggggtggcccatgggttttctagggcattttaaggattcctggttgagaagggttttaaggatgagaattaaggatgagaaaccactggagtactttgggcagagctgacacactctgtcttgtgttttaacagggcagtgtcttttgaaaggagtgcacgtggagggcaaggagggaacagggagagcagtcaggcgactgtgggaggaacccaggcgcaaggtgatgagctcggtccagactagaaatgggagaggtactgagaaatggtgcagttctgaagatagatggacaaaacctgctgactgaaaggatgtgagacattagagaaaaagaagagtgaaggagcaaagcttttattgtcaaatttccttcttcaccacttaagaattatccctaagctttctccctaagtactagagtgctaatcatttcctagaacctgaaagtggttacagacacaggcatacctgagatactgcaggttcagttccagagtattgcaataaagcaaatatcacaataaaacaagtcacccaaatttttttgtttcccagtgcatataaaagttgtttatagcatacagtcatccgttaagtgtacaattgcattatgtcttaaaaaacaatgtatgtaccttaattttaaaataccttattgcctaccaccttctatcagaatagcaaaagaagctgctttcataaactgtcctagcagacttctacttacatgtcaggggccaaatctaggccacagggcagcagtggaaactaacagagacaagggtcatcacgcctgctttaaaccataattcctctcatggggctgggcacgctggcattcttaataaagcgcacagttccattagtacgaaagaagaggctgttcaggaagcaggaaacaccgtctgccgcaatatgattgatgagcttcttgggtccatgatgaccacttgaacactgatcattgttttcagtctctgagctggtgtgtcaaacctttaaaaagtaatttactggccgagtgtggtgcctcacgcttgtaatcccagcagtttgagaggccgaggcaggcggatcatgaggtcaggagatcaagaccatcctggccaacatggtgaaatcctgtctctactaacacaaaaaaaattagtcgggcttggtggtgcacgcctgcagtcccagctactccagaggctgaggcaggggaattgcttgaacccagtcggcagaggttgcagtgagccgagatcgcgccactgccctccagcctggagacagagcaagactccgtctcaaaaaaaaaaaaaaaaaaagtaatttactaatatacttcttgctgctcctttactttttcttacacaccagctttcatttaaaacttaaatttcacaatcggtcttaggaaaaaagatgcaaatcacatcttctctgaaaggaagaaaggaaataaagtctccaaatgatgctgttgcatagttaagaaatatgaccttcctactgcccagaaagagaatatgaggcgaaatcaatgaagagagaaatttcagttatgtttcttgcccttgctctccagagcatcattcagagttatttttctttattctgagacaattttattttgtcctcaaatcctctggatagcatttacatatgtggttgagtctgtaatcctagagatacttggctaaaactaatacctgctggttagtcctgaagttaaagttacgttttcctaaaatgttttgaagaggtatatttggtttggttcagtaaaatctagactcagagactggtaaaatgcaaagctacatttctgggttttgtaacctgtgtccctataagccttttttaagtcagaaatggggcacggcgtttgcaaactcatcaaccctcgaaggcttccttaacagcagggcaggctttgttttctggcccctctcacccccttttttctgctttgtctttacttctgatctgatgactcatgcactgccacacctctgtgctgtgccttttgtttgttgattgacacactgatgtaatttatttaagacaatagctttgcagctggagctgtaaaatgagtggatgagatggctttccttcatgtatttttcaggtggattttcctagtagtatcactttattcaaagactactggaaaactgtccctatcatcttttctccttttgtcccctttcaagtgatctaaacaatttttcttcattctcttttcattgtgtcaacgctccagcttcatgaaatcgtatgccttacgctggtttcctgaatctatttttaaacttacctttagactattttaccaaactttgtttctgttgggggtagttcttttctgttttttaatcttgccaccaaggcagtttaggagtagattaattaataaattcataaaatgaagaggcgtttagaatctttatgtcctgtggatattatcttgttcagtcctctgatttcatagtgcatctactgatgggtgatactgatgacattttttactagcaaaccttatgaaactatcatgtggccttctgagataatgcttagcatgctattctgtattttgttacttctttattgaaattggaatgtgtgtttagtaatgctttaaactgcaaataacaatacttgataaacagtggtttaacccataggatatttattattcatatttaacatgattccagaggttgtagccttagggttggatccagctcatcatgtcaacatggctctctccgtctttccatttttcctcaggtgcagcatgttgtcctatttcctcatacctactgcccatgtcacggggcagcagctttaggagtcatgtccatgttaaggagggaataagagtaagaggctaggccacgtgcagtggctcacgcctgtaatcccagcactttgggaggccgaggcgggtggatcacctgaggtcaggagttcgaggccagcctggccaacatggcgaaaccccatctctactaaaaatacaaaaattagctgggtgtggtggtgtgcgcctgtaatcctagacacttgggaggctgaggcaggagaattgctagaacccaggcggtggaggttgcggtgagctgagatcatgccactgcactccagcctggatgacagaatgagactctgtctcaaaaaaaaaaaagaatgagaggctaacaccagtgacttctccttaaagtctgtcccttttatcagaaagcaaaatctctttcccagaagccccccaaaagactcttccttacgtcttactggtcacaatatcacatggcccaacttagctacaagagagactgggaaagtaagtatctctggttttatcagtctttgtagtgaaaggcacatgagagtagaaggagttgagaatggcctttgactggccaaacaacagtgtctgtcagaggagtcatcctaaaatctatatacatataatctatattttcatatcaatggaggtaatatagcttaagagccgtgggttttgaactcagattgccttggttcaaatccgagtttcatttcttccttactttgactttgaacttgtctttgcctttgttgccttaactgtaaagcagggatggtaagttatcagttgtgtatgaatattgtgtgaatgacctgtgttaagctgttggtactcaataaatgtcatcatcggcaaccagcgctcacaccccacttgaatcctggccaaccccagaacatactgaatgtctagcagctttttcccattgttaaacgaagcagcttgaaaaggtagcacttctaaattactaacttaaaactgacacgtacaaaaccccaatctgactagaaaaatccctaagacggatgtatagtcaaaacagaatttgcctgcctttgttgggacagtttatatctgacatgttctttggtttagaaataaaacactttaagctttctataaattcttcatgcgttgaggcaggatggtggaatacttactttaccagaatgtgtcaaattaagaatctgagacccttctctaatttgcaacatatatgatagttctatatattgattgggatagaaactggaagaaaaaaaaagtgccagagccatggaaaaagaaaaaaaaaatcttagatatccaagagacggaggaatcaaggaactgtttgaaacatagtaggtactcagtacatagttggtaatgaatattgttgatttggaaaagcatcagaaaataacttgaaattctgccagcttcatactgttcatagcagcacctgttcataataaccggagaagtgggtaatccttgcagaaaagcaacggagggaaacccagagcagcttctagaaggtggtatggtctcataggggactgactgtccaggagattagccacggaatggtccctcaaggcaagcctttgtagggttacagggagtcagaaaaagagtaaacaaccatatccaagccagtttcttgtgaggcctggactacctggggaggctcaggtgactttggtacagagccacaagagccatgcagccgccgaaaaccagaggtgacagctcctccaacttagacccttctcatgcctgagtgttctagattcatggtgttccatctggtagccagcaactccaagttgacattctgtcagaatctagaacaaatgagaactaaaattctaacttaatttcttatctacataagacagtctctgtagttgcctctcatgtgcccagtaagtgcccaagtaatttgtcagtttgggaaatgaagcgaagtcttcaacagccattcacactctccaggtgggtaatacacaagtgtgctgcacacgtgcattttgaacagttttctgactaccgttgttctctggctttgccttcagaaaacccgctatgaaatgtatgtcagcattctcaaggaaggaggcaaagagctactgagtaacgatgaaagcgaggctgcaggactgaagaagtcgcactcgagtccttcgctgaacccggatacttctccaatcactgccaaagtcaagcgtaacgtgtcagagaggaaggatcaccgacctgaaacaccaagcattaagcaaaaagttacttagagtccatctgcggccaggaagtgctggtcatggagcaaaatagggtttttcaagatctttctggtaatccgtgaatatatttaaaaaaaaaaagtctgtgacaaaacggtgcattagtaattttttctattgtatatttttgttagtttctgtacagattgtctttgctcttgatttcttttgctttgatgatttttgcaacttgatagctaatgcaccttttctgtgaggaggaggggatcgtgatttcagaatgaattatgtatcccttctcttttggttttctcttgtttgcagtctgctcagttgttttatgtattctcatatcaactgttaaacttttttttaaggttaaagaatttaatccattgtgaaacacttaactggacaaactgtagttttagtaaattctagctggagttaatatacgcctttatatgtgaaatcttgcccagtcacagaggtagaattgagcactcacagatgctccagtaagaatcacagtgctgggaatctagttgctccaatatgaggcagcttcatgtgcagcttagcacttgttgttgagatcggaccctgctggaagcagggaaaagaagcgtgaagatcgtaggattgagaacttagggaagcacattagcttgcttgaagtgctgattccatttcagccaagcaagggaaagaggaagtggagtcattttgcctttgaaggctgaggaaagattgatacccagttaattttgtttgctaaaggatgggggcaataatcggcccttgaggagctgcagcagtaggcatgtgctcagtctgcaggaattgttacctcactcccacagggtctagactagaaatccatcatctctatcgttgatatccttccatccaggaatagatttttcttactctacatatgtgtgtgtgcgtgcgtgtgtgtgcgtgtgtgggcatggggttgtgtcctggttgtgatattgaggtcttccttcctaacaaattaatactaaaatgaaacagcttttcttgtgtccttaagacaaaataaggaaggaaaacgtagctgcagttgtccacgatggatattggttctttaaaatatatctgaaagtagtagtcagaatgaattatggttggaaaactgaggaatcttctggttgcaggtgcaaagtgactttgtttattcttgtctcagtctccttgatagccacttcactctgctactactcaactttctcctaaaaatacttcatctattttcagtcctttctttctgtctactcaaaatggttctattaactttgcagtcatgagcttgttccagttacagtccctttgaagttcagggtgataaacagaatattcttctgtagaggaagagaaaggagtgaaagtttagcccactgagacctagagctttgtgatttcctaaccttgaaactctgtaatccctaaagttaaaatctccgcaagtggcacaacttcagaactaatagtatcactttgatttttctttttcctcccttagaaagtttctctagttctatagtttatttgttgaaggtactatgaccaaagaatcagctgctctacaggaatagcatggttccagtgaattagagaaaacctgctgtaaagccatggtagtgtctaagtggtatgttattatgatgtactagcatttatttacagaattatttattaacgtttacttccttcccctctgtaaatgtccatgactattgcccagagaaggcttacccctctctagggttgcagttgctttctttgtaataagtattttgccacacctgtaaaaaaaaaaacctcacttttaactctctgccttgtttgggtaaaggcagtaactaagtttatgtttcagaactgcaaaacaaacaggatagttaccaatatggcccatgtatcagattgatttttgtagcctctcactgaatccaacatatccacaagcaagttatctgtctttctacctgataatctaaattatcaggatatttgttttctgcctaaatgtttatactaagccgaggggagagaggtacctagaccatgtcatctacaagcttcagtaactaaagaaaaaggaacttccctgagtggcttgaatgtgtttgcccacagtctatatctatgtatatagaatgtctgtatgtattttacttatttaatatacattgaatggtaccttgctacagtatttctgacatttagagtagtgttgaaatactcggctagcatcagcaccactatagcactgtccgtgtcatatgagtcactaatattaactccagggacttctggataggctaatagatcattggatacgaagggctcttttgaagcttcagtataccatgtttgcatagtttatctttaaaaacaactttaaaggttcttttgtgagccaggatctcagactgccgtagcatgatgctgtccatctttagcgcatgggctgagaacacctcttccctgaggcttctgaaggttgctgtctgtcatgagtgcatgaaggaggccaagagtttatgctatgggaggaaacagtcactgatttgcctagattctgagagtctggcccatagccaaccacattttcctttgggataatttatttcctgtggcatctagccagaagaaattgaggatgtttcctttcacagctgctccaagcctgttgcccaattcacggtacaagggagcaccccttccctttcctctgaaggtacgccacccacctccgtcgcccacctcagcgcccaggagccttgggacttccttccatatgataaatcattcttcttcacgtcaatacacttcatattaatttctagtacagaaaatcttgacagctatcagaatgccttggtcatagtgttgttgcaaaattgaccatacaggtggcccatgtataaaatctgaattttaggggtttgtccccacctcgcatgctggcttttacagggaggtgtctgggattcctcattagcaatcaaaacttaattactgggatgcagagtccttactttatcgccagcccgtaggcatttctgaagtgcacttttttgaaacatcattttgctaactctcagcagtgtctaattaaactgagcaatacttttgtgaattttaattaatctcagcaaaaccatgatgggagagagtcctctgatggaaatgtagtccctggattatgtgtaacctttttattcctcttagatgcagaggatagaaagcattttttggtgcagtggtcttgtggcaaacacaagaccctctatgcgtctccaactgttatcctaatctagaaaatgaggactggcccctgggcaaaagtgacatgaggaatttactctggaagaggaaaatctgggtggctttccaaggctaagataggtttgtatttcaccctgtggccaagctacagaacttctgagattgtggaagaatttttgcaaccagcagggaaagaggcctcttactgcctaaacacaaagttacactgagcttttctactgtcctttgcctattgctccctctatcatgtaaagatctgggaaggatgagaggcagggcctgcttgtcatgagctgcactcttttctttttaactaatcattgacaattggaagaaaattgacgttaaagaagtttctccattgtcttactaacaaaaccttttgggtttcattaattgtccttgaaattgagttcctttggcatttttccttgcagtcatcagttaagcatgttgcatcctgaattcacagaagtttagctttgcaggtttgaatctctgtaatttaactcccgtggacttggtcgagttttcagcaggttgggagccacctctcttcatttcagcagtgagtcatcccttgacttttcaaatgacagaattttttccaattgtaaaattagcactgtaaaacaaagaaccaaagtggcatcctaagagttgttaaacctgaagtctagtttatgaggaattgtccaagttggagtttaaatagtatctgcttttgtctcaaagcatctaagttattctgacagaaaatggtaagtcagctttgcaggcagatgcgcctctgggcctcctaccttgctccacagctttctggccatcttgtctcccaggccatgccactgctctgccacatgtcagcaaatttctttccaccagtcttatagcatcttacatgatcaaatcatcacagaataaccccgtgatagattattgatagcaatagagaggggctttgtcactgatttttctctcagattccttttccatctctcatccataaaggaaggactgaaatccaaaggcattctccttttgtacctacagtatccagaacccacgtgggcagccttctgcttatgacaataattggcccattgcatgcagagagaatgtcttcatagagagaatgtcattaaatacttgaatctgcatgacagtttgacttgaatgcaacagcaggaaaattttgcaagttacataattgtatatacagtaggttttcttaagtctcttcggttcatcctttgtaatttgtgtgtgtatctgtagtattgcaggcttttggagactattcttacaggcagtatgtcagtcatcaaagaaaatgctgtcacctgccattgttgtatttgtgggtatttatagttgtatgtatgtaaatgcatcagtgtgtagattgcatatcagtgtatggtacatgtacatcaaaattatttttgtccttaatcagtgtgatatgaaaagcaagtacaacctcataggactgattatataatgaagttgttgagagtatatatagtggtattgttttattaaacttaaactcaaataatattttgattaaaatttttaataagactttatgctagaaaattctttgagctttgaatcaccagggcaaaaatgactttcaactaaccttgtgaatcttttgcagtgtactgtgtgcaataccaagggcatagctccctgtaatttgggaaatacagaaagaaaagaaaaaaaaaaaaaaaggcagcctgtgcagtcttagtaactttagtattaagagcacttaaagtcaaactgacaattttgggcttattacaaaatgtgatgctttaaagcacacgttctttattgttgttgtaattagtccataaaaaatatagctttcggaagaattaagtacccaccatatcatttatgtatttgtgtatgttttacgggagatcaaaccactctcgtggtgccgcatccgtactcgcttgacttggaagaaatatcacaagcactaaagtatatcagggcatcccaggattgggtactgtatcctaggtttgcagttgcagaaattagcatctagtgtcacaggtaaaagaatttcaggaccaggtttaaactttattttaaatatttttatacttaggtctctttttcctgcctctccccaaagaagagccactggccttagttgtttgagcttactgcttatattatagagtgtaaataggtaactagagactaaaattttattaaccagcatgtttggtatatttaaagcagtgactgagtgtgtttgagtgagtggctgagtgcagtgtcttttgtttaaacacactgcctcgtgtctttgtagctgattcagagagtttgaattgtggggtgggagactaacttcagctccaggctgcagtaatgtgttggtagttacacttgaggcatttttttgttgttgttaattaactctatagtctcaaactatttttgcaaatatatcatttttcctaattggttcttgacgtgcagtggactggctctgtgaatgattggcagggtcttagttttgcgagagtatttccttctaagaattattgtgatctgcagaaacagccatttgattcaaaaatcatgtagaaaaggagtaggagaagcaaaacgtttcatttttgggccttaaccatttgaaatgtttggactttaaacataaagccatggagtttataaagccaagtaaccatttgatatggataataatatctactctagagagagtatatatatgcacattgatttttaatgctgttaagatacttttgtaaaactgtaggaacaagagtaattagaccaaattgaagcttaggggacagtaaagtggttgctttccatttagggtaaccatgcatgtggttagtcctctcctcctgagattcagaaccagttgactgtccccttaggtgtataaggagaaaagttgacatgtctgggacctctgacatgtgtacacatgcttgcacacatgcacacacagtgaatgttttaagttatacaaacataagaccttaagatgcaaagagccagaatattctaaagaggtgatgaacagagggggtggaaactgcatcacagatgttttccaagggccagggtggaatctgagctctagtgtctgactttgagatgcattatatttttaacacataaatgaggggatccatatcacattctttcttgtggaccaccaaattgaaggctttcttgtaattcacaagcagcagctctccagcatctctccgtagcctgggtgaagtcccagaagctggtgtgcatcattttccaaggtggcagagctgcttgctctgcagatcattcctttgagagaggagtacaagtgaagaaacaaggaggcacttcctgtaggagcactgatgtgccttgtccacactcccctctgagctttactggtaagagagctccgactgaacatgctgagcagttgagcacttttccatcagcaacaacagcgaggatggaaatggaaaggaaccgaactaaaatgcatttccctttgcagggcagagagctaagctcttaggaatagtgttatagaaataagcaccctaacttcaattcctgaaaatgttggttaatggagagaattttggagtttcacttaatattttcccatcggtcgccataaataagtcttcaggcgctcctagaagagtcccagcccaaggctcgattaaggaccacactgcaggtctgaggctcactgctctgagtcctgaacaccagagccctgcagagagtggtgataacacatcatctctgcaaagaggaacctctcccccggccgccacttcactcaggcttctactgagcagcaaggacagcctgggtttcaaatgccacttcccctgctttagggatccaggtgtcctgatagcgtgaccctgctgaggcaaggtatcaactccgagagtgactgagtcactgagcgtggcacatgaacaaacgtcatgacaaagattctctgagtgaagttaacaccacgtattttacctttgcaaaaaacaaactggcaccctgagttctaactacggacggacgatatctttgcctccacacccagattcctggaaatggctaacgtttcctttctaggggaagggtcgaggaatactcaagtgctagcttagcagctttgttcagtccagatcagagctgttaggtaaaggcctaaccacctccctgcagtctcttatatctcaagctttaggaacccatttctaaatgtacactagcggagaatttatattgtcagccttgattaccataggacaggcagaaaggcgataatttgtatcttttaatataaaagaagcttttaacttttccagcctattataataactgagttatattcactgtggctcaaactaattggcattgtggaacatttctttaccttcaaagttttctccaccaatcatttcagttctattgcagtcctggtgccatatgtcccctgcaaattgtgaaagtaattagtgacaaaatagcagcctgctccttttcaatggcgaaactgtcggcattagcagttttgggtaagctggcggtactataacacgtactggaaacctgttcctcatcaccacctaccagattctggaaatgccgtcttctagaaaacgatggcgtttgtggtggtcttcttttgaaaggaacagtaatttgtgtggatattgttaaagtgtttaaagaatattttgacaattaagtttacattttacaattgctttattttttattaaaatagttgtatataaatattaccctatttcactgttgttcaagtaaatctaaaccttgtagacaagtgagtcatctgatatgtatagaagctgtgatatatagagtacatttattgtgtaaatgtttatgaatataattgttcctgtgtttttataagttggggatattttgttgttttacggcaacaaaatttattgcatttaaatggtttttatgtaatagaaatcacgcaaaatagtgaaggatttaaaatatgtatatgatacatgtaaatgtacaaactttagaaagaaataaatccaacaaatttcaatcatttgagggaatgtttttatttgcttatttaagcagctataataatacctttaaaaatcaaataacaccacactctgcctgcctccataaaaacacaaccgcaagccccacattgaaagatgccaccagagtggttgaacacagtggtgagaaaatcagactaacaccgactcacctccacacatttctgtgaagatttgtgtttgaacacttcagagatctgttgtcttcactaaggggctttgagcaggggaggagaaaataaacttttagaagcaatttcaagagccatttgcattcccatttatttctcatcaaggcaaagagaccatgcagctatttattgtcctaaaatgcaaatgctgatctccaaatcactgccttactctgcctggtgtgtacctttttactcttttcatcaaacctaatgttaaaagtaagatccgttgacttggaaattcaaaaataaaatgccatcctattcacttctaaatattagaaaggatgtcttatgttgggggatttggactttttgaaacaagatcactggttacagcctctccagcacaaatgaacatgatgtatggcagagatcaaaattgctatgaggtgtaaatctcaaagaaatcaaagcattgtggggattgggagagctatatcctttaccatcccttcgctttcactccagcttggaatgtgaaatgtgtctgaagaccaccaggatggctgactagtagaaaggagagctttattggccatatcagtttgcaaactcggagagtggtctccgaagtataccgaaggtcctctctcttcaaagagggaagggaaggttggtttttatgcctcacagggcctgtattacacaatagagtcatacatattcagcagtgggtttggaggaaaagctatccatatgtatgtggggagccgagcgcatgtgcaataggtaaatatatgcatagcatacaccctacgttcattttagggcaaggtgttagcattaaaatgaggtgtaatttggctcttcatgttgaaaggtggcctataggatactaagtttgtgcacagtctctagaacctgctgaaactggtttgagctctgcagtttcttaccaggaaagaatgttcgtaaggctggtcttctttccaatcagcattgtagtagttgtattaataattcagagttagaaagggtcagacaatttgtctgtagctcttagtgttagggagtttatcaagaatgtggtttttcttgtagccataggaatttaggggccgtgctagtcaggccctaaagcctccacagcagataaatttgttcccttaacctcagggttcatcttagttgataaaagagtgtctatttcagtctctcagatcacaaactcaaatacgaatctctccttgtcagctgcctgtcctctggaggtggggggttttgtatcctgttgtattctctgtattgcacagttaataacagcaccagtgggactatagagatatttgataactcatagggggaaattaaacgtagagcaaattaaattgcataaggaataaatagaataaggatacaacaagcaactctaaatgtctcatctctagatcaattctattccacagaactgagattcatcaatgagactgctcaatcactgtccatttttattgataaattataagcaataggaaatattgcagacaggcatacatctttctaatattagtggagaagagtgtgcgttctgtatgctatagactagtgaacttgatattaattttgggcatatttttagagtaaattggaagggcagcagcaattaattggaagccagtgtgggttcccaaaaagaaatcttttcagactccatttattccctattttataagactaacctgtagattagaaaaacgcaggagacaaaatatctggaccataacaagggatttggcaaagtctttaatgaaatatgtctgggcaaaatgcagaaatattatctggacgttagtagagttggtgggtgtgaaaccacttgaacgacactgattaaaggatatgtatcaactcggaagagcatttctattgtcccgctgcaaagcttgccttttggccccatccattcaacattttaattaataacttgatggaagctgcagaaggcaagtttatgaaaaatggttatgtcataaagctgggagaaaatgattacactaaatgacagaatcaggatttgaaaaaaaatctcatcaggcagagaaatggggcaaattaatgcagaatgcaagagggtgtaatgtcttacacttcagttacaaaaaaaacaattaaacaaggtcaggataggacattgtgtcgcacagaatagcgagtaagtgggaaagaaagccttcaactgaaatccatagcaagctcgatgaaagtcaacagatgatgcaccaccaaaaacactagtgccatcttgggatcttgggttacattgatgtatggcttcttttttttttttttttttttttttttgagacatagtctcactctgtcgcccaggctggagtgcagtgacgcgatctcggctcactgcaagctccgcctcctgggttcacgctattctcctgcctcagcctcctgagtagctgggactacaggcgcccgccaccacgcccggctaattttttgtacttttagtagagacggggtttcactgtgttagccaggatggtctcgatcttctgatctcgtgatatgcccgcctcagcctcccaaagtgctgggattacaggcgtgagccaccacacccggcctgatgtatgtatggcttctaaaacaaggaaggtgagtcgcagtgcccttgacaccaaggctaaccctgggtaaattgcttgagacttggcacgtacacgaaacagagcatgtgcaaaagcagcagccagggtgccccaaaaatgggagcaattgagagaaatatggaaaacgtatgacctggaaatggttaacccatgcagaaccagggaagactggtcttcaatgtcaaaatgagtctttcgtgggagggacatgagaactgtcctatagcaatctaaagggtttaactagattagttattggaacttataaaaataagatggcagctcaacagaaaggaggcatttctagtattccaggctgtccatgacaaacaagttgtcagccagtggagcagttcaagtgtgcttgggcaacctcaggtggaaatactgagaactgagtgaggctttgggtaagtggttggattattatgatgatagacaatattattacaaatattttctgagcctggcactgtgctgaacacttagcatgaatttttggcataatctttttgcgtaagtctgatgcagctctattatttacaccattttacagagaggaaaagcctgcatcaggcccccttcttcagacatgctgcagcatttgaacacacctcaacatcttctgttttgaactacagaagtcagagctctgacccaccaactttgtcagcttcagattgaagaagcaatgattccactcacgggaataggatgtatgggtgtcatccaggaagaactggcaataaaaatagtcactttcactctgcattggaatcccatggatttaaaaatccaaatacttgggtctcacccaagaaattctgattaaattggcctgaactgtggctggggtgagctctgtcacccagagtggggtgcagtggtgacatcatagatcatagctcacacagccttgaactcctggactcaagaaatcctcccatctcagcctcccaagtagctgggaccacaggtgcatgccaccacacccagataattttcaaaattttttttagagatggcatctcactatgttgcccaggctggtcttgtactcctgaactcgagcgatccttccaccttgagctcccaaagcgctgggatgacgtgggagcctccacatcttgcttctctggaaatgttaaaagatccccaggtcattctaacatgcgcagccaggattgaaaaccacttccctagagtttggcaactcagcctgctcctgctgcatctctgggagcttgtgggaaaagaacaatcttacgccccttcccagacctagtgagtcagatagatgctgcgttttaacttgctctcccggtgatgtgtacgcacattcaattgtgagaagccccgctttaaagcattcccaaggtgtgctccttgaagcaacagtagcagcatctcctgagaaatggttagaaatactatgcagccatagaaaagaatgagatcacatcctttgcaggaacctgggtggagctggaggccattatccttagcaaactaacacatgaatggaaaaccaattaccgcatattctcacttataagtgggagctaaatgatgagaacacccagacacaaagaagggaacaacagacactggcgcctgcttgagggtggagggtgggaggagggagaggatccgaaaaaataaatattgggcactaggcctagtacctaggtgatgaaataatctgtacagcaaacccctgtgacacgagttcacctgtataacaaacctgcacacgtaccgctgaacctaaaagttttaaaaaataagaacaaagaaatgcacttctctgccctatcccaacgtactgaaccacaaactctggggatggggcccagccatctgtgcttgatcaagccctccaggaaatgctgatgcccctaaagtttgagacacactgtttagagtaacttccatggctaccaaagcccttcatgctcacaaagggcaacagggagttttccgccatttttgtgcttggtgcaatgctgcccgctgtcacttgcatctcttaactgtccttgtgaagaagggagacgaggctatccccactgtggaatgaaatgttaactggagagtgctacttagatggccagagggcttccctgtatgtaggagtgaaggagactcagccctggcccattcttcccgtctagaagtaagcctccctcgctgcttatccccacggatccaccttgaggcacctggcctggcctggccctcctgaaatggaatgcagtgcatgttcccactcatgctttaaggacaacctgttcctcctttctaggcaaccttccctggctatttagagctaattctctggtaagcacaccgtttacagaattctggccacaccgctacaatttgcaaaatgcactcacggtctggaagagtataaccagggaacacttacctggtagtctcctgggaatacaactgtgatcaaatacaggatggccagtaacacttgaatttcagataaagaagatacttttttagcagaagtatgccccatgcaatgtttggaacatcctcatgaaagaaaaaaaaaaaagtactcattgtttatctggaattgaaatgtaactgagcatcctgtattttatctggcagctctacccaggaggcctcctagggtagcatttcctcatgaattttccctttctcagcttgaaaggggatactggcaatatctttggtttttcagacttacggaggtgttggggctcacaaaatgataccctaaaatatggcgctttgacatgctgagtgctttgaactaagggagattggaaggcctcagaagcagcctcaatccaagtctctcttacctcctgccctgctgtctctcaccctgacactcacccaaactgcggcatagaagccagaattccagatcaccccgtttctgcacctgcagaaacttcttcacactgatcaaactcagaaggaaatgaagtgtaaagctaaatgccagtaatggatgtaaaaccatcacgtggcctggaacacaggtattgtggtgacaaacattttctccttcaggcagatgtacagtggaagtcaaattagaataagaacagagattttggagtccagagaacctgcctataactccccactctgccacttatggactaagtgatctcgggcaagttacctgatctgtacctgttttcacattcaaaaatgagaacacctagctcatagggttgttatgaggcttaaatgaggcagtgcatacaaaacagcccagcacgtggcccttagtaagcccttgctataataatggtaaacagtattaactaacattactttattaacatcattcattccattaatcatcattgtcagctggttttttcctgcttctggcccagaaagaattatgcctttagcacatacctgggctcatccactgtgtgtgttgactttgtaatttaactcagcagaattttggagaaggctactttgctaacccttagcttgcacatagaggtgaacattatcatttatcatttatattgtctatttttgttaagatcttgatcctctagaaacatcattttccagtgtggtagccactaaccacatgtgacaatttaaattcaagtcaggtaaatttaatttctgcaattcctattaagtgtttatatcagcaaggggtattacattttgttaaagctttttatacaccagtggagataattgtatgattttccccctaactttaccgacatggtgcattatatggacaaattttctaatttttaaccattttatatttctaggtcaaacctatgtcaaaagacacaattacaaggaatatagtttaaaaatctgatttttgtttgccattttagaatcaggcagcatttctttctatagaatgagcgcccaactaggcatgacagagcagttggtttttggaaggtgggaacagggaaacagaaaaaagtgggttggttaccaacaggttacttcagtttattttttcatgtaagggttaaagcagaagaaacttccttttgacactgtctgaggttgactgggccctctctgattggttgctgtgaatctcctattttcaggaaaaacagctctgtttgtggatctacctgattccttcaggtttcagttttattctgtggcacttatcatgagtggctccattttggtttggtttgttggcgtctaaagcaggagctcagtcccaaacactggcttcccataattttgtttaacacctacacaaaataatccaattggtcattattcattattttaaaatgtgctgtcagattctctttgctaatttttttgacttttgcatcaatattcataagtaaaattggtttgattctttatctgtatttattcattagtgttattcttgtgtcataagaagaattttgaatttcctagtctatatttcagaaggttagaattatctagactttgaaaagctgcctctttgaactatctgggtacagtagttctttacagagttgatgtctaataacatcctctacctttatggaaattggtccagtatggtgcattaatgtctactagggtcaattttgattaattgtattttcctaagaaattatacactccatctacattttaaaatgtattttacataaagttgtgcaaagtaagctctcatggtttttgttcaataccctgtgtttcaatgactagtattggggctcagaagataatatgccaaagtgtggctcttagaagcagcctcagaaccaaggtctctctgaacttcttccctcctggctctctcccctcattccccactaaactgacccatagaaatcagagttcttcttccccaagttgggtcatagaaaccagaatccctcttgcccaaagcaagccaaaaaatcctagaaatgttactctacccttcccccacctttccataaagaaattctaacctaccttatctgaccataagaccctcattccagaaggggtcctgccccacatccaggaggaagaaatgctacccagagaggcaaagaagaatcccaacagggcttgctgctttttcctcatcagtctactattcttagataataccctttttgtccaatcacactgctagctttcattgaaccaaagtataaaaatagacagctttctcttggtctttgggtctttatttctgaagtgtcctgtgtcacctaaaattttaattacataaattttttatgcttttgtcctttaacctgtcttttgttataggagtgttggccatgagttttacgatgggtgaggaaaggtatcacacctttctgcccctgcactagtttccccatgacatttcttattttgtgaatttgtggatttttcaatttttccgtagttaagttagagtctggtttgtctatttctctgcctttttcaaaggtttttctgttaatttctgttttaacctgtatttttttaatgctttctttatataggattttctttttctcgctttttgaattggaagtttaattcctttacttttattctcaagtatttaataataaatattggttattatataatgaattaagtatttaatattttattagataatttattaagcatttaataataaatattgttgactttgtctctaaaaatttatttcttttaataagtgagtcatctccattttaactgtgaaatgtagtgattatatcatgttttcattcttgtaactgaaaaaaaaaattttgcaattaaggtttccatttctgcttaaacccaggcttgtttgttagagatatttttcatttctaagttgaagggccttgttaaatgtttgttactgtgggagaacagaatataccaccccaaaatatgactctaggagaccagaatatgccaccccaaaataagcctgtttagcatgatgattattttgagctgattattttgagaaactgcagacagaggaaaagctccaaaaacgggtagaagttacccttttgtagaggaaatctacatgtacaaaggaaaccttcatttgtaagagtgtctccctctgtaccaggaagaggagaatcactagagagtcttctcaatggagaaagcatggacttgatctgcataacacaccttaccctcgtttgccaagcttgtgctgggcacttacccgtaaatggcctttcccactccattctttttttgctcagtaggctaaggtattaaaacctgaattcacagtgatatgacttggctttgtttccccactcaaatatcatcttgaattgtaatcccataatccccacctgtcatgggagggacctggtgggaggtaattgaatcatgggagaagtttctcctcatgctgttctcatgatagtgagtgagttctcacgagatctgatcactttataaggggcttcccccttcacccagcacttctctttcctgccaccatgtgaagaaggatgtgtttgcttccccttcggccatgactgtaagtttcctgaggcctcctcagacaggtggaactgtgaatcaagtaaacctctttcctttagaaattacccagtatcaggtatgtctttattagcaacatgagaacagactaatacacacagccaccactttgggatttactcatttctctgggtatctccgtgaacccaaaaagtatctgggacaggtctcaatcaatttagaaagtttattttgccaagattaaggacacccccatgacacagcctcaagaggtcctgatgacatgtgttcaaggtggtcggtgcagagcttgggtttatacattctagagagacatgagacatcaatcaatatgtataagatgtacactggtttggtccagaaagtcaagacaactcgaagcaggggcttctggtcataggtagataaaagacaaacagttgcattcttttgagtctttggtcatcctttctctgaatacacaatttacatgtgagaggagtatagaataatagtcacttatgccttagactgcctcagtgaatctgcatttttccatgaacaatagggtagaggaagcaatcagatatgcatttgtcttaggtgagtagagggatgattttgagttctgtcctttgtcctgcacctgtgaaaataagctatcaatttacattgccaaactgaaattcaaaagaactgttttaggggaattactttgtggacaaattgtgagggaggtatgtagcttatctttgtagctatcttatttcggaataaaatgggaggcaggtttgcctgatgcaattccaagcctgactttggcttagtgatttggtggtcccaagatttattttcctttcatattcccatgtttacctgaagtatgcatgctaattaatttgtttttctcctcttaatgtcttttttgttgtagggacccattccaactgagaactttaaaggtagagagaaaattatattttcctcctctacagtattaatgtcttattggaatgtgttgtgatcggagaagattgtttatattatatctatttcatagatgattgatatccctttgtaacacagtatggataatcttcatgaatgttctttgtgctcctgaagagaaggtatgttctataatattaaggtttaaagttttacatatatcgatagattctaccttagtgattgtgggctctttttgttttttaggtccgtaaatatttaagtattttccattagcttgttctgccttggactgagagttacacattcaaatctcttattatttgtgtgcttctctcaattattagtatagtttctgcttcatgaaggtggttgctattttgctggtgtatagatcatgataactattaaatcttcattctgaagtttgaactttatcatttttaatcgtttaatagttttcccctgaattctactgttctctataggaatcataacactttttccttaatgtttatatttgtctgggttacctttgcctagacctttatttttaacctttctaaataactttgttataggtatgtctcttctatgcatcatagaattgggtttgtgaggcacttttgaaaactttcttttaataggtgaatcaactccgtttatactcactgatgtgactggtatatttggtctcaaatatgtaatcttttctaatgttatctttagcatgcgtatgacattgtgtatttactgtgtttttctctatatgtgatctgtttcattggattatttctatcccttttagaagttaaaaaaaaaaataaaaaaaattggcaagtggtactggtaaatgaaaaaataaataaaaatttttttttagagatgggtcttgctgtgttgctcaggccggtctccaactcctggcctcaagtgatcctcccacatcagcctccctggtagctgggatcctcctgcctcagactccctggaactgccacacctggctttttacattctttaatcgctttgttaaattgagatgaaattcacataacataaacttaaccatcttaggagggtgatgtcagcaaggtgacatagtaggagataccagccttcatctcctcacaaagggcaacaattaagcagctatccacaaatgaaaaaagcctttggagggctcaagggtccaattaagaatgtgcccagcaacacagtggaacaatggatggataatgacccccgctaaaggatcactggagagacagcctagctgtggcacatcgagatggctaggaacaaagaaattgggaagggccatcattcagctatgcagtcggttctgtcacagcccccagtggcctgctcttcagagaacagcagaagcttttgccactgatgtaaccaacagccatcactgccatgaacccctcagagaaggagatgctgctctttaccttcccacagaaattagacactgttgtgccagtggggaccaggactgccacccacccctccaaccctctacccatcccagaccccagagctgtggctgctctgtgcacaccatgctccagaccccacctccaccactgcgacatgaactcctgtgcctcagacgtcagagacaatgccacagcaagcacgccccagtccctggagcccctggccccatgacagctccatgaacacctgcacgacagacactggagccaccactccaacaggcatgtccctggagcagcagtagccctgctcatacctgcactccagagtccaactccacagccactgtaagagtacccacaccttgcataccattgccaatgaggcagtgagggctcctgcacccaagatgctagtgccaccgccacagcaaagcttggagctgtcgtccccttacacatgcatgcactcacgattccagctccatggccattccacaggcaccactcattgacaccaatgccactgctgctgccataaaaagattttcctccaagatcaggaacaagacaaggatgcccactcttaccacttccattcaacaaagtagtggaagtcctagccagacgaaactgacaagataaagaaataaaagggatccaaataggaaagtagaatttaatttttttttttgcagatgatataatcttaggtatagaaaaccctaaagaccatcataaaactgttagaattaataaataaattcagtaaagttgcaggatgcaaaagcaacatacaaaaaatcagttgtgtttctattcactaaaaacaaactatctgaaacagaaatttaaaaaaactatccaatttacaatagcatcaaaaagagtaaaatacttaggaacaaattaaaccaaggaagtgaaagatccatacactaaaacctgtaaaacattagtaaaaggaatagaagaagacacaaataaatggaagtacatcctatgtttatggatcagaataatcaatattatcaaaatgcccataataccaaagcaatctgcagattcaatgcaatccacagattcaatgcaatccccatcaaaattccaaaaaagccacaaatatcaactctgaataagaagaacaaatctggaagcaccgcattgcctgatttcaaattatattacaaagcaagagtaataaaaacagtatgatactggcataaaaacagccacatagaccattggaacacaatagaaacatcagaagtgaacccacacgtataattaatccttaactaaggcaccaagaagacacaatggagaaaggatagtctcttccaactggtgctgggaacactggatatccaaatgcgaaagaaaaaaagaaagaaaaactggatccttaccttacgggccacacaaaaattaactcaaagtggattaaagactttcagtgtaacaatgtaaagtacatcaaactaaaaatatatgcacaccaaggaaacagtcaacaaaataaaaaggcaatatttcttccacgaaatggaagaaaatagtcacaaaccatgtatatgataaagagtcaatattgaaaatttatacaactcaatagcatgcaaacaaataggacaatttaaaaatgggcaaaagacttgaataaacatccctccaaaaaatatatataaatagccaagaggtatatgaaaaggtgctcaatattagtaatcatcaggaaaatgcaaatcacaaccacagtgagatataaccttactctagttgtaatggccattatcaaaatgtcaaaaggtaacaagtgttgatgaggatgtggagaaaagggatcctttataccttgtcatgggaaacactatgaagtttctcaaaaaatgaaaaacagaattaccatttgatccaggaatcccactacagagtatctatccaaaggaaatgaaattggtttgttaaagagttatctgtactcccaagttcactgcggcattattcacaatagccgagagatggaatcaacttaggtgtccctggataaagaaagaaattgtgatgtctacacacacacacacacactcacacacacacaggaataatcaacttaaaaaaaagcagtgtgggtgccaggtgcagtggctcatgcctgcaatcccagcactttgggaggctgaagtggacggatcacttgaggtaacaagttcgagaccagcctggccaacatggtgaaacctcatctctactaaaatacaaaaattagccgggcatggtggtgcatgcctgtaaacccagctactcggaaggctgaggcacgggaattgcttgaacccgggaggtggaggttgcagtgagacgagattgtgccactgtactccagcctgggtgacagagtaacactccatctcaaaaaaaaaaaaaaaaaaaaagaatcctgtcatttgcaacaatgtggataaacctggaggacattactttaagtgaaataagccagatacagaaatacaaatacacatgctctcactttcatatgaaatgtagtaatgtagaactcaaggaagcagagtagcagagcagttattccaggggctgggaggtaggaaaaatggggagatgttggctaaagggtacaatcttggagttatgagatgaatacgttctgaagatctcatgtacattgcgatggctgtggttaataatgtatatgtaaaatttgcagagatggtggaactgatgtattctcactacagaaaaaaaggtaactatgtgaggtgatggaaatgttaattagcttgatggaaatcatttcacaatgtacacgtatatcaaaacatcactttgtatacattacatatttatatattttacttgtcagttatacctccatcaacaaaactgaaaaaaaaaaactaaccattttaaagtgaacgattgggtggtatttaatccattcaccatgctgtgcaaccaccacctctatctcattccaaaacattttttatcacccagagagaaaaccttgtacctattaagcagttgacccccattttcttctttccctcagccccctggcaaccgccagtctgcaatctgtctctatagatcttccgttgcttttctgagtgtgtggtaaaatatatataacgcaaaatttgccattttaaaccattaagtgtacaattcagtggcattgattacgtttgcaatgttgtgcaaccatcactattatttccaaatctttttcataatcccaaacagaaactctatacccattaagcaataattccccattctctcctccccccacttcctagtaacttctattctactttccttctctattaatttgcttgttctagatacatcatagaaatgggatcatacaatatttgtccctttgtgtctggcttatttcattttgcacagtgtcttcaaggttcatccatgtgtagcctttatcagaacttcatttctttttatggtgaaatataccatgtgtacacaccatatgttgttcagcattcatctggtgatggatacttgagttttttccactttggggctattgtgaataatgctgctgctatgaacattctcatacaagtatctgtttgagtcccagttttcaattattttgggtatatatctaaaagtagaattgttggatcatatggtcattctatgtttaactttttaaggaactgccagactgttttatacaatggctgcaccattttacattccccccagcaatgtatgaggcttccagtttctccacattcttgccaacacttgttattttctgtgttcttgattacagccatcctagtaggtgtgaggtgtaatctcgttatggttttgatttgcatttctctaagaactaataatgttgagcatcttttcatgtgcttattggctatttctataagttctttggataaatttctattcaaatcttttattttgttttttgtgtttttgttgttgagttgtaggaattctttatatatcctgagtattaaacctttatcccttaatcagatatataatttgcaaaaaaacatttctcctattcagtgggttgtcttttcactctctagaaaatgcatatttatttttatatttatggcattttttattttattctactactgttctttataaagataagtcacccctcccctttccttacttgcacatattctatgtgaattgtcagttgtaaatcaaatcttttaattctattttctatttggcaattactaaacttattttacactgactttcctctctctcctcccaggttttcggctttgttgtttctttgaatatgtatgtaagtttcatattgtttctccattcttgtctttatgcttgtcttagtctttaaagattaataaattcagtgctcactaagagatgttttgttaacgtttccatgactttctcttggttggataaagctcatattcaactaaatttcttaggtggggctcccaaatgttgtactatgtcttgcattttcaaaactttttctttacctttaatattggaaggacagtttggctaaatataaaatccttggctcacattttcatgagtttaaaaaaaaatcttttacttttgttttgctttggatgttgctgtcaggctatctaatgccaagctgatttccttttttataacagcttgggttttaaccttgagaactaaaggatttttttttccctttatcaagtctgattattttactgagatatctcatggttggctattctgattcaaaatttccaggtccacaggagatccttccaatatgtatagttagttcttcaatttcagaaatattggtttggattatatttaagtattagtgcagttctttttccattttctgaaacttcaattatatgtatgttgagtctcttttgccgaccttctatagctatcttaatttctcttggatcccttcacctc
